United States Patent Application Publication US 2007/0054278 A1 - sequence listing, part 108

SEQ ID NO: 98034 - DNA, 33743 bp, Homo sapiens
ttggggatgaaatcacaggggctggaaaatggtcctcatgcactgagttctcctctaggtggaaccacaggacaggctgagtcataagtcatgaatttgagtggggtcagtctgaaaaacatctcaaagggccaatcttaggttctacagtgatgatgttatctataggagcaattgagaaagcacaaatcttgtgatctctggccacacgactcctgaacagtaagggattatagaacatatgcccacattttagcagaactcagactccttccataatcctaatcttgggcctttcactagtctcatgaaggtggtttcagccccgaaacaagcaggaagggggtagttttagggtaggactattatccttgcttcaaagttaagctataaaccaaattcctccatggttagtttggcctatacctaagaacaaccaaggacagcttggaggtcagaagcaagatggagtcaactacatcagatatctcttactgtgataatctttgcaaagtggtttcacaggtcccttttcctgttactctattaaagctgctcctatgaagatcaccaataagttccatagtgtcatgtccaatatagacaattctcatttcttattttacccatcagaaaattttgacataacttatcacttcttcattcatgcaacagtagggaccaagagaaacttccccttcagccactgaaagtttgctaaaaaaatcaacccacaaaaggcagattgattggagacaaggcaaattgtataaatgtgtacacagggagaatcacagggtgattacacaacctccaacagggttaagaagcttatataccaccctggcaaaataggctatgggagggagtagaagaggaattctattgaggggattactagggagaatgaatggatcagggaacagagatgaacatgaacattaccctgtcaaagggtgtgttcaagcatggttacattcttggtttttcagggaggagaagagacagttgtttcttttaatgggtctggatcttaggttaaaaaaaaacgttaacttcatctttggaagactcagttggcagggggtggtgccagcgagaccttgaggcttcttcagtttaacatgtcaaaacatattttggggtagcagtttctgaaccccaactaaataactttctttacttggcttctaggattccaccctctgattctatttctttctttgtcactcctcatactcttctgctggatctatctcatcttcttaacaattcaatatgagaggatctagagctcaattgtatgatgactttttctctgactcacttcttgggagacttttttttttttttgagatggagttttgctttcccccaggctggagtgaagtggggcaatcttggcccactgcaacctctgccccccgggttcaagcgattctcctgcctcagcctcccgagtagccaggattataggcgcctgccaccataccccaataatttttatatttttagtagagacggggtttcgccacgttagccaggctggtttcaaactccagacctcaggtgatccaccagcctcggactcccaaagtgctaggattacagggatgaaccactgtgctcggccttcttgggagatctcttccaatcttgtggctttaaatattctatacagtctcaaatgtaactatctatctccaacaccttccctgaattccaggctgcttacttgacatctacactcagatatctgtctaggaaatctctcgaagttaacattcaaaaccaaatgccatgccatagtttttgttgttcttgtttttgttgttgttcttgttgttgttgttgagacgggagtttcactcttgttgcccaggctggagtgcaatagtgcgatcttggctcaccgcaccctccacctccgggttcaagtgattctcctgcctcggccccctcagtagctgggattacagacatgcaccgccacagccagctaatttcgtatttttagtagagatggggtttctccacgttggtcaggctggtctcgatctcccaacctcaggtgatccgcacaccttggcttcccaaagtgctgggattacaggtttgagccacagttttcaattaaaaacttctcctttctggccaggcatggtggctcacgcctgtaatcccagcactttgggaggccaatgcgggtggatcacaaggtcaggagatcgagaccatcctggctaacacggtgaaaccccatctctgctaaaaatacaaaaaattagctgggcgtggtgtcaggcgcctgtagtcccagctacttgggaggctgaggcaggagaatggcgtgaacccgggaggcggagcttgcagtgagcagagatcacaccactgcactccagcctgggcgacagagcgagacttcgtcacaaaaaacaaaacaaacaaaaaaaaaactgctcctttccaaaattccctatctcagtaaatagcaccagcaaggccctgctgttcgggatacacattttggagcaacatctatgcctctctttctcttatatcccatctgcaaatgttgtcaactcagccttcaatatatggtaccaagcccaactcatcttcccctctccaccatccccaccttagcccaaaccatcatcaccatctctctgcttccaattgcctctctgtagtctctttcccacacagcaagagtgacccatttaaacataaatcagattgttacctctgctcattacctctctgctcgaagtcctccaatggttcccacccttctcagaaaaatctttgccacgaattacgaggctgtacgtctggacaggttccagagttttccttagactttgcaaaagttatcttagagctgtctcattgtgctgggtgcaaattttgttttaaagagaaagttatcacatattttctcaaagaagcatctctgaaggcatgtaatatgtttgaaatacttatctcatcattaaagctttagtaaaatgaaaaatctaccagccatgttctctatactcagcgattttccagacttcaacgccctggaagcaatgattaaagtttttctttgccttcaattatctgaagggttgggctgcccctccacacctgtgggcatttctcatcaggtagaatgagagacttggaaaagaaagagacacacagacaaagtatagagaaagaaaaatgggcccgggggactggcgctcagcatacggaggacccgcgccggcaccggcctctgagttcccctagtatttattgatcattatcaggtgtttcctggagagggggatgtggcaggacaataggatgatagtggagagaaggtcagcaggtaaacacgtgaacaaatgtctctgcatcataaacaaggtaaagaaaaaagtgctgtgcttttgatgtgcatatacataaacatctcaatgccttaaagagcagtattgctgccagcatgtcccacctccagccctacggcggttttcccctatctcagtagatggaatatacaatcgggctttacactgagacattccattgcccagggacaagcaggagacagatgccttactcttatctcaaatgcaaagaggcgttccttcctctttcactaatcctcctcagcacagaccctttacgggtgtcgggctgggggacggtcaggtctttcccctcccacgaggccatatttcagactatcacatggggagaaaccttggacaatacctggctttcccaggcagaggtccctgcgaccttctgcagtgttttgtgtctctgggtacttgagattagggagtggtgatgactcttaacaagcatgctgccttcgagcatttgtttaacaaagcacatcctgcacagcccttaatcatttaactctgaggtgacatagcacatgtttcagggagcacagggttgggggtagggttacagattaacagcatctcaaggcagaagaattgttcttagtacagaacaaaatggagtctcttatgtctacttctttctacacagacacagtaacaatctgatctctctttctcttccccacattatcaagtcaaacatcctctcttctgtgaaggcttctctttgtgcactgccctcctactccatccccagtcccagtaccctgcagaataaaatgtttctatctctgtctccttagctttgtgtccatacatagatattgaaaggaagtctgtggaacttgtgtctgccttgtattactactgtggaagggacaataaatttattaactcatatttttaaaatatgcatacatactgtatttaacctaagacttttttcatattttaaagactggaattgagatatgtctttcaatctacatgtttagaaagcataacttatcagtttttttttctttcttggtggtacataaaataatggtaccttaaaattgatgctatcttacattttattaaatatggaatagaaatcttatgtgtctgtgctcctcattctttatagcaaaagtttaatacatgacatcattccatatgacagttgattatttttgccactactggggctcaaaccataataccccaaaatatgatgttttggcatgctgagtctttggggtttgtttgttttgagatgggagtctcactctgtcgtacaggctggaatgcagtacaggctggaatgcaatggcatgatctgggctcgctgcaacctccacctcctggattccagcaattcttatgcctcagccttacaagtagctgggattacaggcacctgcaaccacacccggctaatttttgtatttttagtagagacgggttttgccatgttggccaggctggtcctgaactcctaacctcaagtggtccacaacattggcctcccaaagtgcttggctcccaaagtgctggattacaggcatgaggcaccacgcccggtggcatgttgagtctttgaattaaaggaaattaaaagggtctcagaaagaagcctaaaaatcaaggcctctctctctcaccttcctccttccttttgtctctctgatactcttactttttccaagcacctgaaggggctctcttttcctgcacagccagataaggaatttccttatctgacagagaaaactcttttccaaagaaatgcaattgtcttaaaacccgttccttaggaatcgcattaaataatcagaagagattaatcacccagagaagagacaaaaactgaaagtcatagccacactgagacttttcatagatacttctgagggtagctccaagagattacctgggaaactttacctgtataataggacaatttttgttcagagtgaagtttcacagcttgtccacaagcgattgtttgtacttctgtcccactgaatgtccaaggagaatcatttgcaaaccactgtctggctttcgggcccattcatacctatctccctctactcaacaaagaagggtatacaagcatctggaccttaattgagttattgagtaatcactcttctgtgatttttccctatgcacgttaagcaaattttgtatgcctttttctcctactaatctgtctacttagttcattccagcaactttcagagggcaaaagtaggagctttccctcttgctccctacaccacgttaaatttaaatataaattaaatgatgtgggaatgggtaacctgctcatttccaaactgcaattttcataggtatgaaaattctccacaaactacaaaaccatgacactccaagggcccaagaacctaggttggacagctcacttagtgcaggtaaacgtgctccacccatctcccagcccgcctgccccctcacttaggtacaggtgcaggtacaggtaggcaagcaaacgtctattggctgtggacttaacaggctcgcccacaggtaccttccgagcatgcgtggggaagtagcacgcaggcgcggcacgccccgcgcatgcctggtgcacagagtstgcaggtcgggcggtagcgacaggycagagctgcggcctgagcagccagcgtccggcatgaaggtctggggtctggctgctgcctgcttcttgctccagcaccatggaatgcctgcgcagtttaccctgcctcctgccccgcgcgatgagacttccccggcggacgctgtgtgccctggccttggacgtgacctctgtgggtcctyccgttgctgcctgcggccgccgagccaacctgattggaaggagccgagcggcgcagctttgcgggcccgaccggctcygcgtggcaggtactgcccttccccggcaacagccttgggacgctggtcttgcagtgaccttagactgctgccccagccgtccggcgcggcgcgmctgttgctcygcgccctccgcaggcctcggcctcccgcgtgtcctgtgagcttgcacaggcccgcgggccgagctgcgtcccactcgctcagaatgcgaccttgctatgtgcgctgtgccctgccggggtcccagcggccaaccctctgccttctcctccaccgcccttgctgcagattatgtaaccataggaacaacctaggaatcgtttacagaccgtgatcacgttagttaacacccgcttaagtgctcttgtaagaggttttttctgtgttgtttttgagacagggtcttactatgttgcccaggctggactcaaactccttgcctcgagccatcctaacgcattagcctcgcaaagcgctgggattacaggcgtgagccaccacacctggccgagaggtgtttttaaacaaggatttcatctgttcggaagtcataagtataaattaatacttccctgttttctgtttcttcgttatggacacatttatacagttgtccagttgcacggagattggggacgcacctagaagtgaggctaaagactgagttgtttctgagaacgacttactttcaactacagtactctataagtaaacagccagggagatcggattgagaaaaaaaaatcttatttgctgtttattttttcaccaaatgttgaagcatggtgaaaagttaagattttcacaaatgtgagtgcaaatatttgaggaataaaaggtattgaaatgaatgactttattaagaacatagcagtgtcctcaaatatgttttctcarttgtgctctcaaaagcctcccaaagtaactcctcgtcagcacctcattctccacttattggagaggctaakttgggttacatgctctgcaccctcaattgataatgcttgggaatccagtttcagcaagttggaggaaacttttaggacaagcattgacgttcacaatctcaatcccggttacactctaatttgtgacattaaaacattgaaaggcatttgtaatcagcaaatgccttttacctttattcatcttacccttatagtgataatttgtattttgtaaaagggaaatgaaacttcagatactaacaaattacaacaatcattacgtgtatgtagtagaaaaaagatcagaaataggtttttttttctacagtctctggaatcagtgtaattactttggaagcacaaaacagtgtcctctgtcagtcattaaatgtacttgattatacttcaccgctcacttcgactcagtctaatcacgttttaaatagacaattttaaaataaagatttgtcatttcagytcagtgggggtatttcataagtattcactataaaggatatctgtagaaaagaagtaaaatcataggtttcataatttatgagccagtcaactggaatgcttgaaagatcaggtggtacttaggacctatgttttctaaaatgtatctactaccaaatgtgcatgaagagtcttttaaattatgcgaaaaggaagaccagacattttcttaaatctcagaacacgatgttgcacatttgttcatccaactctgagataycagtaataattagaaaggtaaaagggtgattggaatccatcagttattttaatgcctcacctaagccattagttttaaaaatcattccctgccaaacctaagatagtcactaacagatgttaaaattaagaagagtatttcttcttttcttataggaaaaatatttaaaaataataaartagtctgaaggcctccacatactttgagagttgtattttagctctatgtgaaaaccartcatgtgaccacaggaattctcttaatttattcttcaggtgaagtgcaccggtttagaacctctgacgtctctcaagccactttagccagtgtagccccagtatttactgtggtgagtatgtacagtacattggaaatcgtacagaaagtgcttcccatacataagttaactcgttggactgttggccaagatactacttattttgagctttataatcatcatagctacatgtcktggctgttgtgcctggccagtgacctaagtgcctgctagatttgcttaacaatgatcttgaacctttgctaatgactgcagctccccttttaatactagaacaggtcaatcacaattcagagccataaagaggcttgaacctatgttctgcaagataatacgcaggcagaagcatyttgaaggcagcagagagtagtatttaaaaatgcatgctttgaaaggtcatgatctctaacttttctctgaaatggttcgggggtggggatgaggggggaaatgaatgaataagataatgtatcacacgtatttttagagaaagaaggctgttggggcaaaatgttaacaaaggtgactctaggtgaaagctctatgggaattggttgtaatattcttgcaacttctttgtaggcttttttttttttttccaaaaaaaaaaaaagtcttgataaaaaggtgtgccggccgggcgtggtggctcacgcctgtaattccaacactttgggaggccgaggtgggcagatcatgaggtcaggagattgagaccatcctggctaacacagtgaaaccccatctctactaaaaatacaaaaaattagccaggcctggtggtgggcgcctgtagtcccagctacttgggaggctgaggcaggagaatggcatgaacccaggaggcggagcttgcagtgagcctggatcatgccactgcactccagcctggcagacagagtgagactccatctcaaaaaaaaaaaaaaaaaaggtgtgcctattctgagccagacttcctaaattccaatctcactctgcctcttattgactaggtggccttggacaagttacaataacatctttgtgccttagttttctcatctgaaaactgagcataacctaccatatagaattgttatgaggattaaattaactcatatatagaaagcccttaaactagtgcctcacatatagtaagcctcaaatatatttcattaggattatttaggcttgttaacataagagcttttctttataaactatataaaattaaataacccccagaattgcgtttaaaagttaccactgttattcattgttctggaagagttggccaatttagttaagaatacaaaatcagggccaggcacggtggctcacgcctgtaatcccarcactttgggaggctgaggtgggcatatcatttgaggtcaggagttttagaccagcctgaccaacatggtgaaaccccgtctctactaaaaaacaaaaaaattagccaggcgtggtggtgcacgcctgtagtcccagctactcaggaggctgaggcaggagaatcgcttgaacctgggaggtggaggttgcagtgagscaagattgcaccactgcactccagcctgggcaacagagcaagactctgtctcaaaaaaagaatacaaagtcaaacgtgaaatactgaaagttagttctttgcaggtgaaataattgcaaagaacacttaagaaattcataaagctatggaatctgagaaagaaaaatttaatttgtgctgtttgaaatagtttagaaagtgagctggttacaaagtaaatatttttttctttataatttgtatgatttaaaaaatttttttaagttccattaaagaaaaaaagggtacatataaatattgagatgcaaaaatattcagcatatgttgctaatttggaaggagggagactgcaaagcagtatgtataagtatgttttattaggaaaatgtttggaaggatattcagtgaaatattgacatggttttctctaaaatttgtcatttcaggtgattaatatagttttatgttacgtatattttcaaattttctgcagtgggtttatgtatttgtgaaatataaggctgaaagctagactattacacaaatataaagctttctttgatataaattttcctttartgttctatggaacttatatattcatattaattttatttttgctgatgagaagcaagataaaatatatatattgtgagtttttattgtgtgattaacacagcatgtatatttccatggtagtaacccaagacctatattgtacttaaacctgtatgttggagtgtctttctgaaatgtgtctgtcgtagtaagtagtacagctcagcacatagtgattcattaaatgtttcacagcttcaaacttgactgtggataaacatcactgaaagatagtcccctactttgcaggaaataggtgcattttctgtatcaaatcctctcttcaaactatcagaaggggttctgtaaatctttattgattctgcaacacccaccaaagagactttggcctcatgtagacatttagattcacaaggcgggccatacttggtcccagtctactcagaaggataagggacaggagaaacaacagggtagtgttaggtgtttcctcttcaaaagaagtctttgcagccatccaggggcttctctggtcctctgagtgatcgctcagtgacaaggagataagattctcaaaggtggatgtgagattcatcttggctcgaatccccatgccccgtagtgacagtatcccttgtaaccatcgcaggggcacagtgtccaggattctggctgggaacatggccacaagagccaccacaatcaggaaagggcaaagagagctattgcttttcacctgataactgtaatttgttcgtcttcccagtccagtgcagtctaccagtcaatggtcatttttaccataaggattgttacctagtaacaacacaactgatactcctttatcaactttctagaggaaccaagatagaaagttaaacccaggtctgatttttcctatcaaaggaaaaaaggattttaaaaaaacccttaactcataactggatttaatctaaagaaggtcagtaatggtttatatttgcatttcaacattttggggatattacttamaataccataaattcttaactaaattagcaataccataagtagcattctaatttgaaagaaaatcataatttgttttattctctattttcagacaaaatttgacaaacagggaaaygttacttcttttggtgagtgattagcattctaaatcattttttaaacatttaatgagtgaatctgatagaaatcaagaaattgtagtattttgagtaaaatattctttgcatatacaggtgtgttgaaagagatctttcttcagcatttgtccatcagtcttaattggagctggcaatactcagactgtgtgtattctcccagaattgttttcttctagcaggagccactttttgctctaacaggctattgaaggaatatttgggagagcagaggctggtgtagaactggagcccagagacacactctttttctcttttgtctctcttgttggcgtccctttcactgccctcattcattctcctgaagcatgtttaaggcagagtcacataataccactgacattgcagtgggtgacaaaagatgaacagggccatgtcactgcatggcagccacatggaactctgctgctgatggctctctgtggacagctactttaaaaagtgagactaggcattactttacagtgtgacttcagatgtgagtttcacatctcccttgagaatgaatcagtctcaggtaataaattcagcttttctcatttttgtattagtctaagaacaaagaaaatcaagcttatctgttcacatatataaaatactgaagatgatgttgtagtaaaaatagaaaatatagttgtgtacagtttatatttaagagagataacctgtctctagagctggacatttataggttctaatgatgcatagttgtggtttctgtattagtctcaagggtcttctaagtagtgagaaagttatgaggtatagataagaaaatcattagtttgactctatttagcccgagtatgttttctaggtaaaaatggatattaaaagacttaattttagtttttgtttctggtagtaaccaaaaattgtcttgatggtggtgggaggactgctctgatggaaaaatctaagccatttaatgtatttggtttagccctctctgtttrtttcttttatagaaaggaagaaaactgaattataccaagagttaggtcttcaagccagagatttgagatttcagcatgtaatgagtatcacagtcagaaacaataggattatcatgagaatggaggtaaaatattttattttcatctatgtttctccaatacaatcttayaaaagttaccttctaactatcttgattagtatctaggttaaaagtaattttggaatagaaatagctacctgaaacataggatgttttatagcttaatatgctattatragtagaactcattttatatggattatatgcacatgttcaataggcataacactgctgtgttttaagttggaaaagctctgactgtggtgttcattctcactgttgggatttactctctagttctggaaactataagacaatcctgatttataatagatatatatccaattgtgtacagttacatgtaattatagtataacctgagctaccaaaaatgtattctggctttctaaatagcacaggaatagacattaaattttatagccttaattttttttttgagatggagttttgctcttgttgcccaggctggcacgatcttggctcactgcaacctccacctcccaggttcaagcaattctcctgcctcagccttctgagtagctgggattacaggcataagccaccaaacccagctaattwtgtatttttagtagacatggggtttctccatgttggtcaggctgctctgaaactcccgacctcaggtgatccacctgcctctgcctcccaaagtgctgggattacaggcatgagccaccgtgcctggccagtttaaatttttttaatggaaaactttctgaaatatattgtattttcccttacctattcagagcatgccaaataataatttgactttctttagtgattcagagttaatgtgggtttcagttattttggtgggctaatgtttaggttcaaaaatagatgaatggtattggccctgtagtgggtatgagactttcttcaaagagtctttgatggcagatttttgttcatttttctagaactaatcaaaataataaaaaatgggccagtaktggtagcatgtgcctttagtcccagctactcaggaggctgaagtgggagggtcaccagagaccaggagtttgtgaccagcctaagcaacatagcaagatcccatctctaaaaataaataagtaaataaaaaatactttatcaaaaatgaagcagtcttctcccatgtgattttcttcagaaatattctctactcttggaatcagtagctagcattcttcaaaacagtgtctctttcatggagagacagacaggtatgtgaaaaagcaaattcagcagaatgataattgtgtaatctaactggtgggtatatggtgttcactgcaatctttcaacttttctgtataaaaattttcatgaggctaggttgtggtggctcacatctgtaatcccagcactttgggaggccgagaggggtggatcacctgaggtcaggagttcgagaccagcctgaccaacatggtgaaaccccgtctctactaaaaaatacaaaaattagccaggcatggtggcgggtgcctgtaattccagctactcaggaggctgaggtaggagaatagcttgaaccctgaaggtggaggttgcagtgagccgagattgccccactgcactccagcctgggtgacagagcaagacttccatctcaaaaaaaaaaaagaaaaaaaaattcatgatagaatgttggaaaaatgtaaaaatagaaaattatctctaatttctatatcactgataaagtggctacctttatctacttttaacatacaagataaccagtctttttagaaaaaattctaatttcatattgttctaaattagagtagtaaggctatgtttcatcttaatttcagattttgtttatatgctttagtggtgttttaaaaaggaaacttccatttgtgccaaactaattatgattaaactaaatcttttctaaaagtctgctcaatacctgacttttaggaagaccttatcttgttccctttatttatttatttattttttccaaaaaagaaagacggagtctcgctctgtcgccaggctggagtgcagtggcacaatctcagctcactgcaaactccgcctcccaggttcaagcgattctcctgcctcagcctctgaagtagctgggactacaggtgtgggccaccacgcctaactgatttttgtatttttagtagagacggggtttcaccatgttggccaggatggtctcgatctcttgacctcatgatccaccttcctcagcctccaaaagtgctgggattacaggcatgagccaccatgcccggctttctgggggtattttttggtgtttttttttttgtttttgtttttttttcatgattaccccagaagtcttagtaaatatataatttatgtgaataattccagttttattgagagtgagttagcagtatcaagacatatattttttaagtttcttttcttttgaaaaaaaaaaccttgatttttttgaaaaacaaaaatgaacactgatttggtttagtcttaatccacaattagtaaagtattaaaycaaattttatgaatgttcttttttcctacagctctacaatttgcatatatatatgtatgtatacatatatatgtatatacatgcatgtgtgtatatacactcacatatttatatgttttggtttttttttttttaacagtatttgaaagctgtgataactccagagtgtcttctgatattagattatcgtaatttaaacttagagcaatggctgttccgkgaactcccttcacagttgtctggwgagggtcaactcgttacataccctttaccttttgagtttagagctatagaagcactcctgcaatattgggtaagtctgtttttatttagcttcttgggtttattctgattttgaaatgtcattgagtgggaagacaagttggggtattgtttcaatggcatgtcccctgaccacatcctgccccgaaacaagtcgtctctaaggatcctacatggagatatcacttaattcttaaatgttatgacccagtcaaatagaactaaagactctatgtatattataaaaatgcttgacatgtgataattattttattaaatcatttcatcaagtcattttttgatttgtttgtacaatcctttgtttgagccaggtaaatgatgcatctttttgagacctagattgacataggaatcacgcacagttcttccagtgactcctcctttaaattaagagtccttagatgtctgagactcctgtcaggctctaaacaagggtggttctctgcttccctgaccccacaaatctttcattatcttttcttcctcctgttaagtcaggatggtactgttcaggaactggctacatgcaagagttggtgctgggagcatactaaccagagtgggaggaggagagagggtagagaggacatgaggtgcattgggttgggtgaacctggcacacttttcttttgtctgccttgctctgaaagaatagatggctacacttcctgcttggggtaattaatgagcaccagctagcaccagccagtgagatgataagtagtgggagcccagttaccaagcagggggaaagcagaagagagaaagaagatgtaaacagtggtaagtcatgggctccacaggctgggtaagctctcaggagctcatgctgttaggagaaagacagggatcttaaagggagcaggaggggaaggagagaggctaggctggcatgggtctccggcctagagattggctgtggggagaatagagagggagttcaggatgtctgctgggatacacattcttcttcctttaaatggggtcccaggaagatttccttacgaaacaacactacatagaagcaagaccagccacctctcaaaagggataagttttcgaacaagggaaagctccccaaacccacctaagggaccaagacataccatgagtagatatgcctcacaaataccctatctgtgaccctcagcagcctccccaaccactacaaaagtccacaccttgctgagcagagggtttgatatctcttagattaaaagatgtggtctgcctatttggctgtccagtcttccctcccacccaaggacttcttaacccggaagcagttcctctggagacgaaataaacaacatgtctgcagaggcactgtgactctggacttgtttccaaataaaaaaatctgtttcacagtaattgtgcttctgagataaagactatatgctgtaatttacgtcatcagttttaccgcttgatttagttagtatatgctatttgccaactggcatggaagtgtttcagtattttaacaactatatagcaggattagtgcatacctgccgaatatcaaatatcaaaccatacttgtgttaacctaaatagtctatttttgactttactctgatatgtttatgttttaaagctcaagtttttattttcaaagagctttgtaggaattttgaaccatattctgtttacagagaacacaggtattactgaaagcttgtgttttaataatagcagattttattttacttgatccctcattacttcataatgaatgtctataggagaaagacttttttttttaaatttttttagtatttattgatcattcttgggtgtttctcggagagggggatttggcagggtcataggacaayagtggagggaaggtcagcagataaacatgtgaacaagggtctctggttttcctaggaagaggaccctgccgccttccgcagtgtttgtgtccctgggtacttgagattagggagtggtgatgactcttaacgagcatgctgccttcaagcatctgtttaacaaagcacatcttgcaccgcccttaatccatttaaccctgagtggacacagcacatgtttcagagagcacrgggttgggggtaaggttatagattaacagcatcccaaggcagaagaatttttcttagtacagaacaaaatggagtctcctatgtctacttctttctacacagacacagtaacartctgatctctctttcttttctccacatttcccccttttctattcgacaaaaccgccatcrtcatcgtggcccgttctcaatgagctgttgggtacacctcccagacggggtggcggctgggcagaggggctcatcacttcccagacggggcggccgggcagaggtgcccctcacctcccggacggggcggctggccgggcgggaggagaaagactcttacgagagttagctccttgtcaaccaaatctgtgcctaaagatarcatcatacatagttctttgaacccagaggatctagtttttgaatcatctggaataggcattctagaattatctaygttctgaaatgttaccagcatttcaarctactacagatttctgtatttaatcagaggattcactgatcctgaatattctaaaaagattgttttaattcttatgaaaggtcatgttgttatctagatcaacacccttcaggggaaacttagcattttgcagccactgatccttgagaccttggatgctttggtggaccccaaacattcttctgtagacagaagcaaactgcacattttactacaraatggcaaaaggtaaatatggatgatgtatcacattgggagttggagacaaatatcttaaaatcaattattaacattttgtttcataactttttttaaagtatgaaagtagcctaggtgggaagttgagctaaaaggggcacacaatctactgtttgttgaaaagatactttgcatgaaatgtcatgtaaggctcttttccgtatgtgatctcatctcatcacccattcaatagttgatattgtcttcattttgaagatgagaaaattgaggtttgagtaactygcctaaatttatatggctagtaaatggcagatctaaatccaaattcaaagtccatgttgttctttttctttaaaatcataatgcattccagaatttaataacaatattatatatgtatcataaatagaataaacatgctctcaggagttatactcccgaaatcccttcaagaattaacatttaaaattcctgaatcagtagtttcttatccaaaaatgttggagtgtttttatcagttaagagtaactagtctgttctatattatcactgccatgttgattaataaaattcccaaaccaaaaatcttaaattcacaagcgatttatgtttctgagataagtaatgtatgatgaaatttatatcactgataattttaccaattaatttagatctggtttgggttttttgtgggtgtttttgagacagggtttcactccgttgcccaggctggagtgcagtggtgcagtctcagctcactgcagccttggtttgggttttttgtgggtgtttttgagacggggtttcactccgttgcccaggctggagtgcagtggtgcagtctcagctcactgcagccttaaccttcagcaatcctcccacctccaccacccaagtagctgggactgcaggcacatgccaccatgcccagctaattttctaaatttttttgtagagacaagatctcactgttgtccaggagggtctcaaactcctgagctcaagcaatcctcctgccttggcctcctaaagtgctaggattacaggcgtgacaccatgcctggccaaattgattcttaatttgcctggtaaatactcaactttttttttttttttaaataagtcattgtttagcatgaatgtataagataatatatttgataagatactctaaaaacactattatgaaatgttcttataagtttattctattgatcatttttgtgtatctatttcttatagtctatcagagttagaaacagatattaaaattttcaaagagtcaattttggagatcttggatgaggaagagttgctagaagagctctgtgtatcaaaatggagtgacccacaagtcttgtaagtatataattatactttgttatttatttccttagagtaaatcttttgccttttccacttcaaggtgatttttcatacagaatgtaacatttttctggactacagaatatagagatttttcatccccagtttcccttttttcctgtgcagtatcgtatctaattcaatgtaattctatgagtatgcatactgcatacccaacactgctgacatgtggtgaatataaacacacagttacctttatattcaagggactgaccaccagattggcatatacatctaccaaaataacttacctaggaagcagagtgggagagaaatttacatgggggagggaaaagatggggtaaatacacgagtaacacattaacatggattatgtaagttcagtctaatgaaaatgttaatcttataaaccttttatcttttatgaatttagaaattgtttatgcttcttgtgcacactccagctaaatgtttacttttaaatacccaaatattttgttattgtctttctagagcagtatcagaaattaatacacctttgtaatgagtttagtttccacagtctgtacagattttcttacagcactttgaaaaattggttatttatatcctgataaggaaataataagataaagggggctatataacatttggtagatagccgataggtatggtagcagaaactgtttgctttgcttaggccaatctgtcaatctgtctctaatatgctttatgatacaggtacctcttcagagtacttcattcccccttacccttcttggtagggtaggggagcaaagttattactgatatcattcaaaaacattttctttatatgaaatcacattatgtacacacctcaaaaggaartggtcttgacatttttagttgtggattttgttttacctgatagtgrtattggctttgcactaattcatctgcattcacatatctggattttcctgtaactggcagcatgtatctgcataaaaatctcttggattggggccatgtaatacagtgacaccaactggtctacataaggatggaacctctgtcctcaactcatctgtaaagtgttttggatcagttgacataggtactcacagattggccacaacaatagaaaagacaaaggcagccaggcgctgtggctcacgcctgtaatcccagcactttgggaagccgaggcaggcagatcacaaggtcaggagttcgagaccagcctgtccaatatggtgaaaccccgtctctactaaaaatacaaaaattagctgggcgtggtggcgggcacctgtagtcccagctactggggaggctgaagcaggagaacagcttgaacctgggaggcagaggttgcagtgagccgagatcgcgccactacactccagcctgggagcagagtgaaactccatctcaaaaaaaaaaaagacaagacaagacaaaggctagcttttccactggtagctgaatgctatatactaatttaggaagtttttgtcactaagtatatgatacacatgttgggagtatgttaattattttctcttttaattgaagtgaaaagagcagtgctgggattgaccatgcagaagaratggagttgctgttggaaaactactaccgattggctgacgatctctccaatgcagctcgtgagcttagggtgctgattgatgattcacaaagtattattttcattaatctggacaggtaagaaagcattatataaaactaagtttttttaatamaataattataagaaagtttttaaggaaatattttgtgaggaattacgccatcattatcatctatactacattattattwttttttttgttgtgtaggtttcatccatgtggtctgtatagatttgatgaatgtgctgtatatagttagtgggcccttctaatctgaataggtgttctcctctccagccaccgaaacgtgatgatgaggttgaatctacagctgaccatgggaaccttctctctttcgctctttggactaatgggagttgcttttggaatgaatttggaatcttcccttgaagaggtgagaatgtattattatttctaaaacttgggggttttggccgggcatggtggctcatgtcagtaatcctagcactttaggaggctgaggcaggtggatcacctgaggtcaggagtttgagaccaacctggccaacatggcgaaaccctgtctctactaaaaatacaaaaattagacaggcacggtggcaggcacctgtaatcccagctacttgggaggctgaggcaggagaatcacttgaacccgggaggcggaggttgcagtgagctgagatcgcgccgttgcactccagcctgggagacagagtgagactctgtctccaaaaaaaaagattgggttttgaagatcgatatttttaatggatttaaaaaataaaggctgggcaccttggctcaacgcctgtaatcccagcactttgggaggctgaggcaggtagatcacgaggtcaggagatcgaggccatcctggctaacccggtgaaaccctgtctctactaaaaatacaaaaaattagccgggcgtggtggcagacgcctgtagtcccagctactccggaggctgaggcaggagaatggcatgaacctgggaggcggagcttgcagtgagccaggatcacaccactgcactccagcctgggcgacaggacagagtgagactctgtctcaaaaaataaataaataaaaagtctaacctgtaaactaccatggtgaaataaaatatataatgtaactcacaattcaggcagtactgttggaccatgttataacctagataaatacagcctaggttactttgtttcccaaaacatataattacagatgggaaaggtgtgataaaacagtgtctctgtgaagcagtgttaatgaagagtttttattttttaattcttacatgtctggcaacgtaccaggcggtttgcatactttatttggctcaatcattgcaactctgaaaatagatatattatccctactttgtagatgagaagactgaggctcagaacatttaacttgcccacaggcatagagctggaaaaataacagaattaggacatgaccccaaagacttgcactttctactgctctgttgcctttctgtattaagataayacttaactcccagagtttttcatttcactgtggttttgtacagtcatccctcagtatccaagaagaattggttacaggatccccacagataccaaagtctgtgggtattcaagtctctgatataaaatgacccagtacagtcaaccttgcatatctgcagatacagaacccactgactgtgttttcacagaatagcttrttgtaagttttctagaactgaacctggatgtgcatctggcacagtgtgatgctggattctgtgtcctcattagtctaacgagtctactctgttgcccacatcacctcccattaggaccacyatgcccttttaaaaagtggtctttataagatgtaagtattatgacacccttctgcatacaactattcaatggcttttgattagccttaggataaaaatcccgtcctgccgcaccgacttgtccatcttgtgggtagccactygttactacctctctcagtgtccttcccagacatgctgcttccactcctctcccctcagatccccgttttgcttagttacttcctcctcatctttcaggtctcaaagtagttgtcccttcactgaatgcaccgacaacctggcccagtaaagttactttgtcgtctgcrcccaaataatcctacccttccatctgctacattccttaaatctgcaatcccttgttcaaagcctgcaaaagagcatgagctccttgaagcaaagacagtattagtcatttttaatgtaaagtataaaagaaaaggaaatacatgtgttcattcatctcacaaatacgtttttttattgcctgttatataccaagcactgctttaggcccatttagcagtgagtctgcccttgcgtaggttatattgtagtggaggagagagttcataaacaaacaaagtatgttaagtgctaagtgcctcagagaaaaataaagccagagaagcggatagagaatgttaggcagtaggatgtgtggcattttagagatagggtggtcaaggaagatgtaaggcggtaacaccctggtggaggcaggaagatctgggggagagtgttctaagtagagggaaccacagaagtaaagattgaggcaggaacgatctgagcttgttcatgaaatggcaagaaggttggaatggttagaagagcatgagtcaggtggaaaatgaggtcccagatgcagataagtatgatcatgtcagtgacgtagagcgtggtaggggtttggatttctaagtgggataggaacccactggaggtttgaactcaaatctagatcattggaaagttcagaagcaagcagaataccttgtgcaacataatccagccattgacattctcaaaagatacatccaaagacctttacagattccctaagtgtgactacaggactttctctacaagtccctgtcttttctctaaatacataatcatgtttatgtatatatactcaatctacaagctaactccattttatactttgatatttttctctcacttaattgccaacttttcaaaacaatggaagatttttcaaattcctttcttatagttttagtatgtgcaatcctaggtacagcacagcccatttgtaatgagataagagtggtaggtggtagtgagctacgcttgctcagtagtaggctgaaaagattcaaattaatgtcttatcagaattacaaattacacatctttgtaggtgtcctgaagaatagttgaaaacattaaatccatggatgtcaaatgtctttatttcgatatagttaaaattaatatttgccatggtgaatctgagataggaaaaatattttaagataatttcagacttctggaaaagttccaagaatagtcaaagaatttccattttcttaaaccagattccaaatatcaacattttatcacatttgctttatcatttctttgctagcatactttattctctaaattatttgagactaagaacaaatgtgatgttcctttactcctaaatgtcttaatacgtatttcctaaaacatggacatcctcttacataaccacagtgcagctatcaaaatcaggaagttaatactgaagttattttccaatctaaagaccctactcagattttgccacttatctcagtagtgctttttatcacaaagaaaatcttagatcacatattgcatataggactgggggttgtggttcacacctgtaatcccagcactttggtaggccaaggtgggcagatcactttaggccaggagttcgagaccagcctgaccaacatggtgaaaccccatctctactaaaaatacaaaaattagctgggcatggtgccgcacacctgtaatcccagctactcaggggggccgaggcacaagaatcgcttgaatcaggtagacggaggttgcagtgagccaagattgagccactggactccatcctgggtgaagagcaagactccatctcaacaacaacaaaaagaggaggcagatttctgttcaataagtgacatgcatttccatcagtgatagctgatcagttgtgtaacaggctatctttgaggaagtgagctctcaatcattggagccaatgataacagcatagctataaatgggattccttccttgtgagasattaaatttaaattctgtgattctgtacattaactaaaaacagtgtgctgcaaaatattaccactctgaaaatgacggtgaggaagaatgtttttctaagtctgaggttcccaaacttccttggatcacgatgcccttagtgtcttagtaattttttcacagtatcggaagacaaaaaatttattatgttacagattcctttatgttatttcccttgcaactttaaaatattctgaggtgctatcgtgcccagcatagcaccagacattcagctcacagtttgagaactgtggatataagcaaagaccttaaattgcgtgtcctctggcatcatgacttaagatttgcacgcatgtaaacaaaggctgcaaagaaacacaaagtaaaagcagtacatttggcatatagatgattttaaaatatttaaaaccttttaaatcatgttcttctcctgctttattctgtgggtgctatcaaggcccttgtttttcttagttcctttctacaggaaagagctgtacaaataacataaggctttcaaactctggggcagtaacaattcaaggaatcttctaaggaacctggcgttttgcgatggaaatgaactgtgttctcttttaggaccatagaattttttggctgattacaggaattatgttcatgggaagtggcctcatctggaggcgcctgctttcattccttggacgacagctagaagctccattgcctcctayggtatgaaggatatggttcacggcggtattgtggaagggttatgatcatgggccctaaagtcagagcgcctgggattaagttgtcacaggcactatggcccttgcgagttgctttctcaracttccttcagtttccctatctgtcarttaagtcggtattacctgcttcayagggttatgggaagaattaaacaatatgtgtaaagcacttactagcacactgcctaacacaataagttagaaatataatttgtgtagaactctgacaacatacatttaaacagatgttagtaattctggtataaggtttgtcatarccaaatggaaatgtaggaaacatttataaygttcttaaaagatagaaaattcacctccattttctttgtacttgaagatgrcaccactggaataaatacttaagacactgatactgcttatagtcctttcttcactgagtagttacataatacatcattttactagtggcttttcttttaaaaaagatactaaaattaatacttctgctttatttagatggcttctttayctaaaaagactcttctggcagatagaagcatggaattgaaaaatagcctcagactggatggacttggatcaggaaggagcatcctaacaaaccgttaggaacagcsccgtggatactgaagttttttttatggtagttacaggaaacttctgatactctttttattattttcttgtatagagtcagacacttgaaaaaaactaatgtttgaagacaaaaatattttggcagtcacaataccagaactggattgcatttccagaattctgagttaaagaaacaaagtatttgctttgtaaaaggccaaaattctatttcctacaaactttaaatgctgtttttatagatgtgatatgaggcaacacaagcacagacagttgcatagattttaatttatacatatcaagaaaagtgcaatttcatgctgaatgaagcgtaggaacttgacaagcccataggtagctatagttctttgtcagtatagggaattatgttcatgtgaatttcctgattctcaggtgactaaaaagctagcattctatgtattaaccttacaacagactctgtaagtttgagctttaaaaaccaaactttgacataaccttatttyttgtatttgcccccttttttttataaaaggtgaataaaaagaaataatttaatatcaccattgtatggattcctaatcaagatttcacgttctcagcccctgagactagttttctttgctctctgtaattagagcctttggaagcaaagttgaaaggaagtatttccattctgttactgttttgtagcactttgtccatttattgatttttaaagtagatatttagataccacccctgccctgccccaaaaagaaaaatgtttattgtcctgctaatctatatgcctacacctcagaagctgacagatgagcttcctaaaacatgaggatgaataaatgttagaactgtgatatcttctcatttccacagagatttgggtttaaaacaaatggctaatatttgtaagcctgaaagctgccatcctctttaacatcctacctaccttttaaaatattttctggaggttaagtacagttaggcactagaacatttgttaagcctcccaaagtagtgtgcatggaagattctagagtgtccagctcttgcactacaaatgtaataataacagaataaatacacttaccctgatgatattgagggtacatgattagcctaatgtgatgtcatatgaggaagtttaggagtccatttttcaggtggtttggtgataggaataaaaatgttactcccgtcgctgatttggaagaaaaccgatgaagtacaagtaaggtttccccactcctgtgtgtggtcatgggaagccattagagggaagctggagaacagaatggaacaggacaggctgggctagactcgagcacgcagtggcccctgtgccaccacactgtgggtcaggaacacgcgtcatggtgttcttgtcggaatgtgaacatacagcaccctctagcattacgaatctcttaggatttttaagattgtatttgataatacttatatttcacagggcacacttttggcacacctcagagcacactgctgctattttgggtcgtatcactgtaaaatacataataagtactacttaactgtgacatgaagaattggaatcccagagggcaacatttgatttgactaagatcaggcataagatagaatttttgtcatttttccttgcagttttattgacttagtttatgagcttggataaaataattttttgatgaatcatgtcaataaaaggaaaaataatgtaactacctcataagtctgataaaaggaagttgctagtgttttatagaatttctgaaggtggttaaatcaagtatgatttcaaaatatcaactagttccacttttgtgattgcaggatgcttcttatactaaagttctcataaataataaatcagcttatgccaaaaatatatgaagttccttggttttaaattttgaactaaaatggactgagcacattaattactgtttgaaagtaggtaccaaacactgggttatgtgagtgagtaagcaatcatatcgcctgtcaaacacatcaagtgtcgaacacgtcaaggtgtgatactgtctttggaaggctcctaaacaaatgtgagcacaattattaacaccttattcttcatgaacacagactgttaagcagcactaaccaattttatattaaaaagctatttattttggtgagttattccaagagttgtatacagctttattttttggaattgcaatattaaagttgcacgttggatttaactctcatgactttagtaatacctacagaggtgagctaatggatggtacatggagtagggactgcagagaccctagttttgtccccactccatcttcaaataattttggtctcttaggtctgtgatacaaaggcataaaacaattcctatcttgaagccttgagaaaagctgttacatatacgcagatagtagcaagacagaaaatgcaaatatgtaaatgtcttctgatatcttgaaataaagataaatttcagttaaacttgtataagttcagatttctgttaatgagaaattacaaccctacaaggtaaggtctttacattttagttattaagcagaatcaatgcttaaaactatagttaatacttagtggaaagaaaatttaatccatgtatcaggataatatattagactgtcatgcattaattttttcctgtatgccaggttttttacatacgtgccatatcagttgaccttttacagtaggagtataatttacattgtttttgacattggggttagtatggttaaatgtcctataaacttgaagggcttgcttccatttttgtgggtcttaacctccacctggtgcttgctattgggtgtattcaggcattgagaaaaatataaatcgtgaggtaaataatggtcatgtttaaacagaggccttatcatttagtgaagcataaaaactgacactatataaatgcatccgtctaatgaaaagacccagtactgagaaaaacatccctttactcaagtgtcagatgtcagagtctgctctaactgctcaactcataagtgaatacaactaagtaatttctggtcccctaaaaataaccatccttttaattaaaagtaattcttcagataggttgggctaccaataattgtccctaaacaaaaccaaatggcgcttccttgtgcttttgctgtgccataggttactatgcagctagcacatgtacctcttccagaaaaatgaggtcatcctgggagtgacccagagatgctctctagggatgtacctcttgatgttcttgttaactttccactcttcagctggattcctcttcctgtccccttttcaccagtctctactcttgagagaagctgagaagagaagggctcttctcatttgttattttctcctgcttttagtatcatctcacccgtggcagaagaaagaggttcttcccaatttaacacaaaataaactagttactgtttacagataatgcccgctaatgtttactgaaactgaaaccctatgatacattccattcccttaagtgtgccacgctgcaggactgacaaatgaaatccatcctacgaaaaacagcccaggaacaagcgaggccaaggcctgctttcctctccggcccttacagtagcgtgtggctcaggccgcatcttttccctctagttcttttggcacaagttgtaacctaatgcgacaaaggtccctcatgagatggcttaaaactagcagtgtcgctaggctctttaggtgttagaacagccaactctacaaaagtattggagggcacagaagggtgatagtcttggtttttatatttgtccttcactatataaacattgaaaaggtattaatcctcattaagaaaggattatcggccaggtcctgtggcttacacatgtaatcccagcactttgggaggtcaaggtgggtggatcacctgagatcaggagttcgagaccagcctggccaacatggtgaaaccctgtctctactaaaaatacaaaaattagccgggcgtagtattgtgcacctgtagtcccagctgcctgggaggctgagacaggagaatcacttgaacctgggaggcggaggttgcagtgagctgagatcacatcactgcactccagcctgggcaacagagcaagactccgtctcaaaaaaaaaaaaaaaaaaaaaaggactatcatccttagcaaactaacacacgaccaggaacagaaaaccaaataccaagtatagcatgttctcacaagtgggtgctaagttaaaagaacttatgaacacaaaacaacacacactggggtctacttgagtggggaaggtgggaggaacagaaaagataaaaccttcacatgtaccactgaacctaaaataaaagttaaaaaggactaagtcacaagtgatttggaatgtgaggttatccctcacccccatgctttactctgtactatttttcctccctcagtttctttttttttttttttctgtatactatgctttctattatactttgattggcatgggccaatctgttatttttaagttcaacttttttttaacttttaagttcaggggtacatgcgcaggaagtgctggtttgttacatacataaaggtgtgtcatgggggtttgttacacagattatttcatcaccctaagtatccattagttatttttcctgatctctccctcctcccaccttccgccctctcataggccccagtgtgtgttgtttccctctatgtgtccacgtgttctcatttagctcccacttacaagtgagaatatggagtgtttggttttctgttcctgcaatagtttatgaaggataatggcctccagctccatccatgtccctgcaaagggcatgatcttgttctttctttatggctgaacaattctttttttaaaaaaggatgtttttaggaggaattgtgtacagagactgttctaacagataaccacagagggacctttccagccactggaaagacattcaagaggaagaggaaataggttgtacagcaggtctgactacaggcaataagttgggaaagaagaaaggtttagatgcaaagggagcgaggaagtaaactgtggaaggagacatgagtaagcagaatgtctgctatttcacatatttctggtgcagtcatatatttactgtatcagatttccagagggtgtggctgttagtgtgtctctctactcccaggagccccatgtctatcaggatctaccaccgctccactggatgtgccactttgtccatcaaaatgctcaccatggatgtgattcagcatgagagaggtgggcagagtggggaaatgcagtgaaatcttcaatctgagccaaggctatagacgtgaagtgccccggagagtcgggctcccaaagaactccttccagcagcaatgacgacttggttctgtaagggacacaagacagaattcatggctcattcataacatctattgagttcctatggtagtccaggcatcatgctatgctctagaaatataaagatgaataagacactggccagatcccctggcttgaactcaaatgccactttccctttgtttacagaccgctttctcacatctataagttctgaaaaccgcagctaaggatgctcaccccaatccctattctggcacataaatcataaaggagaagtagggcagtgcatgcttagttctggtacaatgtggaaaacatatcttgaatagtaaggacttcccctagaagctggctttgtcaatgtgtttagcgtacctcccacctaccctgctgcttaaaacattttaggacccatctttcagaattgccttcaaaacctgctgcaagtttttaaaacattttcttcttttttgaaacagagtcttgccctgtcacccaggctggagtgcagtgatgtgatctcagctcactgcaacttctgcttcctagtttcaagtgattctcatgtctcagcctcccgagtagcggggattacaggcatgtgccaccacatctggctaatttttgtatttttagtagagacaagctctcaccatgttggccaggctggtctcgaactcccgacctcaagtgatccacccgcctcggcttcccaaagtgctgaaattacagatgtgagccaccatgcctggtctttaaatattttcagtggtggcaaatcttcatactccgaggtcggatttgatttgtggaaactgacaaaagttattctgaaccaaagctggcacatgaggtacgggtgatcaaactggctgacagtattttggtcagagcaggatatgacagtttcttatttaattttgaaaactactgatgaaatctagaaataataataatagctaaaatttgttgaggttgtatcatgggtcagacactatgcttagccctgtgcttatcttatcccttaatacccagtgtcaattaatagggaaaatctacacttaagaaaacagcatcaaatggtactttattctccctctctttcccaatttatggaattactcatttactaaatttgcctggccttcggcttctctctgttttgtcagagtctagtcatctttccagatgcagctccgggcccatgatctctgcaggcccttccctgactccaccagcaaagacttctgctgcagttgctgtctgacctcgtttggctcttggtcatcatacaccaacctggatggtcttgtgggcctgctgtattttcccacctagactacaagcacctggggctgggaccatgtctcaggtttctttgtctatctcacaggtgcttgatacaacactgctcactatacactaagttactgctctgctgaggctcctgagctgatggaaggcagccccatgagaagtttctgaaatacagagacagtgagagcactacttaagtagacgccggatcctaattctagtttgttacgactaatttcattactgaatgctcttatgccacagaa

SEQ ID NO: 98035 - DNA, 222352 bp, Homo sapiens
  misc_feature (1)...(222352): n = A,T,C or G
gagctataacctgcaggcaaaaaaacatggttttaaacacactaatttgtttagttttgacaaatttgtatatctatatagccaccacaccatcatgttatacttggcatatctatttttgatattcatccatgtcatttgttgttatttattgttgtggtattccattgcatggatgtaatgcaatttgtttattcattcactggttgatagacatttgagctatctccagtttggctattatgactaaaactgctaaaactgatgtgaacatattaatacaattctccaggtggatatatgttttcatttatcttggatgaataccagggggtgagatttttgggttgtatgttaaatatgtgggtttttaataagagactgacaaactattttaccattttgaattcctaccagccatgtacaaaagttctagttgctctatatcctggccaacatttggtgtttgttactgacagtcttttaaatttcagccattctatcggttgtgtagtgatagcatagtggtttttttttttttttttttgtctattggttgtgtagtgatagcacagtgtttttgtttttttttttttttgagacggagtcttgctctgttgcccaggctggaatgcaatggtgtgatctcggcttactgcaacctctgcctcctgggttcaagcagttctctgcctcagcctcctgagtagctgggaatacaggtgcctgccaccacgcccagctaatttttgtatttttaatagagactgggtttcaccatatttgccaggctggtcttgaactccgggcatcgtgatccacccgcctcggcctcccaaagtgttgggattacaggcgtgagccaccgcacccaggccagtgtatgttttaatttgtcttttcctagtgactaatggtgttgatcatctcttcataagcttatttctctcttgaatgctttctttggtaaagcgtctgtttaaaattctgcccaattaaaaaatagtgttttcttctttttatttagttgtaagagtttttagatattctttatatattcaacatgtataaacacatatttttaacagctttattaagatacagttcacataccatagttaaccccttaaaatatataattacatggattagtatcctcacagagttgtgcagatatcaccacaatctaatttagaacactttcatcacccccaaaagaaactcatacccattagtagtcagtcactccccattctctccccacctcgagcactacgcagccactcatctactttctgtctatatcgatttgcctattttggacatttcatataaatgaataatagaatacgtactcttgtgattggtttctttcacttagcataatgttttcaggattcgtctaggttgtagcatgtacaagaatttcattcctttttaaggctgcatagtattccattgtatggatacactacattttaactattcatcaattgatggatttgggttgtttacattttttggctattataagtagtgctgcaatgaacattcatatataggttgtgtagacgtgctttaaacgtctcttgggtatatgcacatatgttttgcaaatattttctccccatctgtgtatcccattctgattttcttaacggcatcttcttaacagatttacattttgatgaagtccaatccaacaattttatgattcatgcttttagtgtcttatctaggaaacctttgtctaactcaagatcacaaagaatttattttcctctagaggttttataattttagctcttatatttaggtctataatccattttgaaacaatttttgtatatggtatgagttaagaatcaagttcatatggatatcgaatgtcatacagatatctaatatcagcattgcttttagaaaggacgattgtgtcaccatttataccttgaaacatttggcaaaaatcaattgattatatatatgtgggtgtcttttctactattatttctgttttcttgatctatgtgtctattctcacacccaatgcaactttgtcttgattactgtagctttataaaaatgtctctagaaatcaggtagtgtaagtcctccaacttttttttttcaaaattgctttgcctacttgaagtcctttgtatttccatgtaagtgtagaaccagcctgtcaatttctacagatacgttgctgagatttttagtgcaattgcactgagtcaataaatcttggggagaattgacatcttaatgatattgagtcttctgatccatgaacatagagtatctctcaattttcattgcatctttaatttcttcccagcaacattttgtagttttcagtgtacaggctttgcccatattttatcaaatataagtattttatacttttgatatttaaaacatttccattcttattgctagatagaatatgattgacttttgcataatggctgtgtatcttataaccttacattcaccttttctagttttttgcaaattcctctgttttccattcttatcactagatagtatatgattgatttttgcataatggctgtgtatcttgtaaccttacatttaccttttctagttttttgcaaattccttgttttctacacagacagccacactatctgcaaataaagttttacttattttttccccaatgtgtatttctttcatttatttttgtcatgtttccctgggtgggatctccagtacaatgttcaataaaggtgtgagagcagatattcttgccttgttcctaattttagggggagagcagtagatcctacacactgagtatgatgttaactgtaggtattttgttgatgctctttattaggttgagaaaactcccttcaattcctggattgctgagaacatctatggcttggtgtttaattttgtcagatgcttcttccacacctattgagatgattgttttttctttttatgctataaatatagtgaattacactacaaacggtccctgccttatgacgacttgactttatatctttcatctttatgatggtgcaaaagcaatacacattcaatagcaaccatattttgatcaaaatattttttgattaaccataattctgatttttttgggccagcaatatgcagtacaatactcttgtgatgttgcaaagcagcagtgagccgcagcttccactcagccacatgatcatgagggtaaacgactgatatgccacagtgtactacgttgccagcattcaacacgttcttataaaataggatttgtgtgaaatgattttgcccaactgtgggctaattaagtgttttgagcatgtttaagctaggttaggctaggctatgatgttcagtaggcatactaaatgcatttttgacatggtattttaaacttatgatgggtttgtcgggctttaacccctgggaagaagcatctgcaactgatttttgaatgcttaaaaagcttgcactcctaggataaatctcacttggtcatgatctattttccttttgatatatggtccaaattgatttcctaaattttgttaaaaatttttgtatccatgtttatgagcaacatcaatgtgtatgtagatttgtttcttgtaacgttattgactggttttggtattaggttaatgctggctttacaggtgaagtgggaagtgtgttctcctcttcaattttatagatgagtttgtgtagaatgggtacagttatgttccttacatgtttggtagaattcaccagtgaatttgtttgggctgggaattttctttttgggaagatttttaactagaaatgtaatttccattgataatagaaatttaggttatctatttcttcttgagtggatgttggtagtttgagtcaagaaatatgtcattttcatctaagttgccaaatttactggcataaagttcattaatatttccttattatttctttataggctctgtaatgatgtgcctctctcagtcctggtattagtaatttgtatctcttttcttctttccttgatctatcctggtagaggtttatcaattttactaatctttaaaaaaatagattctgatttcattgatttactctattttgttttctgtgctattgttgttatttcctctttcctgcttggtttcggtttaattttgttttgtttcatttcttaagatggaagcttagataagattcaatcctttattattttctaatataagcatttaatactatacattttcttatattcattgcttttgctgcaagctacaagttttgatatgttgtatttacctttagctcatattttataatttatttttaaccacatctgggctaatgtggtgtcaattttccaataatttgggggatttttcagatacatttgatttactgatttctactttaataaattcttttgtagtcaaataaaatactttatttgcaattcttttaaatctgagagttgacttatggcccataatatggtccctcttcatgaatgtcccatgtgttaggaaaaaagtgtgtattctgctactgttgaatagaatgtgagctagagcagaggacaatgttcacatattgaacgtcctaatatattctcccattgataggatgagatgaaatctgttctacattttcatgtcaacataatcactgcactttaatagtatccttttcaaggttctttttaagtttgcacacagatttgaaaaatctcattccccatccattcttttccaccaggctatgaaatgtatattgctcttatattttccattcatatacttcaaggcgaagattgagatactgtaaactattctcacatgagatgtgatacaggctaggtaagagcatggatttcgggctgaacatagtggctaaagcctataatcccagcactttgggaggccaaggcaggaggattcctccagccgaggagttcaagaccagcctgggaaacagtgagactccctgactctccaacaaaaacaaacaaacaaacaaacaaacagccaggtgtggtggtgtatgcctgttgtcctagctactcaggaggctgaggtgggagaatcacttgagcccaggaggtttgaggctgcagtgagccatgttcacaccaccatacttcagcccaggcaatagagcaagaccctgcctcaaaaaaataaaaaagaagaagcatggatttggactcagataagcctatgttcatatcctcattctgctacttaagacgtatgtgttcatgggcacattgtctttatttgtattttttatgaggcttttgtgaacattttgatagtagtgaaatacctgtgcatggcatgaataaataatatatggccctgctattatttttgttgtatgtcatatgagggaatactgggaaaggtccatgtacgttttctttctgaaaagttctggtaatgcctaaattcctttattagtcatttatccatacatatcaagcactgccctcattgaactttatattacattgtggatacctcctaagaagagtatcttattcttagttcctaatccttttcagtcagtctgtttattggtagctgctctcagtgacaggggaaatcaggcaacatggtaacgagcacctacgaatatggggtcctagaaagggaagtgaattctacaaaggagagctgactaggatcagtcctatcgctcctattggaggtagtcatgtccacaagccagcaatacctgtgccatataccatgaggttaagcaccaggaagacacctagaaatacactttcaaaaaatcaaaatagtaaggcaatagaaaaagaaggcataatttattgtgtctattatgactagtgtttaataagacttataagaaaataatcaaattattagatcatttaacatatattctggaattagaagcaaaaaaagtgagaacatagctgagctccataaacatgcaaattatatttttattcaacaartatctgttgtcccaacttatgccaggcaccctgttaggcagtgaggaatgtgagagtgactatgacaaatgtggttcctgttcctagtggggaaggaatataaataatagtatcagaggtatgatgacagaagtgcaggagctgagagtcagaaaggcatctaaacccaggcttccctgaaatgacctgaagcatgaaatgcggaggattaaggatttcaggaagaaggagcaacctgtgaagaggttttgtcaactctgacctctccagaaacatttagccacaagaaaatccataatttagtggagaatgtctaaaacatttagtgttacccaaattcagctcaagatgaatcaaatgcaggatgacaatgtaccccatttcacagttttccaaagaaaatactgataatgatgaaaagaatgacagcagttcaggcttgttgatgcattttattgtgagatgggagtctggtaaaaaactagaaaatgaccatgatgtaacaaggaacttaaaaatgaagagtcagatctgtaacttacatacatgaatacaggaacaaattggcacaaaatgttaaacattgttcccaacactgtttatagaagttaatcctaatttggcttactaaggaaatgagagttgtatggttaggctratttcttaataaaactgcagagcatcatgctattagtcacacagtgaatttcaaaatttaagttttatattaaaaactgggyaaaggtaaaatgacttgattgtagttgtaaaactaatacattcccatttaagttctgttctacagtccaaggcaagtataaatgttaacataacactgttaaatcaaatctcaatgcaggagaaccaattgcatctctactttaaatcttatcaactttccaaattttcatactaaaatatattattgtattaatacaaactacagtattatacactacactgtgtaataaataaagaaatataaaaataagacacataaatataaaagttttctaaaactaaaagtacatatgtcagtaagaagggtattaatactgccaggtttgaagacatacagtacaaaaatgttgcacagatctataaactaaaagaaataaaataatactgataggtaaaaatcagctaatgttgttaataaattgggtccataataactaacatttggaaacagttatgagccaaataacaatagcatgtccatgtctgaaatgcaagtacatggataaagcagattagaaaatttccctttcgtttctgtagagaaattctgaaaatcaatcaacataaaatcaataccgaggaattgaaggatgaaatgtcccagtgtttcagtttctctgacagagtcagtggttttaagttttatttgggaattttgatacaagagacaaatcaacaaatgctagttattgtaggccacacattggatgaaggcgggttagagccttgaaaatactgagaaatggcacttacagcacacaggtcttgcttaaggccaaaggagatacaaagcttcatgtcatatccttcatatgttaccacatattcaaacacaatcacaaacactgattctgatgattttgctgtccttatcagattaacattgttagtccctgcaatcagaactcaatggcaatcttttgaactccattttaaaccacgtgagtaagaaacttcagttcttctatcagctgctttcttaaggctaacaatacactttaaatgataatacgctctactaagacatctaaatattagaaattactaccttctagactgaatttataaaaggtagttagcacgggttggaactacattatacttctctgtgaagggaattttgtagtgcagaagttctcacattttaaaaaacataataaaatactgaagcggatttagcatatgtttaccaataaaaaattataaaatttctcccaattgtacagcttaagaataaaccaacataagagtgataatactgataagataaaacaatgccagatgcatatctaattaatcagcttcctttaacctcttgtattgttgctctctgagtcattaaggttttctaatctgctgcatgttacaaacttgttcctaactttgaaaactgcatgaaaaattactaggtctgaggttcaggcacacccggatttattttgtgtgtgtgtgtgtgtgtgtgtgtgtgtgtgtgtgtgtgttttgtattttgtatttttttagtttttactttacacagtagtgaacaggaatcacagcatacaggttactgtgtttccatgaaaagcaaggataatattgaacgaaattcattatcaattagaatttattttccttctagaaaaacgattaggcttcatttgtcttttcttcagacacttgctcactactctcgcctactttttgtcctaagctgcttgcttgrctttcagccctgtcatccttcatcagaccttcagtttttgcttcttctccctcattctctgcctcttctacctcttcttcttccacttcttcytcctcctcctcctcytcctcatccccttgtggtttttcacattctttttcttcctgcaattcttccatctctttatcctcctcctcttcctctttttcactgtcttcatcctcttcccttgtcaaactctctctctcgtccgagtcgccctgtgagggagacgccctggcacccacgtgctcattcgagaggatttcaggccctgcctcttcctgctctgtgctgtcacgttcttccgcttctctcttacagtaggagtagcgatgattcatgtgttgagaataagacccagagtgtgagaagcgctttccacatttgtcacattgatagggcttttctccagaatgtaatcgcatgtgttcaatcaaatgatgtttgtgtttaaatgcctttttacagattccacactcatgaggtcttttacctgcaaaataagaattctgttaaataaaatggtggtattcagcarataaaatccttatacggtttttggggtacttcatgttgtagaaaggggagggttattagtttcatttttaaaacatttccaggtcccaaactctttgtaatataatattgcaatttggtttgttctttacattaaaaaacgtagtgctctacactctgctgtgcagatgattrggtcaatgggagctacatgacattgaaatgccaaaaatacaagcatcatgacagcgaggtggaaaatgggccaagtgcagctgggaggagatgtctggtagtgaacgagcacagtgagggcagacagggacagacttgctgctcaccttgtgttcattatcactacaaggtccctttttagtcattttgttttcctagtcacaagctctgctcccagtgaaattttaatgtttactatacactttttatatacgataaaactcataaatatacagtatatatactgagcttctttagaaaaccacagccattgtagtatctcagacttttttgccccctaagaaacaagttttggcccgtgagggcaatattgcccctcctgagaacgcatgggctacaggagtgttgctgcccagacatgaaaaggactggcaacaactgatcatagtcaggatcgataatgtccaatttcagagctatcaagcagttaacactaacaaatgcagaaatgatttttaattttagaaatagtgtagtttttcatatatatttttcactttgatatttgctaatatttaactttgcctgaagaggaaggggattttctaactcttcttagatctctgaaaaccagaggactgagttacaaggggctgattttgagaggtgtgactttctcttatgtaaccagtttttagctccaagaaccttccaagtgtcactgtatgaatccacagattgaagaaggaaaaacaattctatcttttctcacaagagtaaaaaatacactgaaacagttaagaatatgaaagataaatatggatactgtagtcataatggctggtagtgggggcagggaagagcaggtaggggattaaagagctcaggataaacccagccccttctacagcaacccatgttagagagagacacaggagtgtgctggagccagtttgtactggctggagagagtctactgctaaattttcaggaattctgcaagctgacatcacattcaagctcgaaatccaccatgatgggagtatttatgccacaaaaagctgcaaacactacaaatcagggcttccccacccttcagagaaccaggtgttaaaatttatcagtacttcactgatggaaggaatgaaataggccaggagttggcaactattttctgtaaagggtagtgagtattaaaggctttgcaggccaaatggtctctgtagtagcttctcaatcctgccattgtagaacagcatgaaagctgacatagacaaaatgtaaatgaataggcgatgctgtcttccaactaattttatttacggatgctgatatttgactttcacataattttcatcagtcataaatattcttttcatcttttccaatcatttaaaaatgtaaaaacaaaatcaaaaactacyattcttacctcatagaaaaacatgcgtatgctcacatttggcctgtgagctatagtttgccatccctgagtcaacctaaggaggcatattttgtggcagaattacaggatctcagaattacaggatcttagaatcttctagtccaacctcttaggcagaacttcttacttaaaacaaaagatcttgacttgccaggacagcttgccgcatgcttatgaagcagctttttcttttatgaagccagatcctgtctccctatgactttagcccactggtctcatattttttattaatgggtactatgtactatgtttttattaatatagcataagcttgcattaaatgaatgcggacagaataaatgctgtgtcagcttaaaggaaataagtcatgaaaaaaacaaaaaaacagatgaagcaaaaaaccaaaagaaaggcacagaccttaagtactaggtagaagtgggcaaacaggtgaaaatggccagatcagataagtaaaaaataagaaaattaattctgggtcaagcgtggtggctcatgcctgtaataccagcactttgggaggccgaggtgggtagatggctcgagctcattagttcaagaccagcctgggcaacatggcaaaacccgtctatatcaaaattggccaggtgtggtggtatgtgcctatagtcccagctactcaggaggctgagatgaaaggatggcttgagcccgggaggcggaggttgcagtgagccgagattgagattgcgtgccactgcactccagcctgggtgactagagccagaccttgtctcaaaacaaaataaaaaaaaaaaaaaagaaagaaaattctaaaactttagtttttaattttgcatcttccagtatatcatatcatggacactttatgtttgtgttcactgacatacctgtgtgttcatatttatgtctcaataatgaactactcttttggaatatcttgtcacacaaatcacaagcatacattccattttctgtcttcygcattttctttttgggcggtgtagaatcagagtcattctgatcctctacatttgatactccttctgagctagtatcttgtctttcatcctagagggagaaaggtgtgagaaaatgtartttaacattaaaagataaacaagagatatacataaaagcatgagataaagaactactttaacttatacttttatactttcaaggacttgaccaaagcaagcacactgatcttcactgcacatgtgccccaagggtggggccagatcacaggtggagatgacaaagacaagagtgaggttggggataacacagtcaaaaccatagcaaagacatatactcaactggtactggaaagaaagcaaggacaccgaaaagaaagcatgtaaaatatatagtaacagagtttacctagtttcatgtgaatcattactttacgagaaatttgcagaaggttttaacttattagtttgctaattaatcgctcattactaactgcatcttttgccttcatttttctcattctgggtttcactaagcaaaagctaacattctatttttaaaacctggtctttcaattgtatcctccagaacttcagggttctttaacctccacggtctccttgaaaagagagaggtgtgctctaccacttgtctaaggagcaagatggaaaaacaatgcaggagggtctatctttttaacagaaataattgctaatcaaaatgaacctttagaaactccaggcagtcwcatgragataattttgggcagcacgttcttatgtaagccaaataaccctgcagggagcctgttgtggaactgggtcccctaagatcttcctaccttatctagagtgttccacgccattgcctcaaacccacacattttctaaaagttgaaggtttttcacaacatttcttatggctctatgaggcaagagaggtgcagccatttgtccctgtcatttgtgagtggccctggtgctgaagtaacttgattctactttcactgctacttgatctagtcacgtgacacgtgagtctatgaaatgctaaggatggctctttttctattcaaaggcatgcaaagtgttctgtacactaaaaatttagaggaattcaatgatcacgtaagaactttttttcaagagttatcacaattacaggaaacccaatcaatagcaatatttaagggaaaacaaaagcagcaaatacaagtttgagcaggatattgaaattattatacttatagaaaatatttgcataaaatatcaaatttgtctctagtattcatttgattccatcagaaattgatggaaaaaatgggaaaacatcaacatcagtgacatggaaaaagtctggacaatgaggcatacaatagctctatccaaaactattgtggattttggggtaagaccagttcaagggttcttcctggacagaataaacactgttgtggtaaacactgtgatagttaaggaggaaaatgcatatgtatttttaggttcacagccacacttcctcatatacattatgactgaacactgtttatgcacagttcataaaatgatcagtaaattcacaagatgcgttctttgtatacttcattcctgtttatttaattaaaaccttttataaacagatgtattagtatataaaagtgatagataagtttgcctggtatgaacctgtgaatgggaacatattttcattaattaatgaccataatcaaggcagaaactattactaattttaggaatttagctataaaaacagaaacccaattagcgagtatttcaattttgttttttgatttctaacttcaaacaggtttttagctgggacttaaaaatcatctttcagtagaatagcatttcaaactttaagctggtaacaataccctggattagcaaacaaccaactgaagacatcatgccagaaaagttaaagcaaacattgatccttttaaaaatgacagtttgtaataatctagttggctctacgggactgatatttattagacaaagttaattgaaattagtcaaatagcatattactagccaggttcaggatggaggttattttttacctgatttccatttggctggatcactttcaagggtggttcttggactgcagggctgaccgtagttgagtaggtgtatgccacctggggaatcagaatcgtttgcttattggcagctagcgctcttaagcatggaacactgttctggtcagcaatggccacgattgtgggtaactgggcagtgactgtaggtrtagcgatatttatggggttggcacttggtgggattacatttacaactggttctgagtctgtaacacaactgtccttttgtggctccttttttgcgcaagacaagttcaagggttcttcctggacagaataaacactgttctggtaaacactagtgatagttgacctttctaataattctccctgttgctttggtagtgaaagatcaagaggttctacttgtggctcttcttgtgcaccctcagctgtgtacaagtarccctgtgtatttctggatgaggaaaggtttagaggtgatggggatggtgtactacttctggaaccattggtggttgatcccacyggtaaaackggggagttagtcatcttcaaaggactttgtagatttactgtgctgtcctggggttcatttgcatttgcagattgaggctgatcattgttcttggcagggatatttactttgcctggttcaggagaagatggttcagaagactgcactgaaatctgtccagcttgcatcttttcaaaccacttttttactacatccagtggtaggtttactgaatcagcaatttttgagagctcttctgcacttggttgtgcattcaaagcataatatgcttttaggagagacaagaggttctttaaaggtggctgactaggagacaaattgccatctccagtagctgatgaaacagaggactcaggcttctcagcttctgctgcagggagtggaggaggctgagtaggctgcyttaggtcatagtgctttaattctggaagtgcattaatatctcctggacaatcatcacacagaagacaagtgctatcattcacccccccttcaaagcttttgtccttctcagacttaacagtaagatcttctggtaacttttcacttttacaactgtttgtagcgactggattttctttttttaaattttgaggaacaacttgaagttggctaggctgctcaagactgtagttgatgataattttggttgttccatcttgatcaaccaaaggaagactgatggctgaaataacagaatggccaccttgttgtatgggtgaagcattgattgtttcttgttctttggatgcaagattggcttgattattctccaacacttgccttattacattaccatctacygccactttaagtacattctgaatatcacttaaattgatacttatgggagacaccaaaccaactgttggcagaacaacagcttgcaccatgccctgaggagaactggttgcctgtaatgggccaccaccagtgaaaaccccattttgtaaaggggttgaacagttgattcctgaagcaaccactatgggtttgaattcataatccacaggttcagttttaatttggttaacagaaagttgttcttgaaggggtttattctctatcttttgccgtatctgtggtcgtgtgggactgcctggtgatgctgaaagagacggtgaagaacactgagatgtcttgagtcctgttcttggtcgcccattcacaggtatcaagctgatacatttcttactgcttatgtgtgagctataggagccagaatgggaaaagcgtttcttgcagtttgggcattcatatggcttctctcctaaacaaacaaacaaacaaattatattcactgaattattacatataaatttttatgtatcctcatttccctaaaacaagcggtatcaattttaaaaagaagactgccatgcatgcttgtgacagaactgtatttagaataaactttttagcttcaaaacctacatagatgtgatgaacgctagtaactaagtctgaggtacatgttctgctaaccaatcatggaatcttctcagcatatgtgtataatatttccaccaatctttataacttcaaataattctcaagtatcaaaagtaattacattctactctttcaagtatgttttttcttatcccatttcaccgacctatataattttctatattttactctactcaaccatctgtaggagaaatattaaagaaaagaaaaataagtaaaatgtcccatatgacttaacaagtatgaatatctatctttgattaataataattcctgtacccatagggctttcttgaaaatagtttttccctaatgggaggaaaacttatataagatattctataagcattggcttattaaactgaaatgtatatactcccaggataaacactgtagtgggtatcaaagcaccttggagtttcaattttagtgacagtggatatgataaaacattatttttatattaaaacagagaaaaacacatttgtgtgacttgctaggaaaagccacgcactgtcaaagtagcctttggcttgcagaggcttccctcaagctgcttccctagactctgtggggtaaaaggcatttattctccttggctgttagggatactttggtagaaaattttgaaagcaccgagctaaatgkaatattttcctacaaacctaatgtttcctttgagttttaagttatagttcactaatttataatttaaaggttacagactataagcttcagtaaggcaggagcctctgaggcttgtttgccatttatcccttgcacccatcaaagtacaggttgcaaagatgctcattaaaccttttttggatgagtgaatggctaattgttgaatgatgagatgtgatgacactgatttgtctacttagtatcaaaataaaactctccatctcctgctctttttaagaattaaaatgaaagcagtgaggaatcaatttaagccctactaaaaattgcttaatagtaacttcaatgctatagtttaaacatgtgagttatattttctaataaatatgattatttgaagaatcatatataagaattggaagagatttaagaaacccttgtagtacagcctccttttcaatgaagagttcatttcatatcattcttgacaccagctaatctctgcttgagcttctttaataaaaggggagttaggacctgctggacagccctgcacaagatggtcctgtctggttctgttgaggtccatggatttgggttcaaatcctggctccatcacatagtattttcttaacctgtccaagccttagtttttcaatgtgcaaatgcagatacattctcattggactgttataggggtcatatgagattatatagcaaaactcttagtatgctctcaacaaatgctagtcactttttaaaaaggcaattctactaagagacaggctgagtttgagccaaaaaaatagctatgatgcctatttccctatcctagtttgtcctgatgccacacagaacaagtgtaacttttcttctcaagtcaaaccttcaaatggatcaagagctgctatatgtattcttaaacttctcttatataggttaaatatacctaggtccttcaaacattctgcacaggatgtgggttttagaacccttacctgcttgttaacccacctctggggattctccaatttatcaatatttttccaatgcgatgcctggaataggattcaattctcaaaatacaacagacaaaagtttccagtgggggtaaaacaaggaatatactctagtacatctctattttaacacttttaattacttgataacatttttacatgaactacatgcttattttccttctagagacgctagaaagataaacatctataaatacagactattttttaaaacagggggacagaaatggtacgtaagggaatgactttgggtcaggatgactacatcacagccctagctttgccatgtactacctgagtgaccttggacaagttaattaagccctctgagcctcaattttctcatcagtaaaaagtagaaaataataaaacctactccatagggttatcctgaggactatatgaattaatgcatacaaataactaacatgtggctatacatagctaaggatccaataagtgctagttatcattattattgttaaaaattatcttgatattttatcattgccagaaagaaagtttacacaacaattattctaaagccaaagtcactatatttgttaatttaaaactccttgtttctagcttcatagctttacagtttattagttaggcatatcactaatttatctatggaggttagggtttacaagtattttagcctgaaggttacatcaggaagtttcactactcaaagttcggtatactatgtatactgacttttttttttttttaatggctaaggtgggtgtttggctgcatctgatacaaaaattttccaggcaaaaattactaagaccatggaaaattatttttgggggtggaccacagccatatgcaggtgttcttttgtctctaatctgagtggaggtctggtagccttttcctcatgatagctcaattcctacaggtagaatcaactaattattaacacacacggttctgcatagggtcatgatcaaaattttttgggtaccagtatttagcaacaatataggtaattttagagagtataattttggatcctgattctcaacatcttttcaaaagtcatgtgaaaagaaagttatggaggtttcctaaaagatattcagctcttccattattagataccctaggmagagcttttcaaactatttgtggtgaatgaccarttggctttgtttggttcttttttaagtttccaatctactgtggaccaatattttataaaatatagtaaaatgtcacaaagtcttggtataataaatgctaaatgcttactctcaatttctgtacttatctcaagaatgagtaacacagggtttgcagactggtaccagtcctgagatgtcactttgggtagcctttgctcaaaaatcttctcttggaatcaaccagaccatcagagagctgtgtacttaaactgtatctacgtggccaccctggagcaatgcttttcctaaatagcactttggtgaactatgactggcttctattgaataatctgatttaaaaaagaaaccctatcaaattctctgctgtgttattttaaggatatttctgaggattatataacttctgttttgttcttttctctttatgttgttccaaggaataacgttttctatggacttggtatcaggaaggaagaatagtcctttttctagcaactgattttttttttttttttttttttttttttttacttacagacaccctgggtcttggttactgattgtcattttcttcctaaaccttaragcttaatttgtggtccacttccagcatatgtatggcatttcacagcattcattttgtccccccaacaatttactccatgttagtgtttcttaatttttcctacatatttttaaattaaaattacttgctatgttaaaggtatacaagcctcacattagatgttttaaaaacaagacagaaataagtacatacataatgagtggacagtgcagagtacagtgggagctttgtgttccatgatctggcctaaatttgcattagcttttgagcagtatcagcatacagtcagctcatattaagctctgggccattcaaatttactacttgattgagactgatttttaaataccaatgcttaactttcaacttcttatttctagaccagtatttcaatccttgttctgatttatactttccaactttgtattatttatagatctgataaatcttccatgactgcaatatgacaaaatgaatatgactcattatatacatgaatcttactgttagctttattttccttcctctgccctgatttcaacatttaaaaatccctcttgaattagctatatctttattaacaactttaaatcatctctggtaagaaggtaggttgttaaaatatattattattgataaaaattgttcaatagcatagaagctaagaaacagaatattgtggcaggctgcaaaagacaacctctactttttagaaacaataatcaatgtgtgaaaataaatgttttggtaaggatcttggtttgagcattttcaagtggtaacttcagcacgtttaacattgagggttagccttaatgagcaatacagtaaaacttttagaaatgcagttccaaaataaaacataaatatcatcaactatgcttcacaaagctatccaactatactttttttgtaggaagatgtttgtaaaatgtaaatgtcaatacataattttcacaaaataagcaatgtgtgaaaacccataatttcccattcatggttaataattttttcattaaaatgatttaaatctaaaataacatatcaaaatttatcaggagatgaacagatttcatagggcattgtgggataccagcaagttttccttttgcgcttttgttcaagtagtgtctccaaagaaatgcaaatatagctctctgtttactctgagttcctaaaatagacacaacactttcatcgcataatagtattaaccttgtaagtaataatttacagaatgacatggaatagacaggtgaagatggtgggtgagcacatttttctttcagattctcattaatgctgtaatcctttcactccctctcattgcctctatatcagctctccaatattttctaatcttgagttccatttcaacttttctcaaataaaggatgtcttcacttccctattctcttgtgcaaatcgtatctctatactcttttccattcccctgctaattgtgcaaaggaggcaatgacatttacattcatcagaaagctaatatgttttcaggttgtacttactaaaacatgctatattatcttctgattaggaaatctggagtatgtcatactatattaatttgatatactttagtcaaaggttaagactctaataaaacataaaataaacataaaatttctcccaattagtgtatgccaaaagaaatgcaaggagtttctgatcatgtacgtagattacatgttatgatatttatttattaccacatatgctatgatattcagggtatagaaagaaaaaaaatatttaccactgtgaattcttaagtgctcttttaggtgatgtttgtatttgaaagcttttccacactcagtgcatttgaatttacgattacacccagactgcgtcacatgtctctgtaagaaaagaaytggtattttatttgaaaagcaaaagatctttagactaaagaacatccaatctactaagagtgacatttttgtgagcctgatggttgttttgttttgtttcttaaagacctcaaattgcagcagtcacaaaaatctaactcttgaaattattagcagttgtagcagtcacaaaaatgtaactcctgaaattattaccaaaaaggatagtgatagtggggacagaatttgatacagaaaaataccaactttctaaagtatcagagttcatcctttattaaacaatattcaaaattagtaaaaataaagtaatatatactttgctaggaactagaggttaacttgtttgctttccaatttatagatatagaaaccgcatccacaaatactgaataacctgtctaaagctcactcaacagaacaaggtcctgaatagaagacaggatttttcctgtactttatcctgtctcttctatttgatatttccaaaatgtactttaatctgatgattaaaaaaatacttccagttttttcagccaaatgtggattattataatagctttctgtctggtttatcaaattcccattttcacatatttcaaatgtattcttcatacttagattaatcttacaaaagcactgcttgaattscattctatcaactcctcctcataaacttctgaaggatccccattaacccctcaataaagattccaagtctacagattccaagattrtagtccctgagtttccaagatgattcttcaccagttttttatgacaagtctatgcctcagtcatttagcgagccatggttttctgcacacatattgctcctctttatcttttggctttggtttacataattyyttactccttcactgtgttttcccataattttgactactaagattctacccagcctttaacggcttaactcaactactgcttcatgctcttccagctggaatctcccttcctttgccttttatacaggaaggaaagagaattagtacttactctgaatcaggtcctacttcactaaaacccatgacttaaaataccaaatatatggtggcgactcccacatttgtatctctaaacctctccccttaactccagacttttacaaccaactgcttatttgatattgccagttggaaggtgatagagatctgaaacttaacatgattaacaccaaactcttaatttccctcctgcaagccagctccgtctttagtatttcctatctctgtgaatagcactatcatttatttggttatagcttaggccttaaactttggagttattcttgattaccctcttactcatgtaccctcacccaatccatcagcaagcatatgaacatattctgaagccaacaatcttatttatctgtctgccaccaaaacctctggcctagattacagcaaaagcctctaaatgatctccctgcttccgttcttgtctctcttatctatcatccaacagtcagtgttcccctaaaaataaaaattaaaaattcctggatccttgacaggcatccccactgcactttagaatacaatccaacgtctttatcttggcctataatatgtagcccccaacacctctctggccttacctttctccctttcacactggcctctgctgttctcagtgtgtgcccagcaggttctggcctcaaggctttcttatgtttcactgtttcctctgactggaatgcccttctccaatattccatgactggctccttcactgtattcagatatcccattctcagagaartctcccttctctgtgaaacctagcagctttcatcactttctatcctcttatcctgctgtatttttcttcacagtatgtattattttatttctgttttatataatctactaatgtatggtccctaatatcagggacttcctttttgactactgtgcctttaacacccagaagagggcctcacatataaaagaaacacaaatgtttgttgaataaacaagttaataagacttgaaaatgcttgttagtcacagtatgattctcaagggccagcaaaatatacattctaccttttagtttgctgccttgcaaactaaattgtttccaagacctcccagttatatttcctcacattactggtccccatatttatcacagctccttcctgaccttagtctgacccacggtttatatgtaaatcctactacatttgcacccactggaaaaatcatcatagaattggttttcatgctcatcaaagattttggagtttgtttttataatggcatcttctgctttcgccaccagttcaatctgtcctctcctttcacgatggcccttggagtagagggaatatggtggcagcagctgcaggatgggtctgcttcctgaatgtcacgtgagtaggctctttcccaagccttgtctacactgtggccacatcacagcgctaaggtataaaacatactcttctgctggtctctctgataagactcattaataggggcactaggaaggagacggagtttgccttcagtcgtcccttctctgtattaatttcgtccttctcttggagctctcacctgtttcaagtgctccttcatgggcttatggaccataaacctataaaatcttggttctattctccctgattgccaccctcttcttattatcttgttatttcatgagtactgttgccaaagtactaaggaaataggttgactctgctcagtcattctttttctgttacaattcttttttgttgtttgtttggcctagccatcaccttagcaaatggtctaacttgttctctatgggatatgtgacacatattaggtacatccatagggcagagttcaggtatgtagatatacatcattctttgatgtaagaaactggaaatgtggcctaaccccaacatgtaccctcayaaaccctgtgtggctgaaaatttatttaatttttaaagttagaattaaggcaatattaatttcattgttgatggctgataactatgaggaccttgtaaaagaggaacaactgataaaagcttttttgactttaatcctaaatatagaaccagcaatttaaatgtaacttatagttacaaaacagtcttggtttatacttctgaaaactggggcacagtgacacagaagtagaataaaccatataaaaattgagtcttcagaataaaaaaatctaaactttagatttttagaggaggcaactccctttactacgggggaaaaaaaccacgtagcttatactgagaataaatagtaactggttcaaagaaacttaaactttttaatttgactttcttgtcaatttggttagtataatgtggtttatatagtcagtacttatttttcctacactgaacattttaatagaatgcaatttaacatcttctaaacttgaagaattaactgttatggcataagcaaaataattaagtcaagatggaaagggtcttacctgaacaaaatactgagttacctctaaagtaacgttcatatgtggtttttaatctcaggaatgaccagataactcaaataaataatcattttcacttttataaggctgcagatatagcactgtttagtacattcttttaactttcaaatatattaaaatccttgccttccattgagggctgagttgtcaaaatctggaaagttagtgaactctcagtcattgcacttacttgatctcttcctgatttatgtgatgtcatgtgacgttcaagttgggttctgtatgcaaaggtgtaactgcacagggagcaactaaagttatcttcattcttttcatgacgatatttaatgtgttctttcagagaggtaaagcgtttatagcctctatcacaatatggacaggtgagtaattgtgaaaatgcatctggtgttcctgtaaaagaaagatcatatattttaaatttaaaacattcagaaaatattaccaaagtttccactgagtccctatgctatgttccagatattgtgctacccactttatatttgatcctcaaaacaatgcaatgatactcatctctattttataagagagagaacagtggtttccaggaaggttaaataacttaaaagaaaagtcacagagccagaaaatgatgaagtcagggttcaaatacgggctgtctgaccttcaagtcccattctttttccctaaaccataattcttcccttttgtcatgtgattagctagaaaagaaaacaaaagtaaaattagaatgtaggttgtctttgtaagtgtatacagattaaaggggaattttgtgctctacaacagagtctattggtaacaatggtatgtatcattatttatttaatgtttattcctctgattttgaaaatgaaactaccaagtcatcatcatcaaagagtaaacagtacacacacactatgtttccaagagtcccttgcaggtaggtgtggccataggactgagttcagaccaaaaaaatagtgtgtaaggtggggaaggaaagactgatgggggccagatctaggcctgctacataaacacatcccatgcatgaccctgcttgtaatttcccctattgaaatacactggcaaatctgctatataactgtatatgtatgaatatatatagcttttagaaaacaaaggcattctgaataaattagtttactgaatgaactttatttttacacttggagctgtctaagcctgacaatcctaaaatgtaatattttgccaattaatattatttaactaagagtagttttccatatttgacatttcttcaatgaaataaattaagtgatatctttttgtaaacatcatctctattttcattttgaattcactatagaaaaacaaaccaccacagataatttcataaaatctccaagtgctttctgaacatatattcctttattcaagtccatataaatcaaatgtcttgctcaaggaccagactgcaaataatagactgagcacctgaatgttaaatagttggtcaaatatgttgagagaggggcttcaagatggctgaatagaggcatctggtactcacctcctctacaaggaaaaaccaaaataatgaggtaataatcacacttcacatagatcatctaagagagaacactggaattcaacagaaaagtgacaggaaacacctcaagtaaggaagaaggaagtaaagcaacctgcaaaggctctccaatgcagggaaagagtaagtgagagacccccaggggtccacattcccaccatggactcctgcaatcctagccatgggagaacccctggaccatcgtgggctctgagactaacacagggaggtatgtggagaccacatgacaatgctgctccggagagggagcttatgctgaatctgtacaccccctgagttctaagtagctacagcacagcactattttgagagcccaacccccaacagactacatcctgttgagccccactgacatacctcccttcccagtcatcactaatgctggttgcggctgctaaggctgaagtgcaagccattggcagtgaccatacctcctcccagcagaggagctgcacacatttttacatgccccaaggacagactccccaacagactgctgccactgtgggcttccaccgctggggacaaagtgctagccactggcagcgaccctaatttcctcagcagctgagctgctaagcatttataagggacctgaggacaggctaccccatccacagccgctgtctggggctaaagcgcacatttcccagctccctccctatggctgctgccaccaagagcaaccttgccctccccagtaagaaggccacagtgcaaccactgatgtccttacctgagcactctgctggtggcctgggatcatcctgcccctgccatgatagccaatgcctacacacaccaccaaggggcctgaggacaggtccatctggcccagcttacctcctccccagtttccgagcatgctattcagggacgtggggatgacccagcccagtccaacactgttgtcacctgaacactcctcctggaggcctgaggttgggtccacccaacctgctactatcactacagctggcaccctcctgcatgcaccaccggtaggcctggggactgactcacccagcccattgcagtcactgccaacaccagcgtgaatcactagggaaccagagggtgtcctgccactgctactgccattgcccaagtgacatccactgcccaggagcctgagaacctgcccacctgcccagcttaccactgccactaccagcacccaagcaagccacctggagttccaaggatcagcccaactggacctgctaacacaaggtgtcaatgtgccaccctgtggtctaaggacaggtactgtaagcccgttactaccactgctagggcccaaggaatggtccacctggcatccctgtcccagccaaacttcacctcagcctccactaacaattgcacctaagccaacgaggaaatcacggaccctactcacactatttataacgaaagatatcatacagaaattacactaccacatgtacccagaatcaaagccaaagtgccctactcaaccaatgaaagcaaatccaaaaaaccagaataattgactattataccagatgtgtggtatcaaggtaagaatacaagaaacatgaaaaaggaaggaaatatgacacctccaaaaaatacaataattatccagcaacagattccaatcaaaataaatttatgaaatcctggaaaatgattaaaaataatgatcttataaaagctaagtgagatagaagaaaacagaaaagcaacacaaaggaaccagaaaaacaaatcaggatatgaatgagaaatttaccaaagaggtaagtatcataaaaaagaactaaacaaattctggaattgaagaattcaccgaatgaaagacaaaagacaactgaaagcttcagcaatagattaggtcaagcagaagaagaattttagaacttgaagacaggtcttttaaaataacctagtaagagaaaaaagaataaaaraacaatgaacaaagcctgtgtgacatataagaaactataaagtaaccaaatattcgaatttttgatgtgttataaggcaaagaggaaacaaaagggatagaaaacctatttaatgaaataatatccaaaaatttcccaagtctagcaaaggatttagacatccagatacagaaagctcagcgcacccccaaatagatacaattcaaaaagatcttctccatggcacattatattcactgtcaaaagtaaaagacaaagagatattctaaaaacaacacgagaaaagtgtccaatcacttgtaagggaacctccatacgactaatagcagtttatcagcagaaactttataggcaaggagagaaagaaatgatatatttattcaaagtattgaaagaaaaaaaccctgccagccaagaatatcatacccagcaaaattatccttcataaatgaaagagaaataaagtctttcctaaacaagtaaaagctgagagaattcatgaccactagactggccctacaagaaatgtttaagggagtcttatccatggaagtgacaggaagatatctaccataatgaaaacacatgaaaatataaaatccactggtagaacaagtacaaataagaaagagaaagaactcaaatgttaccactataraaaactatcaaaccacaataataatcagtaagaaagaaaggaacaaatgatacacaaaacaaccagaaatcaaaatgacagaaataggctctaacatatcaataataataacataaacggattaaactttccacttaaaaggtacagattggctgaatggataaaaactgtgacccagctatgtgctgcctagaagaaattcatctcacctgtaaagatccatatagactgaaagtaaagggacagaaaaagatgtccatgcaaatggaaaccatagtgagcaggagtagctataatgagataaactcttaaatccagtaaacaaaacagtataaggggacaaagaaggtcattaaagaatgacaaaggaatcaattcagtaagaggatataacaattcttaacatatatgtacccaagactggagtacctggctatataaaggaaatattattagatctaaagggagagacagattctaatacaataatagttagggacttcaacacccctatcagcattagacagatcatgtagaaagacacttaacaaagaaacactgaatttaaactgcattttataccraatggatgtgagacacttacagaacattttaaccaactactaaaggatacatattcttgtcatcaacacacagaacatactctaggatagactgtatgttgggacccatgacaagtctcaaacaaatttttaaaaatcaaaatcatatcaagtagcttttagaccacaaagtaatacaactatagattttaataataagaggaactttggaaactctacacacacatgaaaattaaacaacatgcttttgaataaccackgggtcaaggaagaaataaggaggaaaatttaaaatttctttaaatgaaattaaaattaaaatttctttaaatgaaaatcaaaacagaacatatcaaaacctatgaaatatagcaaaagcactaagaggaagtatatagcaataaatacctaaaacaaaaaaatagaaacatttcaaataatctaacaatgtgcctcaagaacttagaaaagcaagaacaaagcaaaccctaaattaggatttaagaaggaaagaaataataacaatcagaacaaaatcaatgaaatgaagactaaaaaacaacacaaataacaaaacaaaaagttggtttttttgaaaaggtaacaaaactgataaaccactagctagactaagaaaagaacagagaagatgcaaataaaaaatgaaaaagaagactaacaaatgataccacagaaatacaaaagagacaattatgaacaactatacatgaaaaaactgaaaaacctagaggatatggataaattcctggacacagcctaccaagattaaattagaaagaaatagaaaacctgaacagaccaataatgagtaatgagattgaatccataatgaatatttcaagtcygggactgaaagggttcactgctgaattctaccaaactgtcaaagaagagctaacactagttctcctcaaactattccaaaaaactgaagaggagggaattctccctacttcattctataagtccatcactatcttgataccaaaaccagagaaagatgaaacaaaaaamggaaaactatccaggtcaatatccctgatgacaacagatacaaaatcctcaaaaaaatattcacaaactaaatctaacagcacgtcaaaaagataatgcaatatgatcaagtgggatttatcccagggatgcaaagatggttcacctccatataataaaggacatatatgacagaaccacagcatactgcatggaacaagctgacagacgtccctctaagaagtgtaatcagaaaaggatttccactccttcaccactcctattcaacacagtattggaaagtcctagccagagcaattgggcaagagaaagaaataaaagccatccaatttggaaaagaagtcaaatagtctctctttgcagactatatgatctaatatctagaaaaacctaaagacacaaccaaaaaactgcaatctgctaaataaactgaaagttgcaggatacaaaactcaacataaaaatcagcagtgtttctgtacaccaataatgaactagacgagaaataaatcaagaagaccatctcatttatagtagctacaaaaaagtaaaatacctagggataaatttacccaagaaggtgaaagacctctccaaggaaaactacaaaatattgatgaaagaaattgaagaagacacaagtaaatggaaagacatcccatgctcatggatcagaagaattaacatcattaaaatgatcatattgcccagagcgatctacagattcaatccaatccctatcaaaatatctatgtcatttttcacagaagcagaaaaaacaatcctaaaacttttacggaaccacaaaagaccaatatagccaaagcaatcctgagcaaaaagaacaaagctggagacatcgcactacctgacttcaaaatataatacaaggtacagtaaggaaaacagcatggcattagtaaaaaacagacacacacagaccagtggaagagaacagagaacccagaataaaatccacattattaacagccatttgatttcgacaaggcaccaaaaacatacaccaggaaaaggacacactctccaataaatggtgctgggaaaactgaatattaacatgtgaagaatgaaactggactcctatttctcaccacatacaaaaatcaactcaagatcaatgaaagacttaaacataagacacaacaccataaaactagaagaaaacatacagaaaacactcaggacatttgggtaggcaaagactttattgctaagactcagcaaaggaaacaacagagtgaatatctgcaaattactcatctgacaagggactaatatgaagaatacacaaactattcaacagatttaaaaaacccaaataatcctattgaaaagtgggcaaaggatatgaataaacatttcttaaaagaagacatacaaatagccacagatatacaaaaaaatgctcaccatcactaatcattagagaaatgcaaatcaaaaccacaataatatatcatttcatcccagttagtattgctattaaagacaaaaactaatgaatgctggtgaagatgtggagaaaagggaactctcatacattcttggtgggaatgaaaattaggacagccactgtgaaaatactacggagatttctcaaaaaaaactaaaaatagaactattatatgatccagcaattccactactgggtatttatccaaaggaagttggtatatcaaagagatgcctggatcttcatgcttattacagtactattcacaatagcaaagatatggaatcaacctcagtgtacatcaatggatgaagcaaatgtggcatatacacacgaatgaatactatttggttataaaaagggataaatatgtaaacaaatgtcgctgatatgacagaatacttcaaaatgctttattagcatttaattaaattacattaaatatctgaaagtaatgaataacaaaatcaacaacttattctataattcaaactaattcagaatggtagttcctcaatttttagatcgtactgtatggacctgacaaactttaaaaggtttaacctttattagaactacataatggatcatttctttaggtttcattgtttcctttcagtgaggctttttgaaagccttttgtcacataaaaattttacgtaaatatacatatatttttaaattttgtatttccctttcatttctttgataacctagtttcttctggtgaaacaataacatagtcttttcctcccaaactgtatcacagcctatttcttctcaggagagtctgaacacatttttattgcattttccacactctgtacgctgactattcatatcagagtggactaaggcagattcaggaaaaccactgtttccaaattagtatgttctggtataaagcagacaaccatatttttatttgttaaaagaatggtgggaaagaatccaaagggcagtaaaggtatagttctcacttctactgcctgctaccatgtaagtaaatggaatttgatgtccagacactgttctaagcatttcacrtgcagtggcattactaccacaatacatgagcagctaataatttattactgcatggtcatcatagtgttccattaataaaacagattactctctataggcacctgtaataaagtttggtcttcaagaatgttccctatagtagagcaggttcccatagyagaatggtagaaacaagaatcctttaaagagggaaagaaacacaactgttaagatccatttaccattttcatcatgaccactggcttctggtgtgccctgcctctggtcctcttcaggtgcctcaggaaaaatgacagcagtgtcttgttgttgtagaaactcttcaacattaggatcatggttttgctcattttctgcatctgactcgcattcatcatcttttactaaaaaaaatgcatacttttaagacagcaatctcaccactaagttattacaaaggttttctaaataagaaattatttatcttgagagaacatatgattgttcttgaatctgcagaaaatatttcttgaaaattaaaaatgaattccactcattttgttgtaatgtattaagatatatctttgctttataagtttaaaatgctatgaatgtgtgaaattctcacagtatccctttcaaatgttaaagtcatacttctattgcattttactaataaaacacagagaaggcaatatagttgactgaattctttctcaattaatgataaagcaagaaaaaaactttagttctcaaaggtcaccttcttagcaacctatcatatcataatacttatttaaagttggacaatagacagccccttatctgtggcttcattttccatggtttcagttacctgtggtcaactgcaatatgaaatcaggtgaatacagtacaagaagaataatttgagagcgagcgagggagaccacattcacataaatttattaaagcatattgttataaccgtattttattatagttcttgttgcaactctgtataaaatttataaattaaactttatcatatgtatgtatgtataggaaacagtatagtatatataagtatttatttaagacactcaatgggggactcttggaatttatctcccacagataatgggggggggagctctactttaaatctgaataattctcatataaaccactctgacgttcagttcagttatatgatttcttagaaaatagtttttaataattatctatagtaagaaggatttctaataagcatcaaagggtatcaaatctatgaaaactctttcttagctacgctagtattcatataaaacaagcctattctttctctatttctgcctcagtaaatgtttaactgtgggattaaggcagtggcaacttttcttgaattagaaaggcttatgctttgagaaggtagcccagcgtgctgccaagtttctaaagcattattgctgcactatggttttcctccatttcctccactggctccagaagagggtctctactccatgctggcaactgcaatgccttagtatggctcccaaatgcctcagggatgacttctttatagactctgactgaactgtcaggtctaaatttgtaaaacagcactccccagcaggctgaagtttggccaaattaaaatggggatgtatgggcatctgtttgttcgatggttattaaaacaatcttgctacatctcctgcactgtagcrgtaaccaaactcatcagggtgactgctgtttaaaacctgagaaccaatgacagtaacaaatggtgatcctaatttttttccccacttttcaatagctatcaattatttagcatttgctatataccaagaactgcattatttagttcatgtcagtagttaccaaattgggattattggatccagaggtaagcgaagacttttaaaatgtaagctggactgttgggtttaaaggaatcaactcccggatcctcarcttccatgtaaactctttcctagcatccttgaaaattcttctccctgctctcctttatacagtataccttgttctcactttcttaaaagaaaaaaagagaaaaggcgtattcctctatccatccatgacatgattatggtacactgcttggagtgtaaagtcctccagggtgccaaaggagtaaagttcaaaataccgattagggaaagccttctttactgacaaatcaaggcaacagagaatcactataggttttctggtctttcctgtttacatgaatttctattaggcataaagcacaactgaaatgggggtatgctggtcctggttgggaagctgcaattaactatataatatggccagaggaagtgagggtaattttcccttaatgacctccctattatttaaaaattcattgcttttcaggagactgataagagcaaagcaaataacattctcaaacatcattcctaggatttgtcattaggtagaacaaaaagcatttctgaagagctaaagcagaacaaatcagtggcattcttttcaaagcaacttcaatttttcaatttaaactagataaaagtaaaaaatgaaattaatattttatgtgatttcttacagattccatgtagagttgctaagatagttaaaattatttttatcaaattatattataaaatatttatttcaattaagcaatctccatcttatattttctacatcctaataaaaattataagtgtgctagctgttggaataatgagtttttaaatagtatacacttttcagaactgcatgatctgtattttatatatgaattttgctacttcaataaattctagctttcctatacattgattaggtctaaatatacacatttagagataaagatttttttaacatacaaattagattcgatctacataatcttaatcttgactttactacttagtattattataagatgtatttacttatactttatgttttcttcattattgataatttctattttttttttgagaatgagtttcgctcttgtcgcccaggttggagtgcaatggcgcgatcttggctcactgcaacctccacctcctgggtccaagcgattctcccgcctcagcctcccgagtagctgggattacaagcgtgcatcaccatgcctggttaacttttgtattttaaatatatccttcatacacttccttattgatgagattttatagaattcctcaaaatatgtattgacacactgagttcaaaaaacgaaaaaatgctttttttcctgacagaaagtaagtctgacttggctggctggtgtgatgttgataactggctttgctgggtaggttattggaaattttccagaaattgggtgaaccaataaggtattgctcaaaatacagttcatgtaataaaagtgtttttcatgaaaaatatactgataaaagatactgaaattaacatatttcagtttccttaatcatttctgaatacattaaacaaagtgactgtgagaaaaaacattttaaagcccaaaacaggtatcattagtcctttgataaataactattggtaaagtctttctggtatacgtcccagaaaatgagggaatagatgattgtaatgactgggaaacaaatctttttgcaaattagatggctttaaatttttgttttcaacaaaattgaagaaatactgacaggacattaaaatattttcattgacamataacttttgacattatagctgaagatgcataaaaactgagcaactcagttataacataaaattttatttcatctttttatttgagaataaaggtacctcaatgctaaaaaaaagaaactgaatgatgaacacttttccttctagaagtaatattaagctattacaattaattactgtttatgaagtaattaatatacgtttgcataaaattctatagtgcatatagaatggaaatatgagctcaaaaagtaaatattatgacacaacatttcttaaagagcattttcatatttttaaaaaagataataggtattaatatactatggatttcatatgtaatagtgatgttaaaatgtcaatgttttactctgccagaaattaaattgtaactactgacatttaaaatgaaaaattttatatgtccattaagaaatttgtgagacagtatataatgtttacatcctataaaatttatataacagtacctcttagggttgttgtaagaattagattaattaatatagtaatgtacttattagtagggtacctggtatgtagtaagtactatgtaattgttagctatttacaccttaaagaagtcctgcaaggtgaacatcataattttacaattaaaatttttcctcaatagaaaaattagggtcagaaaagctcttctgagatcacagagagaaaatgtattactattagagcagacaaattggtattaggtgtcaggtataaaatctgagctctttccattaaactacactctatatccatgaacccacatttaccaggcccaatttcaaactgagaccagaatttctgcagttttttaaaatttaaagtgttgggaaatgcacatcttgaaaaggtcaattataaagcaaatgtcctggtctttagatgataaacttatatatttaaatattagggagatgagcaaatatacacagcataaaaggtaattgggttttctttaaatatgataaaactcaaaattgacaaagtatagaattaaatgactatatacatgtatttgagagagcaaatatttaatataaacactgaatatttttaaatctatctatctatctatctatctatctatctatctatctatctatctatttttccatcctgaataaagtatcctcaggcttcctcttatctttatcctccatgtttgaaactttctaaaattatcaactatataaacaaaaaaagggacgctcagaaggaacaaaggatgttttcaatgaattttttactctgattactgagttcagactatagttccttaacttcaygagctgcagaaggaagtctgctataaaaaagatctgacaacattctgaactaatgatggcgactgctgtacaatgcttttgctcattttgtcagcatattattccctagaagtcaaggaagtaacaaaagcaaaggcaggacatcattttacagtttaactgctcaaaagtctcaaaagctaaatttccttttaaagctacactcactggagctttaatggaagtttgcttactcctaactccccatgttccaggcgaataatgcagcagggatcatcattgtgtacgtgggggagattttacatttcagcagcaacttttgttaaacacaaatttgagaaggttaccctgccttccagatgcaacttttttgaggaaatttacatactattcagtacttcaaactgaaagaattcatttatttttatagtgaagaacagcatgacagataaaatactgtaaacctgtgagcatctttttggatagcattttacctagaagggcaagttgtcttctgtaattctggtaatataagtcwycaaagtttaacgattctaggtaaaagtaaatagtgtactcttatgtttattaacactactgtattactactaacaaatgtccagcttaaatattttacatattctatagcttagyatggcaaatatttgataacaagcatatctgaatacattattcatgcaagttacacagaacgaagttaggggcaaaacataaaatcgcaggctatacgcaccacaaattatcacatactccattattatttaattattttggaattcacttttaataacagcacaaagatttactctgttttacagaaatgactgacgagtataggagtgctattgtttatattacagataaaaatctaatcttgacacttattagccatgaaccatacctcatcttacctaatgaaagataatttgtaagcctttatggaatattcctaaaatgcacagcaaagtaaaaaaacaaatctataaatgataactcatagaagagaaggaaaaagaaaatgtaattaaaactatatgacagaaatatctaatttatggttgaatatacaaagtacaattacactacgtttaagtataatattttgaggaaatgttttaaaaatctggaatgcatttttgaagtttacattctaacagttctggctctcttagggaacacaataaaaagtgactggtattactatacataagatctgatttaatttttccacctactcttttgcttcttaaatctgatctgaatccattacagaggaatagccttaagtttcagggaatatgtactttttagtcacctaaaagcaaatttccttgtttattataattcaacttcattttactctttttcaatcacagaaaatttaagaaaaatttttgattctcgtttgctgtgacatgttcactcaactcattaatattcatgattctcatcggatttatagataaatccatgctttttctattttcttctgctttttgtcttgtgggcaattcaaagcagacccaggtaactaataacgaaactcaaaagttagatctgcatttctctaactttggtcaaaaacttgatagaagttcaaatcatcattcaaacacttattttttggattatctgtaggttatacttgtcattcttatagaatggagaaatctgctacataatatgaatctgtaagttactctgtatttaaggaatatttacttctttttatgtagtgcaccatatgcctaagtacttaaacatttaaggaaggtaagataaaagagaaggaaacggactaaattcaggactcacaaatgcgaaatcagtgacacaaagaccttcttttaaaggctatggtatgaaagaaagtcgcagcagagtacctgtacatcctgcttcatctgcctgagcttcaggccccaggatttcttgcccttcctttcctgctgaaatcaaagaagaaattaaaatagatctatagtgttcctaatacaaacgaaagacaaatgtttaaagttttggatatcccaattactctgatctgatcattacacattgtatacatgtatcaaaatatcrcatgtactccccaaatatatacagctattatatatcaataaaagattaaaaaaacaaatccagttgtcacaaacattttaacttcccgaaatctgaaaaggaaactttcagtacagattatatttaatttggattttttccttttatgaatatggtaatgtgtccttgaaaagtaaagctgtttaaagaaattaagtggacagtcttaccaaactcacgaagatatcttagagaagtaaaagcagtacagatttagatattctggaattataaatattttaggattataagcaaactggaattttagtactattttgggaaaagagctctacctatagacggtagaattatatatttttatttcttctctaaagcacaaatttctatgttccaggcactgtgctagtaacttacttcttttaagctttgtaacaacatattttataagttaaaaaacttgaggcttggagaagttaaataacttgcccaaagacatgccgttattaggtggtagaaatgaaatataaatgcaggtctgattggctccaaagcccactttccatcacactcttgctcatttaacttgggtaccagaaaactagaaagatgactggaccaaatgttactgtgcccaaagtaaacacctaaggcattatgctttttctttcactttattcgttattctaattactgatatgtagtaatcaacaatatagtgctactaacaaatatttttagatatctgtcatcttcccttgctacctctacatttatagtgggctatcatacagcataggttcagaataaatattttgtattataaataaatgcatactttttggacaagcaaaaagtatgttttatattttcaggtacattttatttattataatagtgtattaagaacatgtgcataaatgaaaggcatgaagaagttaaaaactgttctttttctaactagtagcagagtatatgtcataattatgatcagaatacttatacagtcacaccgaaatagtgtacttatctgcaccctaatcaaattgcactatgttagtcaaaagtcttgattgagatttctcttaggtttgattgttaaattgagaaatagagcactaatcaagtaaaatctttgcatcccattatagcatgtatttcttttaagtgccttggattatcacgtggatttattcagcagattttctttactcattaactttcatactagtacatraagatgatcatataggaaaaacagttaaaatatgcacaaacctctttagatcaatgtaaaaaacactgttttaagtagatgatgagattaacttctgctgaagtctcattttacactttccatcagcaaaatgacagtttaaaaattcttggtaaagtgtttacaaagctgtaggataaacactagtgtttgctaagtgtctgcaaacctctagcaccccctttttctcgcttcaatgtgtctccttaaactaaaataataaacagtatgccaactgggtaattatatgatggtaatatagttactgattattgtaaacctatgttccttattcttctaaaatgaaaatcaaaacagccagagttactacctcgtaagatggaatatgacattgatattaaaggtaaaatgacatttttggacactgctaatttttctacttataactattttaggaactgcaatttgattaatttatttgtttcttcatttcttcatccccccttgggataaattctaggctctttagatgagtatttaacatacttcagaatctactcccagacctatttcccacaatttaaaaactagaagtatatttttttccctcattattgaggctggagttttggttgagcaactaagaccatggtgcctaatgaaaacagacaacatcctaatgttggcctttagcactgcaaaaaaatgctgccttgggataggctcctttctgcatcagccgtggactagcatgagtgtgtctgcaaacaggctgtgctaagtatttttcaagcagcagtatctctcatgtgttctgatcttacttctggatttaggaattaaaaggggagtaaagtaataaaatctacttgtacatatttttttcctgtaagacgtaataatgtcaacagattaactggttaacctaaatgcaattttaaaaagaacactagaatgctcctaaggtttttgtttatagtataaattctaaagcaaatatgtaagtgagaaaaatgcctgagtagtaagactttgttttttcaaaatgaaacataatggaaaaaggtgggctaaaaaataagtcatgaaatattactcagcaataaaaaagaacaaactattgatacaagcaacagctcagatgaatttccaagaatttatagagaatgaaaaagtcagtctaaaaggttacatactgtatgatttcatttatgtaactttcttcaaataacacaattgtaaagatggagattagtggttgccaggggtaaggaatgcggcaaggtagagggacaggggtgaacatgtaatgggaaacgagagcctgttagtgacagaactgctctgtatcttgactgtatcaatgtcaatatgcttgttgtgacattatattatgttaccattggaggaaactgggtaaagggtacacaggatttctctgtattatttgtgaatctattattatgtcaaaataaaaagtttaatttaaaaataagtcaaaggcaaatatctcaaatttagaccaaaagagcttatggcttgttctttttagtcataagatgaaattcctagtaaataaaaacaaggatggaaaatgtgattcattctaataamaatccagaagacttactatcatttgcaggataacatagtttaagctgaaggactgattatttagcatatgtgttaaattcaaaaacttgtattttttgaaattcacacccatgtgtttctaaccatttcaaatatgttcatgggaatatcttactgcaacctctaagaaggcacagtaaatgcctaactgaatcatatttccctttcctggtttgtctactcctctttgacacacattcacacatgccatgcacatttatacctgtatagatactccttgacttatgatgaggttaaatattgataaaccccgttataaatggaaaatatcatgtcaaaatgcatttaatacgccggtcctactgaacaacacagttcagcctagtctaccttaatgctcaggacaattacagtatcctacaattgggcaaaatcatctaacatgaagcccattttataataaagtattaaaatctcatataatttattgaacactatattgaaaatgagaaacgattacatgggtccttggagtgtggtttctattgaatacatatttctttcacaccactgtaaagttgaaaagtcttaagtcaatgttgtaagttggggaccttctctatacctttcctgaagttgctccctctgcctagaaagccgttacccagtccaaatgagtaacttccacagatttttaaaaggccaattcacatctctctyattctgtaagtcatcgctgagccagctttctgctattcctaccctattccctgctaagggaaaactatcaaaaaagcgaatgccaacagattcctaaattcagacctgaatgtgttcaaactttagagatgaaatgtttcactgtatacttttccagatagtttmattttcctgctcctgtatcttccaatttataatatgtatgtgaatatttggggtgtaactgtatagcaaagttaaaacaaatgcaactcacaacctccatgaacacccattaacttagataatgattamaaatatatacctgaggtcagatccagttaatatggagaatccacaaactgtttatgtctgctactgaatctagataataaaacttgagaatgaaggaaacggttatttaaagactctaaagggtaagtcacagcaggtggactggagaagatgacatgacaagaattcagagtagcacagggtgattccccttacctttttctttcttcttctttttttaaaaggtacccctggcctggattcaagggagcttaaaacctgaaagtgggccctggggcatggcagtgaaggctctaggagaatccttatagtttaggctcaaggagcaggaaaagtctcaaagaagagaaaaattgcccttttctccttcattctcttgcatcctagccttcaaggtagtagcagagataatgataactgcaagaatttaaaactttgagggagggaaaacttcctctccagtaggaggagctgtggccctaagagtacaatataaactccactgagctctttctctccctgtcttctttcagctcttctacaggcatagatgcaggaagcatgtggcaaagtagggtaaataaagtcccagagttttggctagaggactgaaaagcagagtctccaggaactcaaagtactgagatcatgaaagagagaggctcaggaaagtgacctcataaggctgtttatgaactcttgggtttatgctcaaacttctcatgtgtgaatctgatcacagactgtgagaaactaagtatagacagacaattacccatgttctagattggaccctgggtggtacatgaaggacagatctgaacagcatttcaaaggctttgaaaagtgaaccagttgtggaatcaaaacctatatactggctggagactgcatcccgaatacaactggataaattgcctgttaagcaaaaaatatcaaaattctcgataggatttaaataagacgaagtattagtcttatttaacttattaatctcacaacataatacttgaaatatccagratataatctcaaattacttggcatgtgaagaatcagaaaaagtctcaagtcacataggaaaagatgatcaaaaaatggcaacattgggaaaaaaagatgttagaattattaaactaagacattaagacaactattataaaaatgctccaagaagtaagggtaaacactgttgaaaagaatggaaagatagaatgtctcagcaaatggaagatatttaaataaaaactaaaagaaaattttagaactaaacatacagtaaccaaagtttaaaaatcactggatgggcttaatagtaaaatggagataagagagcaaagactggtgaacttgacagtacatcaatggaaactatccactttgaataagacagagtaaaaatatttattaaaaaataaagagtctcaggataatgcaggacaataataaaatatctaactttcatgtcactggagtcccagaaggaaaagagctgtagtgcagaaaaaaaactgaataatgtttaaaaatttcccaaatttagtgaaagacataaaccaacagatttaagaactgaacctcaaatagtaacctcctaaccccccaaatctaggctcgaacccatcaatcaaacactaggctcaaatccatcaatcaaactagtttaaaaaaatactaaaaagagccagaggaaataatatataattataggggatcaatggactacagagttataatcagaaatcatagattccataagaaagtggaacatgtttaaaacaaaaaatatctgtcagctcaaaattctaaattcaataagaatatcctttaaaaaacgaaggtaaaataaagacattctcagataaaaagtatagttcattgctggcagatctgttctaaaagaattactaaaggaagactgtcataaagaaggtgaaatgagggacacttggaatgtcgggaataaaagaagaagagaaatgatgtagtacatataaaaactataaaataaaggagggagaataacaagacttacatgaaagatttatacaatccacttggcagggtaaaagattgattctaaatagactgtgaaaagttaggatgtacattctaatccatagagcaaccactaaaagaaatctatacaaagatacatagtcaaaactaaattaaaatggaatactaaaaaatattcaaatgatccaaaacaaggcagaaaaagaggaccagaagagtgaaaatacagagagaaaaacaaaaaacaaataataaaatgataaacccaaatccaaacataaaacattttatgaaatataaatggcctaaacaaaccaattaagggcagagatgatcagaatagaccaaaaataataaaaaaaatccccattaatatcctatctacaaaaatttcttcaattataattacatagtttaaaagtaaaaggataaaaaattctatcatgaaaaattatatcattaaccagaagaaagctagcgtgattatagtaatatcagacaaagtagacttcagtgataagaaaattatcagagatcaagaaaaacattgcataatgataagagggtcaatttgccaagaaaacagagmgatcttaaatgtgtatgcctttaacaacagagctttaaaataagcaaagcaaaaatgaacagaacaaaaagtagagacaaatctacaatattcttgcaggcttctaatactcctcttgcattaactgacagaacaagtagacaaaaaattagcaaggatatagaagaaccaggcaacattaacaactagatccaaataacatttatagatttatagaacacaccccaatgacgaaattcacattcttttcaaatgtacacaaaatattcatgtagacacaccacttccaagatcataaaacaaaacaaattttaaaggattkaaattctataaagtatgttctatgatcataatgaccagatgtcaataggaaaaagataagaaaatctccaaaacactggaaattaataaactgatttagagagaatctatggatcaaaaagggaaataaaaaacatcaaaatctgtggagtgtccctaaaacactgtatagaggggaatttatagcattaaatgcttgtgctagaaaagaaggtctcagatcaaaattctgaattgtgtattaaaacaacagtaaacaaggagcaaaataaacccaaagcaagcagaaagaagtaataaaaatcaaaaagcaataaaattaaaaaaaaaaacagtgagacaaaaagctggttctttgtaaagatcaatgcaatggacaaaactgtagtaggatcggtaagcaaaaaaagaagccacaaattgctactatcaggaatgaaaagagaataccactgtagaaccagcagatattagaaggatataaaggaatgctctgaacaattgtgtaaacataaacctaaagaagtgaaataagtaaattccttgaaaatcagacactaaacacatccaagatgaatacaaaacctgaatattcctgtaaatatttttaaattgaattagaaaatcttcctcctaagcaaaacaaaactccaggaccaactttcacttgcaaattttatcagatatttaaagaagaaataacaccaatttaaatattttttttaaggccaggattattctaataccaaaaccataggacaatagtacgaagaaaataaaagaaaaagaaaaagaaaaaaaattatagactaacataccttatgaacatcgacacaaaaatcttcaacaaaatattagcaatatacaaaaagaaaatgataaagtgaggcttttcagagaataaagcctgattcaatatttgaaattgattagtgcattcctccatattcacagattaaagtaaaaccatatgatcatttcaattgatgcagaaaaagcatttgaaaaaaagcaacatttattcatgatgaaaacttgcagcgaaccaggaatagaagggaagttactcaatttgataaagcgtatctacaagaaacctacagttaacattacacttaaaggagaaagactatgctttcttctcaagattaagaaaaagccaagaatgtccgttatcacctctcttgatgtcttgcaataagtcaataaaagaattacaggcatacacattagaaaggaagaaataaaaatgtccctayttgcagaaaacaagactgtctacataggcaatgaactggaaaccaaattaaaagaaaaaaacttcaagccattcacagttcttatctccaaagaagaaatatataggtgtaaatttaacaaactatgtacatgatctgtattctgaaattatgaaacactgatgtaagaaaaagaaaacctaaataaatgtaaacacacaccatgttcattaattggaagactcctcaacactttaaggaagaagtcagttctctccaaattgatctgcatatttaacacaaatcaaatcaaaatttcagcatgattatttttaatataaatagattatctaaaatttatatgaaaaggcaaaggaactataatagccaaaatgattttgaaaaataaaattagagaaataacatcctccaattttaagacttactatcaagctacagtaatcaggattacgtggtattggcaaaaggatggatgtacagatcaacagaatggaacaaagtccagaaactgacccacataaatatagacaattaatttctgacaaaaatgcaaatatattcaatagagaaagaatagtcttttcaacaagcagtattggcacaattggacatccatattgaagaaatgaaacttcacctcaatctaacatcttataaaaaaattaggtcaaaatacaacaagccctaataaaaaggtgaagaaaacaaagagaaaaacctgatgatctggagttaagcagagttcctgcacatgacaccaagcatgatgaaaatcatgatccataaaaagaaaaagtgataaactaaatctcaattaaaacttttgttctgtgaaagactaggataagagaatgaaaagacaagctacagtagtctttactacaactctaaagaactctcaaaatttaataaaataagtaactcaactagaaaatacatgtatacatatgtaacaaacctgcacattgtgaacatgtaccctagaacttaaagtataattaaaaaaagaaaaaaaaaacactacagaaaaaaaagaaaagaaaatacacaaaaggtgttaagcagacacttcactgaagaggacataataaacacatgataaaatgtttaacttcattagccattaggggaatgcaaatgaaaaccaaacctgttatgaaaacacacctattagaatggttaaagtaaaaaatatctgataaaacaaaatgcctgtggccatgtagagaaagtggatcatctcttatttattactggtgggatggtacaaccactctggaaaagtttggcagtttcttgaaacattaaatatatacaacatattatgcagcaatcacacttctaaatatttaccctagagaaatgaaaacttaacttcaccccccaaaacctgtatactaatgtttacagcaactttactcataatctccgtaaattggaaacaacccaaatgtccttccactaatgaatggataaactgtggcacacccatacaatgaaatactactcattaataaaaaggatcaaactattgatacacgcaacaacttgaatacatctgagtgaaatagaaatgtttcatattgtatgctgagtgacacagattatgtttcatgttgtatgatttcatttttataacattctcaagaagagaaaatgatagcaaaagatcacggttgccaggatttgtggtagaatgaaaatgtgactaaaaacgggtagcacgatagtgctctgatgatggaactgttctgtgccctgatcgtcatggttgctacatgaatacacttatgtgtgtgtctgtttgtgtgtgtgtgtattaaagctcaaataaatgaatatcaagtcaattttatagtatgttaattaaaaaaatatttcctgaggtcttaacactcagaaaaaaaaaakaaacttacttttctagttctaggtgctaattctgtaagtagaaatccagaagaataggagtgtttacagatttttaaaactattttaatgttttggtctcagttatttgaaagaccaactgataataatacacaataatgtttttgtatttaatcaatccacaagtagtacagaaatcagatccagaaatcttatgagtagttttactttaggaataaaaagaaatgaggcagtggataagggcaaacgctttagagtcaattattcctaggtgaagacattggctctactgggtccgtgagtagactttggggagtgatacaactcagttagtccttagtttccacatgtatacgactagagcattacatcacaggattgttgtgaatactgagctctcgtttagcccaatgcttagcacactgcaaatggccattattagggattctataaatatacaaattgttttgagactcttaaaattatctttattacatgtagaatttgaagatcatcttgtctgaaacattttcacctcaaattaattcattaaattttaagagcagggtataaatggattgacaattataggaatgatttaattaattaactaatccattcatccaattcactatttgaggatccatcagccagaaactctatagatgttgaaatacaaaattggaaagaccactaacatcaaagaacaaaggttgggggagagagagacagagaattacaacatcattgcaaaagtgctgcaacagagatgtatgtcattggattacatgataacctaattaccatattttttctctaagttgttctgaaggaacttatataacaaacagtgacatattcttatacaatagtgataatgagtaaaataatctaaggaaataacattcaatttcagtcatctgtgtaccctcattatcattccttttctgtcagccagcaagaaaaaaatattcatttaccgtaaaaactaagaataaccagcccacatacagtataggcttgctaaacattttgaccctaatcagttaagtaaaatatccgaagtcctgaatcatctgagtgacttatgatagtacggaagttaatggcatagtttacagactcagaccgcctggttgaaattacagataataattactatcagtgactctggyaaattacctaatgtcttttgtacttattttttctcatccataaaatagggctaagtaacctgcttcattacagtattgcaaggattagattaatatataaaacacaatttagamcattacttgacacaaactgctcagtatagttatgattattaatattagccagtggtttatgaacttgtgtgattttttttacattgtggtctgcagaataaggcatccatgaagatgtccacatcctagtactctgaccctgtgactatattactttaaatggtgaaatggactttgcagatgtgattaaaattatggacctcaaggtggggagattatcctggattatttgggtgggccagttaatcacgagctcttaaaagtgaaagagagtgaggcaggagtggagatacgatatgaaacaaacttgacctgttttcctggctttagagaaaagaagtcacaagccaaggaatgcaggtaccctctagaagctgggaatggccttcagccagcaaggaaatggggtccttgtatgatcaaaaggatctgactatgccaccatctgaggaagaaaatgaatcttccccatgaacttacagaaaggaatacaacacttagattttagcccagtgagacctgggatggactcacaacccacagagccaaaagaaartaaatttgtgttgtttaaatcgtaagtgtgttgtcatttgttatggcagcaacagaaaaccaatacaggtggttaaatatttatagaacagagagaagaatgaagataacagcaatctgccagctagctacagataagattgccctgcagaggtcaatatttttttctttttgctgttttactttcatcagatactatgaatctgaaaatcaccagtaatgtagtaattaccggattctaccttattggaggccatgggaaattaaaaagaatatatgatatggtaacttctcttaagatgtttctatatggatgggcattgatactgacagaattacctctgcactgctctattatatgtatggatatcatatttaatgtatatgtatttttctgttggacctataagaaaaaaagaatagcatgctttggaatcaaatagacctgggtttgaatcttggctttccattacttaatgtaccatcttggcaagatatttaacctgtctgagcctcattttccttatttttagaaaggagccaacatctatctcacagagctattctaagtatgaaaataaataatatttgggaaagcaattagcattaggtctgtacaggtacactcagtattatttttcttacccaatatatgaaatgtgggattgccactgattgttaatttattgtgtccagccttcccagtcctccagtgttttagagaagaggcatattctctcaaaccccaaccaggcctgaacagaaaagcctaatgaaagcagaattagcctgatttatccttgcccctgaagttcaaggtatcgcgaccaggtctgaaatgtgcggaagtaagctggcactctgcaacatggaggcagatcaggaaaagtacaaaaaactttcctttggggcaagatatctgacattcttttaggctaacagaatgggacaagagtcagagatctaggaatgatcctctgacctactatgcactttgtaaactgaattattattatattccaatatttttccttttgttttattactgcttattaaaatatttttgaaaattccaacttttttcaggtaatacatactaacaaagcccaaggaaaggattttgcttcattttgatcagaaattttcaaagtatctcaatttgaaaaatttcagacttacagaaaagctgtaaaaaatcaacattcttgtataccctttaaccagtatcccctaaagagaacatgacataatcacagcagtgttatgaaagatataaaattaacattatacaatgctattaacttatctagggaccttatttgcccttttccagtttccccactaataatcctttttttttttttctggcccaggagccaatttagtatgctacactgtatcatgtgtccataacctcctgtaacctctaccaaaatttgataatccaatctgtttgtctttgacaagttgcttctgtctttatttgtattttatgaccttgacattgacacttttgaagcgtactgggcactgattttgtcatatgcccctcaacttggatttctctgatgttttctaattattagattgaggtgatgtattttgagcaaaaacagaactaaagcaataggtgcccttgtcaatataccacactagtggcacatggtatgtcactatgtcttattactggtgatattatcatctgtaattgatcatctggttaaggtggtgcctgccaggtttatttttccacaccagttgtgatgtttctcttagcaattattaattatcttctgggaaaatacttcaaaattatgcaaaaaatcttttttctcatgacactttcacccacttattttaatatccattgatagttcttttaaacaattattaccatgatatttgcctaatggtgagtctccatttccatatttacttattaatttataattggatttctactgtaaggaagacctgtcctttccctcccaggtgtttaagtatttatatcaatacagatggatggatatttcttttattttctggattataataatgctatcattatttattttgctgctaaaattgctccagaattggctattgggaactccttcaagttggctcctgtgtttttttgacatgctctcatcattcattcatttagtcattcattttttgagatggagtcttgctaagttgcccaggttggtctcaaactcttggtctcaagcgatcctcctgcctcagcctcccgagtagttgggattacaaagcctcctgagtagcagggattgcaggtgcatgccgctgcacctgaaatttatttttacttatttatgtgtacttactattctaggctcatcttccattttccctgccctagatatagaatcagccatttctccaaggcggcatagtaccttctactggagaatggtatttaaatcctagatctgggtattatctatgttcactactactgggtgtcactgctttcatgtcttgttagtaggcagggcttggaaatatatgtatgtacactaacataccccatctatattttcatatttatctgtttttatatatattcagaaccataagttcatactgatacttccaattccaactgaacaccatagccctgaacacactagccttttatcttacggtgagaaatctgggtcttattatctgaaacatatttacttacttgttatatcccagtatacacttaagtagtttcagaacaacccaaatctctatgacaaatttaataactggaaggagaatggaaacagggtagtaggcatagggggaggattgatacttccctgagtacacccttttgtagagcttatttatataactatggcaatgtttcctattccctcaaaaaataaataatttaaatcatccagcagatagggagaatgaaaaatacaataccaacagtaataaaactattatgaatgaggtatggaaaacaagaaattacctaagtaactttggaaaatattttaaatgactacctattataaggctaatgaccaaaagacctatacacactgtattctaggtagcaaatttgtttgattggttttttaaagaggacaaaatgtacaccaaggttcaacattgcagggaaagcctacactccttcattagtgccacctctgaatactcaagatacccagaaatacttaaacattcatacagtatatttagtgcaaatggaagtgttcccttataagtagagctaaaaaataaaacaacactcaggggtcatctggcccaytgctttcattttacatatgtacaagtggaactcaagagatggtacagcgaagactagaagccatgtgctcaatcttttctaaatcatacaccacctctggttgaaaatgattccaaagagtaggttcaactgaatcttgaaggatgaatacaatttgcttcaaggcttagatagtgactgatacattctttacatgtattacttatagtattttattataatttatgcccaagaaagcgttattactatgtgctatatgatcagagttttaaacatttttaacataaaaagtttaattgtcttggcagtttttaaacatgtcaatttctagagagctttaaaaactacatgtgagaaaaatgtttttaaatcgctgttaacttgggacagttttaaaactcaccaattgcaaaacattaagaaatagctaacatgttgaacaatatttcacattatcagatcagttttatatatgttttaaaaactgaaagcataaggatgcctttaagacaggtgtttcaaaagttatacttaaaaagtttaactgacacaagcatgagagtttttggctgaaccacaagatcttgtaagattaatacagacatgttggaacattgccaacttatactttcttctctacagagaataaagttgatagtattttaagtcaatagcacttactgtataaattttatttttaataacaaacatgtcctagtttaatatttacaataaaatactcctttttccatatgattcttttaagaacttaatcctaatttggagtttcattcacagatratagctttttaaaggtacttactacatacttaacaatttcaatagcatattatatttcccaatataatttagatctttgacattatgttacagatctgtgaatatcagaatattaatgtcttatgtcacattttttatctgcataggttaaaccattcttgcatcccaggagtaagtcccagttgatcatggtgtatgatattttaaatttcctactgaattcaatttgctattatcttgttgaggatttttgcatttaccttcaccagagatgctggcctataattttcttgtgttcttatttgaatttgatatcataacaatgctggtcttacagaatgactttggcagtattcctttatcttcaaatttctagaagaatttgagaagaactgattctacaagttgaccacttgtcattaattcttccttaaatgattagtacaattaaccaatgaagccatctcatcttgacttgtctttgttgggagatttttgattacagcttcaatctccttccttggtctgttatatcttctgtttcttcatggtatatcttggtaggttgtacgtttctattcatttatccatttcttcaggattatccaatctgttagtgtataactgttcataacagtctcctatcatcctctgtctttgtttagtatcagttgtagtgtacccttttccttataaatttctttttttaagattttagatttggggggcacatgtgcaggtttatcacatagatatattacataatagtgaggtttgggcttctaatgtacccataatccaaacagtgaacaagctgtacccaattgtaaaattgtaaattcgaattataaaaatccgaattccccttttaccttccccctttttggagtctccaacgtctgatatttacatctttgcatctatatgtaaccactgtttagctcccacttacaagtgagaatgtgcagtattcgcttttctgttactgagttatttcacttagtataatggcctccagctccatccatgtagaaacttctaaaaaggacataatttcatttgtttttatgactgcatagtatttcatggtatatatggaccacattttctttatccaattatccactgatatacacttaggttgattccatgactctgctattgtgagtagttctgcgataaacatacataaaggtgtctttcttatataatgatttcttttcctttgggtagaagcccagtagtggcattgctgaattgaatggtaattccatttttagttttttcaggaatctccaaactgttttccatagcggttgtactaatttgcattcccaccaacagtgtataagaatacccttctctctgcatccatgccaacatctgttgttttctgacttttaatcatagccattctgactggtataagataatatctcattgtggcttcaatttgcacttctctgatgattagtgatattaagcatttttaaaatgtttgttggcaactttatgtcttcttttaagaaatgtctgtccatgtcctttgaccaatatttaatggggttgtttttctcttgctgagttatttgggttcattgtagattctggatattagttctttgtcggaggtatgacttgcaaatgttttctctcattctgtaggttgtctgcttactctgttatttcttttgctgtgaacaggctttttggtttaattaagtcccacctgtgtacttttgttcttgttttatttkcttttggggtcttagtcataaattctttgcctaagccaatgtccagaatagtttttcctargttttctttcargattttaagtttcacatcttacatttatgggtctttaatccatcttgagttaattttttaatatgatgagacacagaggtccagtttcatttttctgcatgtggttggccaatttcccagcaccacttactgaataggatgtcctttccccattgtttatttttgttgaatctgctgaaagtcagttggttgtaggtatgtcactttatttatgagttctttgttctattcctctgatctatgtgtccatctttatcatggtatcacgatatcagtaacatgctgttcagccttgtagtataatctgaagttaggtaatctgatgtctctggctttgttctttttgcttaagattgctttggctattcaggctctttttttggtccatatgaacttcaggattgttttttctaattctgtgaagaatgacattggtaattagggattgctttgaatctgcagattcctttgggcattgtggtcatttttaacaatattgagtcttccaatccatgagcacgagatatttttccatttgtgtaatcttcctgtagagaactttcacctctttggttcaatgtattcctagttattttatttttgtgtgtgactactgtaaatgggatagagttcgtgatttggttctcagattcagtaacagtatacagaaatgctactggtttatgtacattcattctatatcctaaaactttactgaagttgtttatcaagtctaggagtctttaggattttctaggtatgggggcatgtcatcagtgaccagagataatttgatttcctcttttccaatctggatgccttttgtttctttctcttgcccaactgttctgtctaggacttccagtactatgttgaatagaagtggtgtgagtaggcatccttgtcttgttccagttcttagggtgaatgctttcaacgtttccccattcaatatgatgttggctgtgactttgtcatatatgattcttactatttttaggtacgttccttcaatgcctagtttttgagggtttttaacatraagtgacattgaattttaccaacagcctcttctgcatctattgattgacatgatcatatcgtttttctttttaattctgcatatatggtgaatcacatttactgacttgcaaatgttgaaccatctttgcatccctgaaataaaacacacttgattgtgatacattttgtttttgatgtgcgataaatctggtttgctagaattttgttgaggattgttacatttatattcatcagggagataacaagtatcacagaaagagttagggaggtatccttcctgccttggtattttggaatagtttctgtaagactggtacctgctctcctttgtagataaggcaaaactgtcctgtaaatctctctggtcctgggcttttttgttgttggaaggtttttttttactattgattcaatttccttactcataatttgtctgttcaggatttctatttcttcctgattcaatctcaggaagttgtgtgttccaggaattcacatatttcttctaggttatctagtttgtgcacatagagatgctcatagtaacccctgatgagcttttgtatttctgttgtatcagcaatactgtcacctttatcatttctgattgtgcttacttgaattttctctcttttttcttcattaaactagttagtggtctaccaattttgtttatccattcaaagaacaaactcttcattatgttgatccttttcatcatttttttttggtctcaatctcatttggttctgctctttgttatttctcttcttctgctagtccctttactttgagtctgtagttgtcttttgccattaggtgggtctctggtaggcagcagatggttaagtcctgcttcttttatccaatttgctagtgtttattttttaaatggaatatttaggccttttatgttcaaggttaatattaatatgtgtgtttttttcccatcatagttttgttagctaggtgccttggagtctcagttgtgtaactgctttattggatctttgaggtttctacttacctgtgctttatatgatggtgagtattatcctttcattgccatgttcagaactcctttgagcatttcttgtaagatggtgtagtggtgatgaattctctctatgtgtgcttatctgggaaagactatttctccttcaattatgaagcttagtttggcaggatataaaattcatgtctgacattttttcaaggtggttaaaaataggcctctaatctcttatgttttacaaggttgctgctgagatgtctaccattaggttgatgagcttccttcataggtgatttgacacttgtctctagctgcctttaagatttttctttcatattgactttgaatagcctaatgactatatgccttggtcatgttaatgttgtacagtatttttcaggtgctctctgaatttcttgtatcttgatgtctacatctctagaagattgggtgattttcctaaattatcccctcaaakatttttccaagctttctactttttcctcttctccatcaagaatgcctgtaagtcacagttttggtagctttacataatcctgtatttcttgaagactttgttcatttacaaaacttattttttgtctgattgggttaatttgtttttttttttcttttattattatactttaagttttagggtacatgtgcacattgtgcaggttagttacatatgtatacatgtgccacgctggtgcactgcacccactaactcgtcatctagcattaggtatatctcccaatgctatccctcccccccgccccaccccacaacagtccccagagtgtgatgttccccttcctgtgtccatgtgatctcattgttcaattcccacctatgagtgagaatatgcggtgtttgattttttgttcttgcgatagtttactgagaatgatgatttccaatttcatccatgtccctacaaaggacatgaactcatccttttttatggctgcatagtattycatggtgtatatgtgccaccttttcttaatccagtctatcattgttggacatttgggttggttccaagtctttgctattgtgaatagtgcctcaataaacatacgtgtgcatgtgtctttatagcagcatgatttatagtcctttgggtatatacccagtaatgggatagctgggtcaaatggtatttctagttctagatccctgaggaatcgccgcactgacttccacaatggttgaactagtttacagtcccaccaacagtgtaaaagtgttcctatttctccacatcctctccagtacctgttgtttcctgactttttaatgattgccattctaactggtgtgagatggtatctcattgtggttttgatttgcctttctctgatggccagtgatgatgagcattttttcatgtgttttttggctgcataaatgtcttctttcgagaagtgtctgttcatgtcctttgcccactttttgatggggctgtttgtttttttcttgtaaatttgttkgagttcattgtagattctggatattagccctttgtcagatgagtaggttgcaaaaattttctcccattttgtaggttgcctgttcactctgatggtagtttcytttgctgtacagaagctctttagtttaattagatcccatttgtcaattttggcttttgttgccattgcttttggtgttttagacatgaagtccttgcccgtgcctatgtcctgaatgttattgcctaggttttcttctagggtttttacggttttaggtttaacatttaaatctttaatccatcttgaattgatttttgtataaggtgtaaggaagggatccagtttcagctttgtacatatggctagccggttttcccagaaccatttattaaatagggaatcctttccccattgcttgtttttctcaggtttgtcaaagatcagatagttgtagatatgcggcgttatttctgagggctctgttcagttccattgatctatatctctgttttggtaccagtaccatgctgttttggttactgtagccttgtagtatagtttgaagtcaggtagtgtgatgcctccagctttgttcttttggcttaggattgacttggcgatgcaggctcttttttggttccatatgaactttaaagtagttttttccaattctgtgaagaaagtcattggtagcttgatggggatggcattgaatctgtaaattaccttgggcagtatggccattttcacgatattgattcttcctagccatgagcatggaatgttcttccatttgtttgtatcctcttttatttccttgaccagtggtttgtagttctccttgaagaggtccttcacgtcccttgtaagttggattcctaggtattttattctgtttgaagcaattgtgaatgggagttcactcatgatttggctctctgtttgtctgttactggtgtataagaatgcttgtgatttttgtacattgattttgtatcctgagactttgctgaagttgcttatcagcttaaggagattttgggctgagacaatggggttttctagatatacaatcatgtcgtctgcaaacagggacaatttgacttcctcttttcctaattgaataccctttatttccttctcctgcctaattgccctggccagaaattccaacactatgttgaataggagtggtgagagagggcatccctgtcttgtgccagttttcaaagggaatgcttccagtttttgcccattcagtatgatattggctgtgggtctgtcatagatagctcttattattttgaaatacgtcccatcaatacctaatttattgagagtttttagcatgaagggttgttgaattttgtcaaaggccttttctgcatctattgagataatcatgtggtttttgtctttggctctgtttatatgctggattacatttattgatttgggtatattgaaccagccttgcatcccagggatgaagcccacttgatcatggtggataagctttttgatgtgctgctggattcggtttgccagtattttactgaggatttttgcatcaatgttcatcaaggatattggtctaaaattctcttttttggttgtgtctctgccaggctttggtatcagaatgatgctggcctcataaaatgagttagggaggattccctctttttctattgattggaatagtttcagaaggaatggtaccagttcctccttgtacctctggtagaattcggctgtgaatccatctggtcctggactctttttggttggtaaactattgattattgccacaatttcagatcctgttattggtctattcagagattcaacttcttcctggtttagtcttgggagagtgtatgtgtcgaggaatgtatccatttcttctagattttctactttatttgcatagaggtatttgtagtattctctgatggtagtttgtatttctgtgggatcggtggtgatatcccctttatcattttttattgcatctatttgattcttctctctttttttattagtcttgctagtggtctatctattttcttgaccctttcaaaaaaccagctctgggattaattaattttttgaagggttttttgtstctctatttccttcagttctgctctgattttagttatttcttgccttctgctagcttttgaatgtgtttgctcttgcttttctagttcttttaattgtgatgttagggtgtcaattttgggtctttcctgctttctcttgtgggcatttagtgctataaatttccctctacacactgctttgaatgtgtcccagagattctggtatgttgtgtctttgttctcgttggtttcaaagaacatctttatttctgccttcatttcgttakgtacccagtagtcattcaggagcaggttgttcagtttccatgtagttgagtggttttgagtgagattcttaatcctgagttctagtttgattgcactgtggtctgagagatagtttgttacaatttctgttcttttacatttgctgaggagagctttacttccaagtatgtggtcaattttggaataggtgtggtgtggtgctgaaaaaaatgtatattctgttgatttggggtggagagttctgtagatgtctattaggtctgcttggtgcagagctgagttcaattcctgggtatccttgttgaccttctgtctcgttgatctgtctaatgttgacagtggggtgttaaagtctcccattattaatgtgtgggagtctaagtctctttgtaggtcactcaggacttgctttatgaatctgggtgctcctgtattgggtgcatatatatttaggatagttagctcttcttgttgaattgatccctttaccattatgtaatggccttcgtctcttttgatctttattggtttaaggtctgttttatcagagactaggattgcaacccctgccttttttaattttccatttgcttggtagatcttcctccatccttttattttgagcctatgtgtgtctctgcacrtgagatgggtttcctgaatacagcacactgatgggtcttgactctttatccaatttgccagtctgtgtcttttaattggagaatttagtccatttacatttaaagttaatattgttatgtgtgaatttgatcctgtcattatgatgttagcaggtgattttgctcgttagttcatgcagtttcttcctagtctcgatggtctttacattttggcatgattttgcagcggctggtaccrgttgttcctttccatgtttagtgcttccttcaggagctcttttagggcaggcctgctggtgacaaaatctctcagcatttgcttgtgtgtaaaggattttatttctccttcacttatgaagcttagtttggctggatatgaaattctgggttgaaaattcttttctttaagaatgttgaatattggcccccactctcttctggcttgtagggtttctgccgagagatccgctgttagtctgatgggcttccctttgagggtaacctgacctttctctctggctgcccttaacattttttccttcatttcaactttggtgaatctgacaattatgtgtcttggagttgctcttctcgaggagtatctttgtggcattctctgtatttcctgaatctgaatgttggcctgccttgctagattggggaagttctcctggataatatcctgcagagtgttttccaacttggttccattctccccatcactttcaggtacaccaatcagatgtagatttggtcttttcacatagtcccatatttcttggaggctttgctcatttctttttattcttttttctctaaactttccttctcgcttcatttcattcatttcatcttccatcgctgataccctttcttccagttgatcgcattggctcctgaggcttctgcattcttcacgtagttctcgagccttggttttcagctccatcagctcctttaagcacttctctgtattggttattctagttatacattcttctaaatttttttcaaagttttcaacttctttgcctttggtttgaatgtcctcccgtagctcagagtaatttgatcgtctgaagccttcttctctcagctcgtcaaagtcgttctccgtccagctttgttccattgctggtgaggaattgcgttcctttggaggaggagaggcgctctgctttttagagtttccactttttctgttctgttttttccccatctttgtggttttatctacttttggtctttgatgatggtgatgtacagatgggtttttggtgtggatgtcctttctgtttgttagttttccttctaacagacaggaccctcagctgtaggtctgttggagtaccctgccgtgtgaggtgtcagtgtgcccctgctggggggtgcctcccagttaggctgctcgggggttaggggtcagggacccacttgaggaggcagtctacccgttctcagatctccagctgcgtactgggagaaccactgctctcttcaaagctgtcagacagggacatttaagtctgcagaggttactgctgtctttttgtttgtctgtgccctgcccccagaggtggagcctacagaggcaggcaggcctccttgagctgtggtgggcttcacccagttccagcttctgggctgctttgtttacctaaggaagcctgggcaatggcgggcgcccctcccccagcctcgctgctgccttgcagtttgatctcagactgctgtgctagcaatcagcgagactccgtgggcgtaggaccctctgagccaggtgcgggatataatctcgtggtgtgccgttttttaagcccgtcagaaaagcgcaatattcgggtgggagtgacccgattttccaggtgccgtctgtcacccctttctttgactaggaaagggaactccctgaccccttgcgcttcccgagtgaggcaatgcctcaccctgcttcggctcrcgcatggtgcgcgcacccactgacctgtgcccactstctggcactccctagtgagatgaacccggtacctcagatggaaatgcagaaatcacccgtcttctgcgtcgctcacgctgggagctgtagaccggagctgttcctattcggccattttctgattgggttaatttgaaagactagtcgtcaagctctgaaatctttcttctggtttgtctagtctattgttaaggctttcaacagtgttttgaagttccttcagcaaatttatcattttcagatattccatttgttttttaaaaaatatatctatgttgtctttcatctcttagattgtttctctagttgctttggttttcaactttctcttgtatctcactaggcttcttaacagtccatatcttaaattctttatctgtcatttcaaagttttcattttcattaagattcattgctagagagctaatgtggtcctttaggggtgtcacaacattctatttcttcctggtgttggagctcttgtgctggttccttctcatgtgtagaagctggcacttattatttttggatttatcttcatttgggtgggattatttttcgttgccccttgagggtgtgactcttgcatatgttgggttgtgtcctttggctttgcttctacgtgcttttagggggccaaggctctgtataaattccttggttacagatagccttagtgtagttgttttctcaaatgttaattgtttgtagtttgtagtagtggtatgctgtatatgtggtaaggctcactgtctcctatagagatgcaaagttggaggtcttttgggggaaacttacctcattccttagagctgtgtacttgtcagcaggaattatattgggttgtgcagttcaccctacaggccagcaggtgatgcctgcaggtaagagctgtctgagtgctgtgcaatgatatcaacagttgctgcgacaggacatgcagttttgacctcctggccagtaggtgatgctggcaggtgagaggcagctgcagtgatgacagtgggatttttacttggcctttgttgataaggaatacaagagtgttcttggtgatgggtggggggtgtggagctctcagtggtcccatcccatgctctgctcccaaggctggctagagggggcaaagctgggtgggactgggtctggtgagcccgtgatcaggctctctgaggcagacgtgaccttggtagggctgtaggggcagttctcaggcagctggaacaacactctagggaggggtgcaggcacctcttctgtgccacaagagctggttcagggtaagagggctagccctgggwtttcattccagcagatggccatgaggcccactcagcttctacacccctgactggtgggtytccctccagtgtccaccctggcagcyggcccaattagttatgcaaatcccaaaccacctgtgcccagactgccatgccatcccaggcattccagaatgcaagactccctgsagcagaaagcaaggctatgaggctatacccttcctagtctattctcatgaagggaggggtgcccagcttctgtaycacctgaaaaacccacaccacactcttccctgtgttctgacagtgggggttcctcccctgcttgagatcaggccacagatctcatccccatattcctgggtggtatgcttgagtcctggcaaactgagaccaggccagtggatttgtcctctggctccttaggatcaaccactggcagtgataggaggagtaaagtgttcccaggtagccaataaaccactcaggtggggcaatggaggctatgctgtgggtcccactccacagcaatggccaggcaggcaatcttaggagggactggcaggcatggtcgtgtgtggtttagattcacctcagtcctgcaggaatggtggtggatcctgaattggtcatgtgaacatgcatgggccccactctatcctggtgtggcagacagcagatgtagccgctcggatgcagggcactcgggggtgggtgcccagagtcacgttttgctgcagctgcctagcacactgaaggcttttgggctccttgtggcttcaagtagtgcctctgtatggtctccaggcagctcctcctaccaatccaaacgtattcaggggttgtgggaactcctctagaatttcagaggttgacagtgggaaagtggtgttcccgggtttcttcactcacaccttccttgggtccattctggtcctaaggtgtctggcaatactgagccagcagtgttgcttcctacttcttcaatcatgtctgtcatggcctatatattaaatttcagtgttttctctcaaaagatctgttgaaagtgtgarggtttactcaatattttggttcctctctgtagaagaggtgcatcccagatccagctagttsgccatctttaatccctctcctcatttttcatttattattctatttggatattccctccttttttaaattctagctaaatgtttgttgattttatcttctcaaaaaactaactcagttttgttgatcttttgtattgtttttctactctttatttcatttatttgtgctctaatctttattatttcattccttcttctaactttggttttactttgttcttatttttctagttccatgaggtccaatattaagttgtttatttaagatcattccttattcttaatgtaggcatttattgctataaaattctcttttagaactgcttttgctgcattccatgttttggtatgttatgtttccatttttgtttgtttcaagatattttttacttcccctttcatttcttctttgacctttggttgttcaggagtgtgttgcttaatttccacatatttgtgaattttccaattttcctcctgttacggatttatggtttcatgccactgttgacagaaaacatacytgatataattttaattttaaatttgttaaaacttatcttgtggcctaacaaataatctgtcctggagaatgttacatgtttgagtgagaaaaatgtgcatattctgctactgttgaatggaatgttctgtatatcaggtccattttgtctagtgttgttcaaatccactgtttctttattgattttctgtctagatgatttctccattattgaaagcactgaagacccctatgattactgtactgctatctatttctcccttcagttatattttttctttacatatttatgtgctccaaaattggtggcaaatatatttagaattgtatcatcttgataaattgacctctttatcattatacaatgaccttcattgcctcttgtgacaattttttacttaaaatttattttgcctggtgtaaaaatggccaccactgctctcttttggttccacttacatggaacatatttttccaaccttcctctttcatcttatctgtatctttaaaggtaaaataagtctcctgtaggcagcttgtagttgggtcagttttaaaaaatgcatttaaagcctgagcaacatagcaagaccccatctttccatgaaagttttttttttttttaaattagccacatgtggtggcatatgcctgtagtcctagctacttaggagactaaagcaagaagactgcttgagtccaggaggttgaagttacagtgggctgtgactgcatcactgcactctaccctggtgacacagcaaggccctatctctgtattaaaaacatgcatagtaacaatgtattttgattactgagtttaatccatttgcatttaaagtaattattgataagtaaaaactactgccattttattgttttctgaaaagttttaagtgcctttgtttctttgctgcttccattgatattttatatatatatatatattttttgcaatcgcatggtttatcttttgtgtatctaacacagtttttttcttttaattatccaaaaggcttacaaaaaccattttatagtcataacaatctattttaaactgataagaacttaatttccatcacatataaaaactacacttttacctctcccctcccacattctgtgttaatttataccacaatttacatacttgtatattgtatatctattaaaaattattgtagctatattttaataccttgttttttatttttatattagagttacaagacatttacacaacatcattatagtatcacagcattctgaatttatttcttttttaactgtcccctcaggtatttatcctttgagttacaaacaatccaattatactcttttattttaaaatgtaaaattaagttattattgactgcagtcaccctattgtgctatcaaatagtaggtcttattcattctttctcactatatagaatagtatttatagtttggaacttctttactagtgagttttattctttcatgttttcatgttgctaattagtgttcttttgtttcaacttgaaaaactgccttcagtttttcttacgaagcaggtttaacagtgacaaaatccctcagcttttgtttttgggaaagtatttcttcttcatttctgaagtataactttgctgggtatagtatgcttggtcagcagtgtttttcttttggcactttgaatatatcatcccactttctccttgcttgacaggtttctgcacagaaatctgcctacagtcttatggagtctgcaacttttcttttgctgctttcaaaactgtcgttgacttttcataatttgattgtaatgtgccttagtgaagatctttttatgttcaatctattggacttctttgatctttacagatctgaatgtccatttgggctttttgaatctgtagtatggtgtttttcactgattataaataaaaacctcagccattatttcttcaagtatggctgctgccctagtatcttttctcctggcataagatgtattgaatcttcatgtatcttaacctgtttttcatatcttttcttttttcttttttttctgagatagagtcttactctgtcgcccaggctggagtgcagtggcatcatctcggctcactgcaagctctgcctcccgggttcacgccattctcctgcctcagcctcccgagtagctgggactacaggcacctgtttttcatattttttctatgtgtctctctgagttccatttagtgtaatttttctctatcttccaaattattaatttttctttaaccctgtttaatttgttgttaaatgtatcctctgaatttcaaattcctactattcaattttttatttttagttctattagattattcttaaaacacactggttttattttatcatatcatagcagataaccatctgatttttctttaaacaagacagtagtcattttataaatctgtatgacgtaactctagtaattagcctttatgggtcagtttctgcttccttttgtttctggtaattctcactcatgtttctaccttcttgctaaattatttgggagacttctatagtactaggatgaaggtatatttctccaaaagacttgtgtttacttctgcctggtgccaatagatatttgtagcagttccactttaaactcaaatatggcttgagatttttcaggctacacagcaatgtaaacttggacttcaaatcagtgcgagacagcttgtggttactacttctcaaagacaatcctccattccctgaatacctaaccagggaaactttgcttgttcactctcaaggatggtagagatggaaaatggtttgcttttagttcatcctcacagtcgagacataatccatactgctattaaactatctttggtggtcttgggctttgtttcctctcagaagcctgaaaatcaccttacatttcactggctaggcaaatgtattcaggaccaaagtgtcttctatgatctgctctgtttacttctatgggttccttttttcacttagattttgacaaggtagtgtcttacttagctctttagaagtgctaagaagttttttgtttttgtttttaatctagcaccattagttgttttcagtaaaaagggttagttcaaataatcgaacccaacatattctcagaagcagaacctgttcactgattttttcaccttcctttctcccttcatctaccttaytcttattgcccccttttttccccagacagatcatttccttcttgattacctattaagactctggatcaactacgtaattcaggccacagataagaaatacataagaaacccttgctccaaaaatgtttgagcttagtattaacattaacaggttcatagctctacaattaaccagctgccataagtgagcaagtcaacttctctgagtctcactttctaraaacctgggactgtatctaaaaacagccctttccaattcttatatattctatctcctttctgtctttcaattatctcccttctattcccatcccatgggcaactactttaactcaaaaacccttaacactgcctgattattacagcckyctcgttgaagacactacctcagcctccctccctctaaaattctttttccatattacaccagacttatttataaattattttaatgatgttcttctcatagcttccatgataaggttcaaattccttgacatagtacacaaatcacttcatattttttcccttgtttacttctctgatctcattttctgtgaacactttgctcaagcctctgtggcttcatgtatgttgcctcttttgcctgaaaaccttatattcactgtactttgtctaattaacctccatcggtccttaagaactaaagaccactctgtttcactcagaactcttctacgacttctccttccttctctaattcggatgctcctccttgatgctgccatataatgtatacctaaataaaactataatgtatttgtgacttatttatctctcttctccattaagccatataaacatcattcatgcagagagtcttatccacagttgcaaccaatttctacagaggttgctgaatggacaaatgaacaacactataaaatgagagggctgattacattatttcaaaagtcccttgttaaccattagatttgtcatattgtagaaatcttaacttctgccaatctgtgcctattatctgagcttttatctacacttccatatttcattatccagataatatcctgacctgcatgcctgacccacttttccagattttagttttgatatcttgtctagacgacctctttgaacttgaattcttgctgggaagcttctcctttgactggtcttggattcgatttattgcgtgtacttgtttaccttttctgatgcccttgttcctgatccccaacctctctaattaatactatgccacttccatatcccatttttatatcattggtgcttaacctggcaagacaggctaaataatttaattagtttattaggaaaagtagaaagaagaaattttagagctagaataaaagactaggtccaatttctccatttgacagatgaggaagaagattaaactttcagtgtttactcactgaaagtgcagcaagtagagggtctccttactttcaccgctccttccactcagccatactttgagtaaaagtaaaaatttaaagtgaaaaaaccaccttacttaaaggattctgatgtatgtatagagaggtttacaagcactaaaaatacctccatgatttatatgtgtttgggatttttgcatattgaattataatttcactatatctatatgatatttattggtttctmagtagagtattcattcggggttacaataaaaaattaaaggtaggttcaattatatcaacaatatttggaaagcttgatcctggttaataaattctactaaatttcaatacattatatgcattgtaaatatggtcaaaataacttgcttattctgcttcataatccactttttagtaagtaggacacctaatatttattgatagccaaatttactattgatttcaaacttttcatccaatttatcttttcagttaatatatattttaaaaaacgaatcatgagaatacaatattacaaaaaaaaatcagacttactgtcatcctcccagcagttcttagcattcccttctctttcactgctcctccctggtaacactgtctggtctgttggcaggtcatcctctggtacaccttcacagtcagctgcatctgtaacactttcttcttccacaatatgcagtttgtcttcatcatctgaatctgaatttgtttctaccacagtattataatttgtaactgtaatacaaacaagaaacaaataatcaaaaccaactagtaaaacaatcagtttttacatctcagaaaaataaaaaagatgcttaaaacagattgtaattcaatgttttcttttaaataatgttaacaactaatttatttgacaacacacatatgtaacactagatattacatgaccaaaatgacaaatagtagctacccttattgaatacttactatatatagacctgctttataaatactaacccattaaattcttacaacaatcttataacagccttatgaaataagagttctaccacttactacttatatccttgttttatatgtaagaaaatcaaggcagagagagagtaacttgtctaagatcacagctaggaagtggcagagccaggattttaacagcaacagtctgattccatattttgtgctcttaaactctatattaaacctcccctccaatgataacgagcctacagcatacgatattgcttatgtacaattagggctttgaatccttaaaggattgcaacttaagaaaagaggccatctttcctaacaaaatagcattacatcatcaagtttaccacaagtatttttaagctgttaatgatccatgcattacattattaatccaacactgactttagaaagaatcaaccaaattagtcaatttctatataattaagtttgtcattctgaataactgacatttggaagttttcaaatgagcacctttttctataatttttaatgaatttcaataaaatataacatcagcattttattattctgagtgatttctatagttcatagaaccaggagtataagctgagaataaaattctataaaataaataatctagtataatcaatgttttcctttagagtccttgcaataatcactctaacaggatgaatatttagtacttcattgggtatggtcactagaatatctcttttaaactactttcagggtgattcttatttgctaagaaaagattcggaagaagggagaaaaagaagcttcactttatttagataactaggcagtaattactatcagttattctttccactgcttccttaaattttccaacaattcttgaaaaataatcacctaaatgcttaaataatatgtatacatatccctctacacacacacacacacacacacacacacacacacacacacacacacactcctgagaacacgaaggaagaaatacaattgaaaatatgggtagatatttaaaggtgaaaacaaataaccaaaactccaaaacagcttttatagactttaggaagactcttgtccaaaagagtaccagaggtcaccactgtgctcacatattaggagttcttcaatatcttgtgtcagaagaaaaacgtcaagttttgttatgccattaatattttagtatgaatatgcttttccagatcttttcccaagagtaaatggttttctctcttattttattataaaagtaatgcatgtaaaatcagtcaatgcaaaacatgtaaagttagtaaaggcagccctatttttccttcctcaatccactccataaagataaaaataatggcaaattttattaattatttcaatgcactaagtaggcatgatgtaactcattttatatacttttcttacttagttgtaacacaaacctcaccttatcttatatttaatataaatccagcatcacctatatacaaatgtgtgtatatataattcaaaatacacatgatcacatcatactgctttgccacttatattatgccactttataacatgtcttggaagcctttctatgtcagtacagacagtccctgactaattatggcttgatttacaatgttttgactttatgatggtgcaacaccattctgtttttcacccttggtacagtattcaataaatgacaagagatattcaacatcatattaaaacataggcttcatgttatgatttgcccaactgtaagctataagtgttgcaggcatatttaaggcaggctaagctcagctatgatgtttgataggttaagtatattaaatgcattttcgatttcacagtattttcaacttacgatgaatttatcaggacataacaccatcataattcataagtcaaggggcatctrtatacataaagctttcttatttccctctggatagctacacagcattctatcatacagatatacttcaacctatgatctattgataatttttttgcctgtgttaagcactagcaacaatgccataatttttcttgtaartatgtataattttggccattccttatatatacttatcagattagtaggggtgaaactttagagtaaaagggaagacttatgaagtagatactgttaaactgccttccagaatggttttatgtttccataaatattatytgaggaggtctattcagtatatcaatacaataaagaaaaaagtcactttaatatagtaatgagaaaatacgtgtcragatggaaaaacagccacactatgagcagccacactacaagcagagtgaagtccgtgtgtgggtaaggggaatgatttttaaaaggctgtttcacagctgactataagcttaagtttcctgactgtaagagtttcctgatgggcctttaactcatagtaagaggcaaatacacacacacacacacacacacacaaacacacacacacacacacacacacggaatggagatgcttactggcaaatgatgcacaatgctattaactttcatttttactttcagtacttattagcaacctacttgataaagtcattttaagttggcatttatatatgacaagctaaaattagaacatggtaagtatttgctgaggattaatcaattctatactccactaagatctggctatcatgtaaggtctggctcactgcaaggctctcaaatatgcttgaccagtgaaactgcatgcctagatagctgacattcctgctgttttgcgaagggaggcttctggacatctttggtatcttgagttggccatggttttatgctgatgccattcttaccttttaatgatgcaatattgcagcctagcattatattatcaattttgttagctgtaggttctctggttgaccttggattgcacatttaacacatttatatctagagtattttgggcttgaaaacttcccccaaattaggctttaagacatatatgcattctggttcaaatgcttgcttgcatggttcatatttttttactgagttctttttaaccagagatactgggtgttctattctgcccaagtcaaccatagctcaaagcactcttaaagactgcctatcactttctgggactctagcagaactccttcctgtcccctgtataagctgccattgtaagatagattatgtcataaatccaaaacacagmgattgtatatattttataactatcttgtgaattttcccagagcatgtttgatatgtgtcataaaatgggaaaaatccaaaaaatcaatgtattttatctgctgagatggaaaaaaagaccgataactattttccaagatttttactgtcttttgcttctgtcacttagctgagagaaaaaaaacagtgaaaactgctgatattaatgactgaaacttaaattaatagtcaagcttacttgtatttctgaatctatcattttgtttgtggatctacacagcttatttaaaaaatggcccaccaccaaaagcatacagagtaatgcaggcccttgataaattctagtagccaatgagggcttcagttatctaaatgttctgtccaatgatctctatacccctgaactgtttaacctgtggctgaaaatatagtatagtttatctgaaaataacaatcataggtgatcatcacatcttgattctgattttaattaaaatatgaagaaagcaagggtaaaaaatatggtaaacagttttaaaaatctttaaacatgactttagataatatgaatttaaacttcaatagaagatggtaacattttcaatgcatacttattgtcatcagaatgtaaagacatgttgacttcttgatggtggtagttgttggtattatttgctaatatttaatgccagacacagcagtaaccactgcatacagtggttgtgaagatataatgatttttaaatgtattgtgcttagatcagtgtctggtacacagtaaggactagagaagtgttttctgctactactattagcttggtaaatctttacagcagctcctaagaagtaggtattattatatatccctctgacagacaaagaaaaayagagtacctaagtagcctgtctgaggttatgtagctactaagttgaagagtgaaagccaggttggctagattccacagcctacatacttcattatgtgcaaaggctcctgactgaaaatcgttacactgatgaaaaatattcttaaacttttgtgtgtatacttattttggggtactgaaattccatacttaacaatttaccactgcagatattttctaatgactaaacaattttaaccattagaatctcataatatktgaacagtgtattayagcataatatcatccttatagtcaaatctttttattattatactttaagttctggggtacatcgcagaacgtgcaggttacataggtatacacatgccttggtgatgtgctgctccatcaacccatcacctacattaggtatttcttctaatgctattctcccctagacccccaccccgccaacaggccctggtgtgtgatgctgcccttcctatgtccatgtgttcttattgttcaactcccacccatgagtgagaacatgcggtgtttggttttctgttcttgtgatagtttgctgagaatgatggtttctggcttcatccatgtccctgcaaaggagaggaactcatcctgttttagggctgcatagtatttcakggtgcatatgtgccacattttctttatccagtctattattgatggacatttgggttggttccaagtctttgctattgtaaatagtgctgcaataaacatacgtgtgcatgtgtctytatagcagcatgatttataatcctttgggtatataccgagtaatgggatggctgggtcaaatggtatttgtagttctagatccttgaggaatcgccacattgtcttccacaatggttgaactaatttacacacccacaacagtgtaaaagtgttcctatttctccacatcctctccagcacctgttgtttcctgactttttaatgaccaccattctaactggtgtgagatggtatctcattgtggttttgatttgcatttctctaatgaccagtgatgatgagcattttttcatatgtctgctggctgcataaatgtcttcttttgagaagtgtctgttcatatccttgcccactttttgatggggttgtttttttcttgtaaatttgttgaagttctttgtagattctggatattagccctttgtcagatggatagattgcaaaaattttctcccattctgtaggttgcctattcactctgatgatagtttcttttgctgtgcagaagctctttagtttaattagatcccatttgtcaattttggcttctgttgccattgcttttggtgttttagatatgaagtctttgcccatgcctatgacctgaatggattactcaggttttcttctagggttttcatggttttaggtcttacgtttcagtctttgatccgtcttgagttgatttttgtataaagtgtaaggaaggggtccagtttcagttttctgcatatggctagccagttttcccaacaccatttattaaacagggaatcttttccccatttcttgtttgtgtcaggtttgtcaaagatcagatggttgtagatgtgtggtgttatttctgaggcctctgttctgttccattggtctatatatctattttgataccagtaccatgctgttttggttactgtagccaggtagtatagtttgaagtcaggtagtgtgatgcctccagctttgttcttcttgcccaggattgtcttggctatgtgggctcttttttggttccacatgatgtttaaagtagatttttccaattctgtgaagaaagtcagtggtagcttgatggggacagtattgaatctataaattactttcggcagtatggccattttcactatattgtgattcttcttatccatgagcatggaatgtttttccatttgttgtgtcctctcttatttccttgagaagtggtttgtagttctccttgaagaggtccttcacatcccttgtaagctgtattcctaggtactttattcttttaatagtaattgtgaatgggagttcactcatgatttggttctctgttattggtgtataggaatgcttgtgatttttgcacattgattttgtatcctgagactttgctgaagttgtttatcagcttaaggagatttggggctgagacaaaggggttttctaaatatacaatcatgtcatctgcaaacagagacaatctgacttcctctcttcctatttgaataccctttatttctttctcttgcatgccaagtctctgccctggccagaaattccaacactatgttgaataggagtggtgagagagggcatctttgtcttgtgctagttttcaaagggaatgcttgcagttttcacccattcagtaagatattggctgtgggtttgtcataaatagcttttattattttgagatacattccatcaatacctagagctcgtggagagtttctagcatgaaggggtgttgaattttatcaaaggctttttctgcatctattgagataataatgtggtttttgtgatttgttccatttatacaatggattacgtttgttgatttgtgtatgttcagccagccttgcatcccaggtatgaagctgatttgatcgtggtggataagctttttgatgtcctgctagatttagtttgccagtattttattgaggattttcacatcgatgttcatcagggatactggcctgaaattttccttttttgttgtgtctctgccaggttttggtatcaggatgatgctggcctcataaaatgagttcgggaggattccctctttttctattatttggaatagtttcagaaggaatggtaccagctcctctttgtacctctggtagaattcggctgtgaatccgtctggtcctggacatttttttttattgggaggctattaattactgcctcaatttcagaacttgttattggtctattcagggattcgacttcttctgggtttagacttgggagggtgtatgtgtccaggaatttatccatttcttccagattttctagtttatttgcgaggtcaataaatctttacaagaactttcacatattatttttagcacatgattgcatgcagcactgtatcaactatagtaattaaagtctcatgtaaatatctgtttcttaagtaatgtacaatcataaaaaagcattagataacttatatgagtatggttccaaaaccaatacattctcaattttttattcattggtatgaaagcaagatcacctaaatgcttcataaagaatctcactatcatcatttattgtgacttggaatagcaggatagggccatgtagaggaagaaacttagggaagtggggaagaaagatggaaaagattaactttgagggcttcaattcttgtccgacgataactgtggcatgtattgattaaagccacaggcgaaggccacatttttacctattttgggttgtgtaaaggcttttctttccagaggacacccttattatgttatgcctttaatatgtgcttaactatatcccactcattgccatcaagcccctaagcatgcactcatttgcatgttagaaaagaaagagaaaatctttcttagaagactaatccttaaaaactaacagactacttttaacaaactggttccacatatatcagataagcatattgtcataatttaagaaataactagaaaaatacatacactttgagttgtgttctacagagccaacagactgtactcatattaagtatwagaatattttacacattagcacaattctgagaacaccacaaatttaggcatgaatgctgagtgatgcaaagatcggtggaaacactgaccaagtgtttccatccattattctttaacatcaattgggactacaataacayctctctctctctctctctctctctctctctcwcacacacacacacacacacacacacacacacacacacacacacacattttatcctaaatacagtcactggcatactgccttctacatagtaggtatagaattatttgctgaactgaatatgggaccacacttttttcttttctcagtgaagaaacaagtcaatatacttaagtgttagcaacaattcaggaaaatgaaaacaaaactgcagtcataaccagaccaggcaaayaggtacacaaaatggaatggagaggtcatgtggtaattcataggatcagagaaaacttctgcatataatattactccaggaaagaggagcttgtctataaatactaagcatttactgtaaatttttgttaatctgacttttgaccgaactgataatgttagcttactgtctatatatattttactgtataatgaaggatataatgtaatatacaamtgtaatgttatataataatgaacaatgtgtatattatctaattttaatttaaataatctaaaaataggtatcataatggttttagagtaccccaagtaccatgaacatgttagattttagtaattctaatgattcagtaaattttgggtgaaatttttaaatccttctctaggtaaaatcttcataaactctttttatattttcaaaatatattttaaaacataactccaataaaagtcaatcattctaaattttacccctgcaaaaggggtggtggtttttaatatcttcagatacatgctattaatagaatgaaaactgataggcaaaygcagggaaagggttgtcattgctcacagaatgctagttcttattttctcctgtctctcattacatgaaagttactaaggattcgtaggatttctttgttactctctcagttcttgttctggcctttctctcttcctccacagatcctgtatctatctgcccccaacaagagccatcctcccaaattaccttccccttttccccttttatctaaactcccatccactcaatgagctaatttcagccagtgttcgtacaactcacagatagatgaaacagtgaaaaagcaaagtcctcaagagattaaattaaattcagtcccaaaaaagatgattcctttttgtgttgaggaaagtatttggagtaaaataattcacactaaattacctataactaatatttccttcataagtaaagtctgcatttataaaaggatgctttttaattcatagaaactgttacttatggaagataggtagtatgacgaaatctaagtgtgaagacaaaatcaaaaatacaaatgcggaaagtacttagtcaaaaaatagagaagccatgtaattgatatatcagtccaaaagcccaaactttaaagaatcaagaaaaaagataaattaccagcctacttaatcctagagaaaaaaattaagcagcacgaatgttcaatattaaaatgcaaatggagttaactacaactataaagaaatttaggaaacttactttttaaatattttgtccaaacctaagcaaataaatttgaaaacctagatgaaaaccctttctaggaaaatgtaaataattatcactrtattatagaacttggaaaattatttaagagacatagacagacacatcatagaataaatttaggaagatagtagttaaccacccaaaactgccaggtgttttcacaggtaaatttcttcagatctgtaaaggactgataattttgtaactttttaaagagagaggaaaatgaaaagtctgaattctaggaagtcaacataataattaaaatctgaggaaggatatacatgcatgtgcacacacacacacacaggcacacatgcgcacgcacgcacacacacacacacacgctcagtcctaaataaaatatgcaatggtcctaaataaaatattaaattaaaagaatgaagcaaacattacttaatattagaaaatatatgtgcttttactayattaacataaaggacaaacgacatctatagatacagaaaggcatttgaaaaaaattcaccattcccttgctsatacttttgcatgaaaagaaaactgaagttagtatcataataaatgattatgaatgacaggcatttgtaagataaagatgcttagtttcatcattagttaacaatgatttacaagaataaaccaatttttaaaaagaataaaagagaaagtataaatattagaaaggagaarcaaaattatttgcagaataacatttatagaaaattcaggaaaaatcaataaaaaaactattagcagtaaggacatttggtaaatggttaattacaaatttaaaagaaaaaaatcaatatctttccaacagaaaaaaatcaacagctttccaataatcaacaataaccagctaaaaacacgaaagaggaaaaaattctattactagcaacacaaatgaaacacatgaaggaaaaagcttaaaataaaacatggaggacctacatgaagaaaactagcattctatgtaaaagtcatcaaatatttgaataaatgaaaagctatatcttggttttgaatagaatgattttgtgtcataaatatgtcaattctacctaaatttttctataaattcaatgcaattttgatccaaatgctacacatggtatcttggattctaaatctaaatgacttagatcaacacgtctacagtttatatagagaagtaggagcatggtctctggaacctaactgcctggctcaaatcacagcttcactgcttactagccttgtcaccttgagcatgttatatattcttctaatgtctcagtttcctcattgccaagattgaaatattaatagtatacccctgacatggttatcacaatgatgaaaataggtatatatgcaaaacacttggtaatactgcacatatattcttgatacatactgttggtattattatctgagaaaacaaacacattaaaatactcaggaaaattcagaaaaataatagtaatggtggtggtaggagaacataaactagatataccagagagtaaactttatcttgaagctacagaaatggaaatagatttgtactattacagggatgggcaatcaatggacttgaatataatacaaaatagaccctaaacaaataggagtcttgcaaattagtggggggaaaatgcattatttaataaaaatcatttggaaaaaaatcagatccccaccccawgactttcaccaaaatgaaacccacacgaaatcaaagactttaacttagaaaaaaaactgaaaccataaaagtattagaagaaaatataggcagagaggagccaagatggccgaataggaacagctccagtctacagctcccagcgtgagcgacgcagaagacgggtgatttctgcatttccatctgaggtaccaggttcatctcactagggagtgccagacagtaggcgcaggccagtgggtgcgcgcactgtgygcaagccgaagcagggcgaggcattgcctcacctgggaagcgcaaggggtcagggagttccctttccgagtcaaagaaaggggtgacagacgcacctggaaaatcgggtcactcccacccgaatattgcgcttttcagactggcttaaaaaatggcgcaccaygagactatatcccacacctggctcagagggtcctacgcccacggagtctcgctggttgctagcacagcagtctgagatcaaactgcaaggcggcagcgaggctgggggaggggcgcccgccattgcccaggcttgattaggtaaacaaagcagccaggaagctccaactgggtggagcccaccacagctcaaggaggcctgcctgcctctgtaggctccacctctggggacagggcacagacaaacaaaaagacagcagtaacctctgcagacttaaatgtccctgtctgacagctttgaagagagcagtggttctcccagtacgcagctggagatctgagaatgggcagactgcctcctcaagtgggtccctgacccctgaccccttagcagcctaactgggaggcaccccccagcaggggcacactgacacctcacacggcagggtattccaacagacctgcagctgagggtcctgtctgtaagaaggaaaactaacaaacagaaaggacatccacaccgaaaacccatctgtacatcaccatcatcaaagaccaaaagtagataaaaccacaaagatggggaaaaaacagaacagaaaaagtggannnnnnnnnnnnnnnnnnnnnnnnnnnnnnnnnnnnnnnnnnnnnnnnnnnnnnnnnnnnnnnnnnnnnnnnnnnnnnnnnnnnnnnnnnnnnnnnnnnnnnnnnnnnnnnnnnnnnnnnnnnnnnnnnnnnnnnnnnnnnnnnnnnnnnnnnnnnnnnnnnnnnnnnnnnnnnnnnnnnnnnnnnnnnnnnnnnnnnnnnnnnnnnnnnnnnnnnnnnnnnnnnnnnnnnnnnnnnnnnnnnnnnnnnnnnnnnnnnnnnnnnnnnnnnnnnnnnnnnnnnnnnnnnnnnnnnnnnnnnnnnnnnnnnnnnnnnnnnnnnnnnnnnnnnnnnnnnnnnnnnnnnnnnnnnnnnnnnnnnnnnnnnnnnnnnnnnnnnnnnnnnnnnnnnnnnnnnnnnnnnnnnnnnnnnnnnnnnnnnnnnnnnnnnnnnnnnnnnnnnnnnnnnnnnnnnnnnnnnnnnnnnnnnnnnnnnnnnnnnnnnnnnnnnnnnnnnnnnnnnnnnnnnnnnnnnnnnnnnnnnnnnnnnnnnnnnnnnnnnnnnnnnnnnnnnnnnnnnnnnnnnnnnnnnnnnnnnnnnnnnnnnnnnnnnnnnnnnnnnnnnnnnnnnnnnnnnnnnnnnnnnnnnnnnnnnnnnnnnnnnnnnnnnnnnnnnnnnnnnnnnnnnnnnnnnnnnnnnnnnnnnnnnnnnnnnnnnnnnnnnnnnnnnnnnnnnnnnnnnnnnnnnnnnnnnnnnnnnnnnnnnnnnnnnnnnnnnnnnnnnnnnnnnnnnnnnnnnnnnnnnnnnnnnnnnnnnnnnnnnnnnnnnnnnnnnnnnnnnnnnnnnnnnnnnnnnnnnnnnnnnnnnnnnnnnnnnnnnnnnnnnnnnnnnnnnnnnnnnnnnnnnnnnnnnnnnnnnnnnnnnnnnnnnnnnnnnnnnnnnnnnnnnnnnnnnnnnnnnnnnnnnnnnnnnnnnnnnnnnnnnnnnnnnnnnnnnnnnnnnnnnnnnnnnnnnnnnnnnnnnnnnnnnnnnnnnnnnnnnnnnnnnnnnnnnnnnnnnnnnnnnnnnnnnnnnnnnnnnnnnnnnnnnnnnnnnnnnnnnnnnnnnnnnnnnnnnnnnnnnnnnnnnnnnnnnnnnnnnnnnnnnnnnnnnnnnnnnnnnnnnnnnnnnnnnnnnnnnnnnnnnnnnnnnnnnnnnnnnnnnnnnnnnnnnnnnnnnnnnnnnnnnnnnnnnnnnnnnnnnnnnnnnnnnnnnnnnnnnnnnnnnnnnnnnnnnnnnnnnnnnnnnnnnnnnnnnnnnnnnnnnnnnnnnnnnnnnnnnnnnnnnnnnnnnnnnnnnnnnnnnnnnnnnnnnnnnnnnnnnnnnnnnnnnnnnnnnnnnnnnnnnnnnnnnnnnnnnnnnnnnnnnnnnnnnnnnnnnnnnnnnnnnnnnnnnnnnnnnnnnnnnnnnnnnnnnnnnnnnnnnnnnnnnnnnnnnnnnnnnnnnnnnnnnnnnnnnnnnnnnnnnnnnnnnnnnnnnnnnnnnnnnnnnnnnnnnnnnnnnnnnnnnnnnnnnnnnnnnnnnnnnnnnnnnnnnnnnnnnnnnnnnnnnnnnnnnnnnnnnnnnnnnnnnnnnnnnnnnnnnnnnnnnnnnnnnnnnnnnnnnnnnnnnnnnnnnnnnnnnnnnnnnnnnnnnnnnnnnnnnnnnnnnnnnnnnnnnnnnnnnnnnnnnnnnnnnnnnnnnnnnnnnnnnnnnnnnnnnnnnnnnnnnnnnnnnnnnnnnnnnnnnnnnnnnnnnnnnnnnnnnnnnnnnnnnnnnnnnnnnnnnnnnnnnnnnnnnnnnnnnnnnnnnnnnnnnnnnnnnnnnnnnnnnnnnnnnnnnnnnnnnnnnnnnnnnnnnnnnnnnnnnnnnnnnnnnnnnnnnnnnnnnnnnnnnnnnnnnnnnnnnnnnnnnnnnnnnnnnnnnnnnnnnnnnnnnnnnnnnnnnnnnnnnnnnnnnnnnnnnnnnnnnnnnnnnnnnnnnnnnnnnnnnnnnnnnnnnnnnnnnnnnnnnnnnnnnnnnnnnnnnnnnnnnnnnnnnnnnnnnnnnnnnnnnagacaaaaaacccttcaaaaaatcaatgaatccaggagctggttttttgaaaggatcaacaaaattgatagaccactagcaagactaataaaaaaagagagaagaatcaaatagacgcaataaaaaatgataaaggggatatcaccaccgatcccacagaaatacaaactaccatcagagaatactacaaacagctctatgcaaataaactagaaaatctaggagagatggatacattcctcgacacatacactctcccaagtactaaaccaggaagaagttgaatctctgaatagaccaataacaggatctgaaattgtggcaataatcaatagtttaccaaccaaaaagagtccaggaccagatggattcacagccgaattctaccagaggtacaaggaggaactggtaccattccttctgaaactattccaatcaatagaaaaagagggaatcctccctaactcattttatgaggccagcatcattctgataccaaagcctggcagagacacaaccaaaaaagagaattttagaccaatatccttgatgaacattgatgcaaaaatcctcaataaaatactggcaaaccgaatccagcagcacatcaaaaagcttatccaccatgatcaagtgggcttcatccctgggatgcaaggctggttcaatatacgcaaatcaataaatgtaatccagcatataaacagagccaaagacaaaaaccacatgattatctcaatagatgcagaaaaagcctttgacaaaattcaacaacacttcatgctaaaaactctcaataaattaggtattaatgggacgtacttcaaaataataagagctatctatgacagacccacagccaatatcatactgaatgggcaaaaactggaagcattccctttgaaaactggcacaagacagggatgccctctctcaccgctcctattcaacatagtgttggaagttctggccagggcaattaggcaggagaaggaaataaagggtattcaattaggaaaagaggaagtcaaattgtccctgtttgcagacaacatgattgtatatctagaaaaccccattgtctcagcccaaaatctccttaagctgataagcaacttcagcaaagtctcaggatacaaaatcaatgtacaaaaatcacaagcattcttatacaccaacaacagacaaacagaaagccaaatcatgagtgaactcccattcacaattgcttcaaagagaataaaatacctaggaatccaacttacaagggaygtgaaggacctcttcaaggagaactacaaaccactgstcaaggaaataaaagaggatacaaacaaatggaagaacattccatgctcatggataggaagaatcaatatcgcgaaaatggccatactgcccaaggtaatttacagattcaatgccatccccatcaagctaccaatgactttcttcacagaattggaaaaaaactactttaaagttcatatggaaccaaaaaagaacctgcatcgccaagtcaatcctaagccaaaagaacaaagctggaggcatcacactacctgacttcaaactatactacaaggctacagtaaccaaaacagcatggtactggtaccaaaacagagatatagatcaatggaacagaacagagccctcagaaataacgccgcatacctacgactatctgatctttgacaaacctgagaaaaacaagcaatggggaaaggattccctatttaacaaatggtgctgggaaaactggctagccatatgtagaaagctgaaactggatcccttccttacaccttatacaaaaatcaattcaagatggattaaagatttaaactttagacctaaaaccataaaaaccctagaagaaaacctaggcattaccattcaggacataggcatgggcaaggacttcatgtctaaaacaccaaaagcaatggcaacagaagacaaaattgacaaatgggatctcattaaactaaagagcttctgcacagcaaaagaaactaccatcagagtgaacaggcaacctacaaaatgggagaaaatttttgcaacctactcatctgacaaagggctaatatccagaatctacaatgaactcaaacaaatttacaagaaaaaaacaaacaaccccatcaaaaagtgggcgaaggacatgaacagacacttctcaaaagaagacatttatgcagccaaaaaacacatgaaaaaatgctcatcatcactagccatcagagaaatgcaaatcaaaaccactatgagataccatctcacaccagttagaatggcagtcattaaaaagtcaggaaacaacaggtgctggagaggatgtggagaaataggaacacttttacactgttggtgggactgtaaactagttcaaccattgtggaagacagtgtggcgattcctcagggatctagaactagaaataccatttgacccagccatcccattactgggtatatacccaaaggactataaatcatgctgctataaagacacatgcacacgtatgtttattgcggcactattcacgatagcaaagacttggagccaacccaaatgtccaacaatgatagactggattaagaaaaggtggcacatatacaccatggaatactatgcagcsataaaaaatgatgagttcatgtcctttgtaaggacatggatgaaattggaaatcatcattctcagtaaactatcgcaagaacaaaaaaccaaacaccgcatattctcactcataggtgggaattgaacaatgagagcacatggacacaggaaggggaatatcacactctggggactgttgtggggtggggggaggggggagggatagcattgggagatatacctaatgctagatgacgagttagtgggtgcagcgcaccagcatggcacatgtatacgtatgtaactaacctgcacaatgtgcacatgtaccctaaaacttaaagtataataaaaaaaaaaaagaagaaaatataggcaaatccttttacaaacctggaataagaaggccattataagcatgaaatgaaacccataactatacacagaaaaaaatcaagtcaaaagacaaacgacaaattgtgaaaaatatgtgcaacacatatgactaaaggctgacatctttattttacagagaattcttaaacactcataagatgaaccacccagtaagaatatgcacaagcaattcgcacacacaaaaatgaatgcccaataaacatgtaaaaagatgctcaacctcagtaacagaagaaatatccattttaatcttatatttttataatcacttctcacgtacactctcaactttcttgctctctctggcttcaaaatctctatgctggctaatctcttaccttgattaaactccagcactcctaattctatatctcagtccctctatacttcaaagctttttggaaaagttgcctacatgtgtctctaatttgtttcttcctattttatcttaaattactccaattacaacactccaccaacactgttcttgtcatgactgtgagcactgctaaatgcaatgacaattatcagtcctcatttgacttgatcttttagcagcatttgacataattcattactctctccttttcaaaacaatctcttctcttgactctatcagtttcctcttaactcaccaactgcttctttttcgtttctttcctccacttcctcaatctgtttcatggctctaaatgccatttgttgactcccagttttatatcccaggtgacttctcctatgaatcccaaattatctacttgatagctccacttggatttcttttttttttattattattattatacttttaagttctagggtacatgtgcacaacgtgcaactttgttacatatgtatacatgtgccatgttggtatgctgcacccattaacttgtcatttacattaggtgtatctcctaacgctatccctcccccctacccccatgccacgacagaccccggtgtgtgatgttccccaccctgtgtccaagtgttctcattgttcaattcccacctaagagtgagaacgtacagtgtttggttttttgtccttgcgatagtttgctgagaatgatggtttccagcttcatccatgtccctacaaaggacatgaactcatcatttcttatggctgcatagtattccatggtgtatatgtgccaccttttcttaaaccagtctatcactgatggacatttgggttggttccaagtctttgctatcgtgaatagtgccgcaatcaacatacatgtgcatgtgtctttatagcagcatgatttataatcctttgggtatatacccagtaatgggatggctgggtcaaatggtatttctagttctagatccttgaggaatcgccacactgtcttccacaatggttgaactagtttacagtcccaccaacagtgtaaaagtgttcctatttctccacatcctctccagtacctgttgtttcctgactttttaatgattgccattctaactggtgtgaaatggtatctcattgtggttttgatttgcatttctctgatggccagtgataatgagcattttttcatgtgtcttttggttgcataaataaatgtcttcttttgagaagtgtctgttcatatccttcacctactttttgatggggttgtttttttcttgtaaatttgtttgagttcattgtagattctggatattagccctttgtcaaatgtgtagattgcaaaaattttttcccattctgtaggttgcctgttcactctgatggtagtttcttttgctgtgcagaagctctttagtttaattagatcccatttgtcaattttggcttttgttgccattgcttttgctgttttagacatgaagtccttgcccgtgcctatgtcctgaatggtattgcctaggttttcttctagggtttttatggtttcaggtctaacatttcaatctttaatccatcttgaattaatttttgtatcaggtgtaaggaaaggatccagtttcagctttccacatatggctagtcagttttcccagcaccatttattaaacaggaaattctttccccatttcttctttttgtcaggtttgtcaaacatcagatggttgtagatgtgtggcattatttctgaggcctctgttctgttccattggtctatatctctgttttggtaccagtaccatgctgttttggttactgttgccttgtagtatagtttgaagtcaggtagtgtgatgcctccagctttgttcttttggcttaggattgtcttggcaatgtgggctcttttttggttccatatgaactttaaagtagttttttccaattctgtgaagaaagtcattggtagcttgatggggatggcattgaatctataaattaccttgggcagtatggccattttcacgatattgattcttcctatccatgagcatggaatgttcttccatttgtttgtatcctcttttatttccttgaccagtggtttgtagttctccttgaagaggtccttcacgtcccttgtaagttggatttctaggtattttattctctttgaagcaattgtgaatgggggttcactcatgatttggctttctgtttgtctgttattggtgtataagaatgcttgtgattttgcccatagattttgtatcctgagactttgctgaagttgcttatcagcttaaggagattttgggctgagacaatggggttttctaaatatacaatcatgtcatctgcaaacagggacaatttgactccctcttttcctaactgaatacactttatttccttctcctgcctgattgtcctggccagaatttccaacaatatgttgaataggagtggtgagaaagggcacccctgtcttgcgccagttttcaaagggaatgctcccaatttttgcccattcagtatgatattggttgtggatttgtcataaatagctcttattattttgagatacgtcccatcaatacctaatttattgagagtttttagcatgaagggctgttgaattttgtcaaaggccttttctgcatctattgagataatcatgtggcttttgtctttggtgatatcaccacttggatttctaatgggaaattttttaccatagccaaatacaattcctggtctctcagtcttctctatttcagtaaacggcaattccattcctccagttgttcaggccaaaagtctcagtgatagttttgactcctctttttctctcatatcccatgcatctactctggaaggaaatacctataaaaatatattcaagatctgaccacccactaccaattccctgccactaactacctgatggtaccatcatctctcacttcsagtactgtcactggttcctatctggtctccgtgctgccacctttgtcttcctgtagtcagttctcaacacagcagacaaaaccttctaaagcatcagtggaatcttgtcaaaccatctaatgacttcccatcctattcactgtaatccaaggccctccatgggctgactctcctcacctgtctctctcagactttgtcttctactttaccccggctcactgcattccaggtatactggcctcttgcttcatatcactctacctgtaatattctttatgaactgcccaattccacctcctcagggaggtctcctatgactgctctatttaaataccacccccacccccattgcactccctattctccctcaatttatttcttttaaaaatacttgtcactataatatcttattgattgattatctactacactacaatgcaagttccattcrgacaggaattttttctgtttcgatcaccactgttcccctcatctagaacactggctgtagatactaatccctagataaatgatgtttagtaaatcggcaaaaaagtcccagtaacgcctgacatatgcaaggtttaaataaaagagtacactcttatatgctgtgttactttggcaatatttatcaaaatttaaaatgccgacctgttgatctaacaatttcttggcaccgtgcaaattaacacatgtatgcaaatatrcatacatatgtttatctgaaaacttgtttttaattacaaaaaaaccttaatagtcatctaagatatattgtttggtactgatatagaaagtcttccaaaatagtttgattccatccttccagaaaatacagtagatgcagtatagtatccatactatacatgtgccttaacatcaattcatgatgtctaggacatacaaatgaggaaatcaggtaccaaaggagtgacttgtttttctggcttattcctttgatattattttaatgtttatattactttaaaaaaattttaaagatatattttaaatgtgcaaagaaaaagccaaataattttcagcataatgttgctagtggcaaactttagaaaactgaactgggattgggcaaaatatttgctggctctctatgtatgcatgtatgtacgtatgtatatgtgtatatttctatagatgtatgtatattttagacacgaggtctcactctgtcacccaggctggagcgcagtggcatgatcgtagctcactgcacctgtgtactgctaggctcaagcgatcctctgtgccttagtctgtcaagtagctgggactaaaggcctgtgccaccacacccaggtaatttaaagaaaattttttttttatagagacagggtctcactatgttgcctatggtggtcttgagcccctggcctcaagcaatcctccggcttggccttccaaagtgttaggattactggtatgtgccactgcacccagctctcttccttaacatttttatgttatttgaatttgttatcacggtgaataggaggtataattaaaaacactaatcaggatactgaaataaaatctaaagaataatgaaaggtaaaaaggacatttattagttgatgaatactatgttgtaaataaatatctgtggattttgaaataaaacaatttttattttatggttttatgagacaataataagatctattttcttatttttgaaagatagtagtctatttaaagtatgaaaaacatttacctttcctattcatggctacataacattatataaaatgaaaaggaaggtaatacttgctgaacaccagcacaagtgacttctccttccagctagtgctgagggaagctgctctcttactgcacagacgccaggagggaggcctcgtggagagcgcacgctttcacttgtcaagggcaatgagcatccccaaagtacaggttatagtatctcacatacacccaaacacacagtcaattatttaaatagtttcaaccacaggagttggcatgattttcagcttttctcatcttatgaaaaaattttaagaaatattttgacatttastaatcccagaaggtaattctcctttgattggctttgaggcttatcgattagtagcagaactggttgtgaaaaataagatgaaggaagaggacaagaattacattctaattcattttatttggttctccaagattccttcaaactagtaatgctgtatgtgtaatttaaaactcctgaccatgggaagagaaatcataggaaaagtgaaaagaaaaagatcatgaaccccaaggatgtagtttgaggacggatcctcccttacttccatgggaatgacaacatatagtaatctaagtaaggcttattggttgccaactaggagacttcctttctgggagctttcctgagagccaaatttcaacatgggacactaattccctgagcctagttttgtaaagaaagtctttctactccttcattggaaagacatgaaagaacaagggggataattaatgaaattttaattggaatttatttcctgatgaagtattaaaaacaaacaatttataggtaactagagtttagttttactgagcttttctaagcattataatatgttacaagcttgagttgtcaaattagaatgaataatttagttcctctgacttaagtgcttcagaagataggagaatgaagacatttaatatctagtctccacctctgagatatacgtaatctttgcaaatatgagtaatatacatgaagtattatatagagaaatgtcatagtacataattaaatgctaaattaaaagtgatgcagaaaataaatactataagaatccttacctaattatattaatctctcttttatgccttgctaatgtgcaacagaggtaaaattgagtattttgtttctttgttatttaaaatatattgttgggaagttaaataaatttgaactgtagtaccaaaaaatcctgatgttttgttttacctaagttmcctgagtagcagtgtgaattaaaatcatctgtggacataacttattccagaaaataaataatatccaataaagcagamgatcatgcaaactaactacccattttcttatataaactttttggagaataagtgggctttgtgatgaaagaagtggacattcttggaaaacacaaacaaatagaaaatttaataccatatataaaaatgaagtgggaaataggtattttaaacgtactttaaagaaattatgacctgtcacatttctactactgatatatagaaaagcttacaaccaatgctcctcgtatacttctgcaccctgcttcaaccctgatccacaaagtgcttattacatattcagtgctttatatgcactgaatccattaatmcttacagaagccacttgaagaatttttattatccttattttatagacaatgaaactaagacttagattacataacttgccaaaggttgaccagttagtactggtaaccaggactgtaccctaggccatgtggctccggacatgctctgaacaggttactgtgctgtctctccaaagacagcagaagagtagagcccataaatgaaaaaaaagtccttacaaaaaaacaaaacagaataaaagtgtggttcccaatgaattattaaagacttcattgacaagtacttaatcaaatctttctgaacttctcagaatctaagatgataaaacttaaagcacccttattattctcctttacttcagaatgaaaatgaaggacatacataataatcacaaaacttcaggtcaagagattgttttgttctcttgattcgaaatttcagatggctctccattgcatatgccataaattccaaactcccatacatggcgaataagggtctcccgactgcatacattatcgcttaaacaatctcttcatcttcacttgctactgttctgcaaagtatattcaatttcccagacatcctgaactttcatgcttctgctatgtattcttcctcttctctaggggcaaattcctactcatcttttggaactcatatcccgtctatcatcaacaatcctctccaggcaccaatgccactagtttgcttccgcctgtaaacttcctcctcaggactacaataccatgtcattggtcccttgtttccatttaccacacagcagccggggtgatctttcaaaaatgtaaagcaaaatgtatcactctccttcttaaaacctttcaatggctttccattgttccatcattcctgcaaggctccacatttttgggcctgcaccttttccactattctattcattctcgctaaatgacctgtttttgttcttgtaaatggcaagccttctctactccatgcccctacacttgcctttcccttggcctgagattctgtttccaactccacacagctgggtctttcttttccactccagtgtcatagttccaaagaagacttccatgatcacctaaaccaacatgctttatcctttactctttcacatcatcctatttccttcaaagcatccatcgtagtttgtaattatcttgtttagttacttgtttactttcttttactctgtattagttttctattgttgatgtaacaaactgacatatccctaagaggcttaaaatagcatacatttattatttcacaattagatgcccaatatgggtctcactggactaaaatcaagatgttggcagaactgtgttctttctggagactctaggggagaatccactttcctgccttttccagcttgtagaggctgctgcattccttggcacatggccccttccatcttcaaagccagaaatggccagttgaaactttctcatgtcgcatcattctgccactgacccttcttcaaactccagcttccacttttaacattgcattttgcctagccacataacccgaagtaatctccctattcctttgctacttaataatctttttttaagtaatgtaacatattcacaggttttagggattaggacatggacatatttgggaggccactatcctacctaccacactcccccactaaaatgtaagctccatgagggcaaggacatcattttgttccctccagtagtctaaattccaagctttacagggcataacaaaggcatataagacatctgttgaactaatgaacaaactaaaacactgctgctttattgatgctcttcttgacctttcctgactcttgttctttgcgcttttgtattattttttattccgctacaatagtgactatatcccttcatgtttacattatgttcacatctatcattaggtctttggtcaagtgttcagtgttctgatcatgtgtcagtaaaggattaagtgttatgaaaaatgtattgactcaacgaattttaaaatgaaagggacataaagtttcaaaaagtttatgttaatgatttggtaattgtttttatggcttcctaataaaattcagagtattctgataatgtgtcaataaagggttatcctgctgtgaaatatatgtttatttaatgaattttaagcctggttaagcatctgaagatatgtctcagcttcgtattttatacttgagaaaactgaaatccaaataagttaagtaatttatctagttatataaaaattgtgagctggcactaattccagttaactttctataaaacctacctcctaaggttaccatgaagattccgtgaatgcatttaaaagcacataaacacagtgcccagcacatagcagtgctttatagtgggggcacagatgctttattggcatgatcattattctaaacattacatattgcccacttatcaacaacaaaaataacttatgcaaaatagttaataaataattgctgaatcaaagaatgattttaaaagtaacatggttaaataatttttaacatgctaattgctttcctacttttatttttatagaaaaaagcaggtaaagaaaaataaagtagggcatgcatattacattgatctttatcatggagtcttctttaacttatttgaactaaaagcaatttctttcctccattattgtcttttcagcaaggtcaaaaccatttttataataatactaaggcagtacttgcccttttcacttctttggcatttgcactgatgatacaaagacaatggtaggtcaaactgttggcatcttagcacttaccaaggcagcagcagcaaactatatccttgyagccctcactgccactcatttccagttaaaaaatttgccagtttcacttaagtacatccttgatgaagtagtaaaaattactttaataagttttgaccctgtagtgtatgtctttttagtgttctgtacaacaaaatgggatgtatacacaaaacacttctgctggacatcaaagtataacagatgtcttatggaaaatcactcctggaattaagttgctaccgaagtagctgcttttttcatggtacatctatttaacttgaaagaataaccaactgacaaacaatggttattcaggtttgagtatttggcagatattttctcaaaaataagccaaataagcctgtcatttaaaggaagacaaattggccaaatttgttgccaataamatttgagctttcagatgtaaatgagaattttggaaaacatgttaactgcagctgagttgaattttgcaatttcctaattttgaagacccttctgaagagattggtgctgctattagtgattttttgattgggtaaaatggaatgtgtcaacatttggaagatctggacaattcagtgaaccaatatcttccaaataactaatgcatgatgttgcaaattagtaagtgggtaaaaggcccactcaaagttcaagagagcagtgattttttaatgtaactataaaattcattgatatggttttatattttacatcacaactaaactttaagaaactgctacttggtgagttttggtaatcaaagaatatccacaattatctaaaaaggctaattccaactaactatctatgtgaggttaggttttaatacagttcaacacattgcaacagctagaatatagaagcagatatgagaattcaactgccttctattaacccacacattaaagagatttgtaaacatgtaaaacaatgccactcttttttaaaaatagcttttcctcaaagatattttatgttaacatgtagtaactttaagaatgaataaatatttaaaatttttctatttttaatgctgtaaatatcagtaaatataacccacatagtcaaaagcactctggggccgtaaatcacttttaaatgaagggttcctgagacaagcatcttttgagaattgtagaatttaataaggttagccactaatcaaatgtatctattcacactgaattaaaaaaaaattgagacagggtattgcgctctgttgctcacgctggagtgcagtggcatgatcacagctcattgcagcctcaaccttccaggctcaagacatcctccttcctcagcctcctgagtagctgggaccacaggcacacagtaccacacctggctaatttttaaattttctgtagagacagggttttgccatattgccaaggctagtctcaaactcctgggcttaagcaatccacctgccttggcctcccaaactgctaggattacaggtgtgagccaccatgtctatccttaaattagttaattaaatttctaaataaaatataaaattaaattcctcattcatacagcatacatttcaagtgctcaaataaccacaggtagccagtggctattagataaaatagagaacatttctttcatccaagaaagttctaccggacagtgttggtctatactatattctgaaggtagttattagcacttactaagtatcactggtattattctttcagtattttatcatatctttgttaactccttaaaaagaacatatgctttttgagggcagtaaccagaatactgatatctgtatccacatacacatgatatttcaatatattcctgtccaaatttacaaccaccaagtctccaccttttctgttcttacgtgtttaaaataaactgttttgtcaatgaattaatgtttatgttgcttcatttcacgttttcataaagatttaaagacaatccttttatctgttagttatactacgtaggtcttacagttataattaagaattttcaagttttcctgtgagttctgtacatctgattgaaagtaatgttttcattaaagtattaaaattattccattagattatatccataaataataaaatgattaaatttatcttgagtgaattagtagcacctaggttcagaggattttattttctgtatggcctttgtagggtttctaactttttgaagtgtgatttaataacccttataycccactaaaagtaggatgcggagtttaaaaaagcttattaaaactaaaatttaaaataaattttgtttatgcttctgagatttttacatactaggatccctgcaacatactctgggatgtaaaaatactaggcatgtcctgtagtgatatatctgccctctattactcctcatacaatagagatttatagtataatgaatgattgcttcttggccttttggctaagatcaagtgyatagtataatgaatgctgcttcttatttccagtttagtttaaggcaatgctccctggcaggcaaggccacatttataggaaggaaaataacaggagaggtatgtggacttctggtcaggcacttttctggtcaacaacaaagatatgtacctggaactaggtgagagattagctgcttatatatacacccaagctctctgccagtttagggttgtggatcaacccctccacataccccaatagttccttttggaaacagaagaaaatttttccttttaaagttttattctgggtgaaaaaaccagaaacatgatccataaaacaaatacactctttgtactgatttaagcagtactgatttgggccttacaaaatcatccctccatgcaaaaagactgtatactgtaagttgaatcataggattttatttcttcaatgaaagtaagtaaaaataactgytatttaaatgaagtaatttttgtaaattgtaaactttatattacactagcttctaaagcctctgttttcaattttgtcttgctatgtaagttcattctaaacaattttgtttctgtagctaaaaaggcttataatctaaatatatttccatagactgatttatttcctatataaattatgtgtgtaaatgtgtagcaatttatttccaaagtaacattaatcttaagctaagcttaaaaattttacattgtattagcagtggtagaaattatttttattaaagtaaattcaaagttcatagttcaaataggwttacattttaacatggcaaaattaggaaatttagataaaggccatattactaagtaactattaaactgaaaaaagacaatatttaataagttctagtcatgtctgcaggtagtggcagtctaagatgctaagtttaaaggcagtgtttggtttgcaaaaggaagcagtttcttgtattttcctcacatataatgggagaataataactacttataagattttttaaggactgaatgagcaatttatataaactgcctatctcagtaactaattaacagatgaccctataagctaccactacacagtttccccagtacacaaacacacacagtttaccctgaattcattctaacagtctataccttaactagtacgaaatcttaaattgcctacgattacaaacatcatttacaagtttaataagaaattcaaaagatttatatttcaaaatcatatgcaattatatacaaagaacataaaaaacagaatgtcagaatcttatatcaatccttccctcaagtaaaagttctgcctatggctgggcgtggtggctcaygcctgtaatctcagcactttgggaggccaaggcgggtggatcacctgacgtcaggagttcgagaccagcctgtccaacatggtgaaaccctgtctctgctagaaatacaaaaattagccaggcatggtggcaggctgtaatcccagctactcaggaggctgaggcaggagaatcgcttgaacccaggaggtggaggttacagtgagccgagattatgccattgcactccagcctgggggacaagagtgagacttcgtctcaaaaaaaaaaaaaaaaaaaaaaaaaargttctgcctgtaagtattcacaacagattcactggcttttttttttttttaacttttaaattcaggggtacaagtgcaggtttgttacatagttaaacttgtgtcatgagggtttgttgtgcagattatttcatcacacaggtattaggcccagtacccattagttatttcttctgatcctctccttccaccctccaccactggtaagccccagygtctgttgttcccctctgtgtgcccatgtgttctcatcatttagttcctacttaacatgtgagaacatgcagtatgcctgtgttagtttgctaaggataatggcctccgaaaccctacaagccagaagagattgggagtcaatattcaacattcttaaataaattctaacccagaatttcatagttagccaaactaagcttcataagtgaaggaaaaacaagatccttttcagacaagcaaatgctgaatttgttaccaccacatctgccttacaagagctcctaaaggaaacattaaatagggaaaggaaagaccgttaccagatcctacaaaaccatactgaagtacacagaccagtggcactataaagtcaaccacataaacaagtctgcaaagtaactagctaacatcattatgacagcatcaaatccacacatatcactattaaccttaaatgtaaatgggctcaatgccccaattaaaagacacaggatggcaaactggataaaaaaccaagatccaatggtatgctgtattcaagagatccatctcacatgcagtgacacacataggctcaaaataaagggaatgaggaaaatctaccaagctaacggaaaacaaaacaaaacaaaaagcaggggttgcaattctagtttctgacaaaacagactttaaaccaaacaaagattttaaaaaaggcaaagaagggcattatacaatggtaaaggtttacattcaacaagatcaaactatcctaaatatgtatgtgcccaacacaggagcacccagattcataaagtaacttcttaagagaccttcaaagagactgagactctcatacagtaatagtgggaaacttaacactctactcacaatatgagatcactgagacagaaaattaacaaagatattcaggacctgaactcagcactggatcaaatggacctgatagatatttacagaactctccacccaaaaacaacagaatgtacattcttttcattgccacatggcactttctctctaaaactgctcacataattggaagtaaaaccctcctcagcaactgtaaaagaactgaaatcttaacagtctcttggamcacagtgcaatcaaattcaaaatcaagactaagaaattcactcactcatacaattacatggaaactgaataacctactcctgaatgacttttgggtaaataatgaaattaaggacataataaaaaagttctttaaaactaatgggaacaaagagacaatgtaccagaatctctgggacacagctaaggcagtgttaagagggagatttatagcaccaaatgcccacatcgaaaagatagatctcgagttaacaacctgacatcacaactaaaataactagataatcaagarcacacaaatcccaaagctagcaaaagacaagaaataaccaaaatcagagctgaactgaaggagacagagacaagaaaaaacattcaaaagatcaacgaatccaggagctagtttttttgaaaaaaattaatgaaacagactgctagctagacaaagaccaaaaattcaaataaacacaatcagaaacaacaacaagggggatattaccactgaccccacagaaatacaatcaaccattagagattcattgccttttttttttttttgagatggagtcttgctcagttgcccaggctggagtgcagtggcgcaatctcggctcactgcaagctccacctcctgggttcatgccattctcctgcctcagcctctcgagtagctgggactacaggcgccygccaccacgcccggctaattttttttgtttgtatttttagtagagatggggtttcaccatgttagccaggatggtctggatctcctgacctcgtgatccacccgccttggcctcccaaagtgctgggattacaggcgttgagccaccgcgcctggccaagattcattgccttttaaagcaatcagttcaagccctatgtctcagacagaggaaagggaggaagaaatacaagggaggtggggggagagaaagagagtgagtcataatataatttgagccctggtatcaaccagggctcactgaagctatcacttttcatacttttcagtccttccctttttcggcttatacctactgagttggggttccaaaacaaattattaattttgaataattcacaaattatggctaagaatatggcaattagaagaaaggttttatttttgccatgcctggtagaattcttcagtaagtggtggatttagcatttatatccaggatactgactctagagcttgtgccctttatcacaatgctgtagtaaatgctagcactattacacgtctttgaaatttaacaatggattttttttttgaattacgacaagcttgcacacacctatatgcatccgggttttttttttaaacatattttgatatcttgtaaagagaacccaagaagtaagagagactacaatgatgcaaatggtattttcctattcttaataatttagataaaaaagatgatttaagaagaaattttttcctacaaagctgtcttctatattcatgggaagaggtatacaattcaaaatctactgcttcagttatacagaaaaacaacaccctgaaattgtattttacatatgtctctgatccagatcaatgggagtaccatccaaagcatgactatggaaacaagaactagggatctatgttatataatcttgcctttttagagtagaggctcacctatgagaggtgtttgtttaggtagagggtaaatcaattcaaactagagatttctgttgtaaaggcactatacaatctggcactagattttccaggcatccatccaattactcacaaacaggatatgggtgggattagcttgtgcactaggaacagtcagatcacaggatgtccccagttggaaaacctaaacaacatgagagttctctgtactactctagcgttataaagttagactgactctataatcagaatgtgctattattctacagactttagagtgaggttaccgatataaaactgtcttttaagaaaagtgtctgagaaggccaaaaggaactacgagtcaatgaatacctacaggaagttctctaaactgtcctcttttccccaagtatctcttaactaagaatagctgtcaacctgagtcatgggggtgggatgagggtagggggcagagtaatgttttctctaggtcacatactttgtattcaacttatagcttgaatcttcagattggcaacaagtgcaacattggcaaatcttacaattcccttgcaattcacaagttacaaagcactttaaccagaacatcctcagaacaacatactgtaacattggtagagttggtattatcatcactttttaaggaaaagatataggaagcttagtaaagctaagcaaactattcaaattcacacagagagtaattagaagaaaaggattaaaaacaggtctctagagttctctccaaagtaccatggtactccaaaaataaattattgcagcgttctttgaatatatcatcacacttcatttttataaaacatttgggctatttatatgtatgcatatacaactgatactttcaaacaattataccatcctttcataaacacttgtactccaactttttaataaatgaagtcaggtctagaaaaatatacccttaagttccaccaaaatatagactgctgcacaataatttctcagacttgaaaaataagacaagaggaaatcaagagaaaaattaggtttcaagccagatagttcaaaaactttaaaatgggtgtaatttacataattcaaaatttgtgggtgactaatgctaaaatcacaactgagtaaatgggtccagtgatgaattagtctaggaagtttttcatgttgagaaatgtggttaattttggatttttttataaagaatttctcaggtttattgtagaatatatacacagtaatttttacttttatttctctaacctttgttgtctatgaggcctgattttctctgccacagttttcccaaccacgttctttttagaaacattacctcctggctggttagggaaaactgaattgcgattattaaaatgcattttagtaaatcttgagaatacttgagagtactaccaaatgacaatgctctgaatccatgagaacagtggaaactcattaagtaatggtttcaaaattttaaaaatgctttcctagatttctttttattctcaaataaaaaggctgtctaactcaaattcaattgattcaaattcgtggttttctggtctttgtatttaaaattagtaaagatttaatgaaataccaaatacacacctcttctttttatggatatattggctatcccaaatttcttcaggagttctaacattcctcccagagtaacaactgctgaatgttaacctaccaaatgttttcaaattttctgtaagaaaagagtttttttcccatttaaaaaaaatttgattgtatttattttataggatagcttgaaatggaaggctgatgctccacttaaggaccgtactctgtctatactgactgttttgtttatagcctgtaccaaggttattcttattaagcataaaatgttgattaagctgaaaatgtaaaataaggcaataaaatatcaagatttggtaaaccacttaaaagagaaaaacctatgcaatatattatatcaacaaaccacatgtcaaaacagaaattctcacttaaggaaaataaggtacatctgagcagcataaatgttctaacactagtttagcaaactatgagctgtcaagttccaataacctattattcacacctctttaatcacttccacagagttgattataaatagcctcatacacttttaaataaggtcattctgaaatgaaacaaagaaggtagtaaatatttttgtacataagggactcaaatcctaacgtacaacagaactgtgtattactcaaatattcaatataagaaaagtaacaaaaccttttcttaactatgtcaagtatgcactatatgtagattcaatggaatacctaaattgcagcaccatttaaatatagcagcttaaataaaatatcatccccagtaagtttcactcatattactaagcctctgggcattattcatgatatagtaaaatataataatcaatttgttgatctagctggaacaatgttatgcaaagtcatgatgaaaagactagtctgcaaaaaaaaatttatagtctcactgatgatggcattggtttgcaataactccataaagctgatggtataaatgcatttcttcaaagtgaatttacgtaaacacatattagagaaaacgtaaaatgttgtaatgaaatggaagaacattttccaaaacaattaaattaaaattgagtataatggggtaaatggggttggctgaaatcaaccaaacaaaagaaaaacaacaacaacaaaaaaacaaaagcaaatatttggctttgtatgaagtatactttctaaaaattgatcattacagaatctctaagaaacatataaactatccttattattctggagtcgttttctatcatgacagcatcttaaatgattatctgctgaaattagagtagcatactcctaaaatttctcttttaagaactaggcctgaagaacaactgataacaagtagctacaattacagttgcttttaactatttaaaaatttctcatgaaggtttcaaactaaaaaccctgaagttttctggatgaacaaacttgctatatagccagcttttctcattttttcctacaactagccgcttatagataactcaagagataatacattaygtttgggaagaggtaaattagaggttttgactaattgcttaaacactgatcctcatgcatttgcattatatagtaacacaaccttttgggagtatacctattgcataaacctttgttactggaataatttgaaaatagaaaagaagttggatacatgcataatattaacaagtttcacaatcttttaaaaaattacatgcaagtcccaatttctacttaatcatttccttcacctggttgtagaaatgcttacttaaaaacatttactgcacacaaaaaattagtcacctctgttctgttttccataagacatactttttaaacaaaagcttttagttaattgtggtaaattaaatatcttctgacaaggtgagtataatakaaaatggttgaccatagagaaaaccgkgagactaatttgcccacattccagaagagctgcatgaagatttctgaaatgtaggcattgtatccatatgaagcacttctaattttacactcctatgccacagtcatcaatattttattggaagaattctcacatgaaaaagtacatttatatatacatttatatatatacatgtatatatatatacacacacaccatgaaatgctacgcagccattaaaaagaatgaaatcatgtcctttgcggcagcatggatgcagctggagtctgtcatcctaagcaaattaacactggcacagaaaaccaaatactacatgtttttacttctaagtgggagctaagcattgggcacacatagacataaagattggaacagacactggggacaaccaaaggggggaacaaaagaaaaggagtaagggctggaaaggtacctattgggcactatgctcagtatttgagtgacaggatcatttgcacccaaaaccttagcatcacacaatatatccacatagcaaacctacacatgtacccccaactctaaaatgaaagctgagattataaaattatttaaaaggaaatatagattttttgaaaagtacatttctgatatgaaagctatgttcttccaaggccatgcatctaatgatgctactgcaccatctttaatgctgtttaactcaacagtttaattttactgtttaattcaacagtaaaaccaggtaagggtctttggggaaacaataatctgaagatactgtctctaacttagttctcttttaagaatgaatataaaattctccttagagccaatattctacaaccttaaacatgtactgcacatttcacaatatgaagattcctgaacattttctttggtccacacatcaaaactaaggtaactgagatgataattcctactttctacttcatagcttcagaacttcactcaaatgtgaagaactataattaagatcctctgctactaccgtaccctatgccaagcactttgcttttcccacactctctggagtgacttacagggcttcaagatgaaaaggctttgccccattcaaaacatctatttgaaagactggtcttgtgactttaatacatgctggtcagtggggagaaaaagaataaagaactgtaggccagagtaacaaaaccccgtccagaaaggatggcctgtagttcaaatgtgtatctatggatcaaagcaaacacaggtttaatcagggtcaatgtttgtgtctaaggggatcagaggtggtcacttgaaatcagcggggagggggggaatactgtgatttgagttggtgcagtgattgatttactcaaaacatgtattgagcttttgtcacaggtcaggcactttatagttaagaaaattaataaatcagtttctatccccaaggatctcactagtagaggagacaggcatgtaaataaattataataaaatatggtagttttaattgacagaaacaacttcaatccaggtagagaacaaagagaaaagaaggaytgactttctcaaggatggacactggagataggtttctagaaatggaaaggctttagcagggaggcaatgtctaagctttttttttcctaagctgggttttaacagataaaccaatcagataaaaagagagatgaaggtcatttcagaaagagaaaagagaactgctccctccatgcaaattccaccaagctatccttaaattagcagcagacgcctgacagccttaagtttgcaagayactgaattttgctagatagcagatggttgaattcaggtgtaaaggctacacttaaattgtaagaatgtatttgttttatcaatataacttgaaaccactggtagattaataccacatggttgtcccaacccatgcatgtgtagcccctctcataagtcacaacccacaccgatactcttctaaggtaccctggcataaaaggacaatactcctccatgccatggagggtgcatctgctagaactcactaacacaactgcctgtcccccatctaagtaaggttctcccaatcatccatgcacagttttccctacctggagtggctggagctaaaatcagtcactctcccctaggcttctccctaaattggtacaaggcaggcaagaaacagcatttgttttattatctgatgagtttatgtttttcagcaaatgactggagaaaaaagtgcctgctcttagctttatttttagaacaagaaaattggtcctcagccaatgaaaaataagaggtacagggtcaagaaacaggctggactgttgatgagatgttttgagaaatctcgatatctacggaatgaaggaagagaaagaatggtgaagaagtcatcaaagatataatgagactgagacaagcatcacttgttggaaactaaaagatgtgagagtttttactaaaaagcaagtgaggtggccacaattctaagatgactgacctccaatgatccatggtcttctatcatccccttcccttgagtataagtaggacctgagaatatgatggaatattactgttgtgattatgttatctggcaaatgtgaagtgattctgcatatgtaattaaggtacccaaacagctatttgtgtttatcaaaggagattatcctgggagagcctgatgtaatcaggtgaacccttaaaagaggagttaggccttccctgaattcagagaggcaaagcagtaaactctctctattctgccacttgtgaaaaggtgaagagccatattgtgaactgcctgtggasagaagcaaccttcctacaagcacaagggaacaaattctgtcaagaacctgaatgatcttggaagaggaccctgagctagatatgagaatgtagcctggctggtaccttgattgctgccttaagcagaggagccagctaagcagtgcctggactcctgacccatggaagcacgagacaataaatacgtgttgtttaaatcactaaatttcttgtcatttgttacgcagcaatagaaggttaatccattaaggaaggtcccagcttttctaagagtaaagaagaatcaggatttaatttttaggttgtccggtcctgggcacatgtgttataggacttaagagtggctgtattttcagcaaaggtcatcgaagtagaaatttagtagtatacattagaacaaagaggaggtaggagaaaatgtaattaaattgttaagagatctcatcttcacctaggatattccagatactgaggctgggactacagacaggctaattccagacatactacttcggaggtatgaggccaacataccgcctgctctactcagctctggttacccagactacaagccacttgatggcagatatcatgcctaacttattcattcagtctgtatcctcagctctcagccagtacctggcacagcttaagcacttctcgaatgaatgaataaatgctttgttttcacccttggcaagatgaagcagcagttcaaaatatctaaagttttatgaggaaaaattagtacaaatcagcaacacttcatgattcctcaaaaatatccaacttaactcatggttaaagtgcaaataatttgagatgttacaacagaggcagtgatctagtcatcattcagctaaccacaaaatggtgaatgagtgcccactatgtggcggatatgagaatatgactcctgtaactgatgtccccatactcactcattctacctgttctcttagcmaatctccacacattagccatagtataattaatattttaataaaacaagtcatcttatattattccactattcaaaaccttttgatgattttttcattacactgaggataaaatcgaaatccctaacttggctgtccataatctgggttctacctccctctccggctttactgctgccacaaaccttatccccccagggcattcatgcatgttacagcctctgcctacaccactgtctaccaccagctcattgttcagatctccacttaagtttctatctaaatgtcatttctttacagatctctcaatgtaagtgacctcttctgtacagcatttatctcacagcttatagttacaggattactttctaatatccatctctggcattatactggaaactccatgaggtcagggattgtgtctattttgctcagagaaacattactagtactaagaatacaggatgagcataccttatccaaaatccttgagaaaagaagtgtttggatatcagatttttttttgaatatgtacattatacttactggttcagcatccctagtctgaaaatctgaaatctaaaaatgttccactgagcatttcctttgagcatcatattggcactcaacaagtttcagattttggagcatttcagatttgggacgctcaacctgtatacacatttttgttgaatagatgaaagtaaattcctaggagcctactcaatcacaaagggtgaaacctattgctactaccagtcagaacacaaagccccagttagtaacatgatgtgactctagaacacaattcctaacctcagtagagtacagagagaagcaagcaaccaaggaaactaacacttctaccaccccaccaaaacgcacagcaaaataaaccttaaacaacatcaaaaccaaactagttctgtttttattttttaaatattgagctaaagttaaaattttaaaattcttaagaattctactgttaagaaaataaaggttttaaaaaatcactgatttaaaatcctttaagacctggctcctggcattcttctgcagctcaaagactgtgcctatatccccccatccactccgtccaaacaaatctacattctggccttggaaaatgacttcttccaactccccttggtgttttgttttgtttttgccactgggtatttgttcatattccccttgcaggaatcctcctgctcttgtctgctgcttgcctctgtttagccatcccttcctctcagaggtggcgctggcattcctacatgggaaggtttagggtggcactctttagggagtgcatgctggatatttgacttccaggtgtattcccatagcaaacacacactgttactttgtttcatttggtataatttaggagactgaaggagattatcaggcactaaaatttcctaattccctccttggtgcagaggctgcttctactaaaaaagtttgcttgacactcctagaagagactaggtactctatactcttgtatttacctgtattcaagaacttatactatattagggatgtctgtcaacctatctttcccactagactataagcaggctgagagaatagactgtcttttcatgattgtagtccagaaatccagcaaaatgcctggaacatagtagatgttcaatttttttttttactgaatcaagcactttatgaaaccctattatgttcaaagtaccatattrggtgttcagaatgaggaacagagatactgcctggttaaaaatatgaaatgcaaaatatttaaaatagcttaaaataaacaaaacatcaggaaatatggaagacagtaaatattagaaacttctattaaccagcattcctacaaatctaaatttctaagtagaacaccttatatatcaccgaagaagcactaaatacattacaatatattttcttatggtgtgaacttttactgaataaagagtgcttagtgttgttaagacagtatgtgataagccactcattaaccagaatacgcaatttcctctagatactctcaggatccagaataaaaagaatgatccaagtcagatgactacaccaacctaaacctcacacctcacagggtagttttagctatgatttttaaaattttaaggaggagaaggagtacatccttgaagaggaaagatgatgcactaggacaagaagtgggaacagacacacattgtgctaagaatgaatgttaccataaggagactggcatgaaagaacaagaataagtgagatttggagaactctaaatttttaggctgagtttagtttagatttgataaccaactggggactataagtcctagcctggggatggaaaatatacaaatattgtttaaataaattgttggcacattgtaggtcctcaaaggtctgctgaataaataagttcatgactaaatgtatttgagcagtgcaagactgaggcatggttctcagcatggatgctgatgtggtaaaccaggtataaaaagatgagagccagggactagggtagcagctatagaactggacaataatggttttgtaagtattctaacagcccaagtttttgcactgaagctcatttcattaatcagagcaatgctaccaataaaaactttgggggcttttatggtatgatcaagaagatgtttgatgaaagcgtttaatttggtaaatatgtgcccatgtttttgagtcattggattaaatacaaaatgtgcaactgaatttattccttctatgcgcttctatttttctctctggtgctctaaaacaggacttaggtacattgtaatatctttataaagcactttgatatctttagtcaaatggcatattttaaattttgcttcaatatctaataggaagaatgactaaagagttgaggattcacattccacattttacacaaaaacctacataatagtcttgcaccacactaattaaaatggaagaccagaaatgttgtcttccatttaatcgtttggttcaagaccattatgtaggtaattgtgagcttatgacaagactggaaaatatacatcagcacaacatcatctgagggtaagaaataaattagtattttattctgctttgcattaaagtagtaagccataaaaaatgaaaatgcttaacattcaattatatcaatagcttagaagtctacagcacacaaaaaattaggaactcacttataaatatatttagaactaaatcgtctttcctaaagtatgaagtattaaatcataatcaagaacaccaaaaatagtcacgatagtctttgtaactatatgttagtattaaacaacacttcatatttgaaatctgaaaaaaaatcacttcttagataatcacacttctacacagggcaaaactgtaactgagaaaataatttcaaatgtttcaaccatttttataccagcaaagataagaagactaataagatattagtatttacawctaagattattagaaataattccagtctcaattaacaattagatatcccatgttctaacgctctcttaaatttttggatgtcaacctggacagctcttaaaacactggagaaattctgagtaacttttttattattgtattacaatgaaagagaaatcaaccatttttgccaagaatcagctataaagtattatgaaacaaaataaccaatcaatattagtgtttctagattgccctttagaaggcaaaaaagacaacaaatatcccaaatacagattttgctttcaaatgaagttttccctttatatatatttagaacaatcctttcgaactgtatttataaaactgatraaggtatgttaaagcagagcaaatgataaaagtctatgtatgccagaaaccaattacataactgaaaaatatctgataatttaaacaagtccaataagatttttttttaaattataatttttttaaaagtatagaagaatcttttacttgagaaaaattagaaaacgaacatggtcraaaagactttaaaatatatgtgattccaccacccatagataatggcttctcccaaaaccttaccaccacacacacaggatcaaagagatatttttctatactcgtgattagtagaagtagtagtagtaatagttgcagcagcatcaacagcagcagctagaattcttagggtatcatccttgcttaatgtagacagtaaaggggctatatattttactagcactgtaccatctttgcacagaaatcctgttctctctctgtcgaacagttaattctattgaaaacatagactttatattccaaagggaaaccttaaaggcatggcattctaccatcagcagtgcctagcagatgaaagttctttgtaacgtaagaagatggaggtgggcaaagtggattgtaaaatgattttgaacaagcaacaatgtacaactgataatttgaattgaatgaaatctatgattcctggttctcaataaccttctgtgagtgagtctgatcccttcatgttgtttcagttttaatctataatcaatgattaagttttacaaagtatgaacaatgcttttatcattctttgagatttgtgtgctttatttaaatcaaaaatatggtttataatgctatttataaccaagtgaggactgaatttgactttgctgagggaatttgcaaaacagaaaggagacagttatgacaggtaaagggtttagcagaaatatcatgaagtgtccactatgatgctacacagaacaggatatcatgatcagacattctgtaatgagttaccataggtagaaatgtgaaaatatcaactcacaacctctaaaatcactgagtcatcaatgcagatacagaattagagattgtgccttagttgagaagtaaatttcataactaaaattagaactataatcagttgcatgtagtagcccctctaattttcaaatttattttaaagtatttatgtttttataggagctacataagatagtgatgcatttgttatgctccaattaaccttttaacaaaacaactaaagagaaaacacctgacaatcaatttcatgaggacaaatttataaaactgtaatccagtgtatacatacaaaccaaaaattttggcaaacaccacaatgcatttaatktttttcattaaattactacctattcagtagagttattattaccagttgagaagatagaaaaaacaagtaacatgtacaattaaagctcaactattatgtgccatgcactatgttgtgtgcttttacacattaacttattgaattctgaaaatggcaatattgttttattaactccatgttatatatgaaaaaactaaggtcagagagataaagcaacttgcaaaagattgtacctatgattaaaaagggtaaaaggaaacgataagtcaaaaatgattccgaatttgctagtgcttggatgtgccatcaagaggagaaggcaatttggaaggggcggtctttgcagggctgacaggaaaagaggggcttgtggctatggacaagctctaatgcatgagcaggaaaccaacagagctgtttagggtcagttagaaacacagattggcagaaagaccaagaaattttcccttttttatcaagttaatcgctatgaaattataaaaatgtttagcctataaacaaaattaaattgtactaaattgcagtcttaaagatacagactgtatctatattcttaatagtcaatattttttatgagtagccctatttagagatcatatttttctctttcaaactttttgccctgaaggaaaaccactaaatgcctcttggtggactctgctatcagtgagctcaccagcctgtatcagcttactccttatctttcatatctgtttgtctcattcctttttaacaaatctgttcagttcctttgtccaataggttttgctttctatttctacaccactaccagtctacgaccaactaccagtgtttctctccctctctatctgcaatgacacattcccttcctttttcactgaagcttatcaaaagcaatttctcccatcatctacacaatacctaaaactccatctcctgtgaaaagtttccctaggctaaagaaaaaaatgcattttttgctagactattctggcagatacaagggcttattacctaagaagcccaaaaggcacttaccactttatcagtatattctttgatttacgctacttgtttagttgcttgcagatccttctatatgtctatactaatgttgtatgttttaggcatctggtgaacagatattatatttacttcatttttacagttaatatcttgtaataatgtcatgcaaatgaggtgyagaactaatgcttctaatgctgattttccatataacctaagtatataatcaatcttgtgattttggattaagataaatgaaaatcattttgtccatcgattctatggcatttaaaaattcctaaatatatgagtctttaaaaattgtctgtttgccagacaagcaattgcagggtaagtcagctggctttatatagggcctctctctctcagttagttatacttcgaggatacaggagagttttaccaccttcgctggatgaataacaatactccctgcttaaactttcagccagatgctttctgatatctgttggtattctttacacatccaggagaaactttctgaaaagcttattacactttggactgaaaccaaggaaataaaaaaccaagccaatgagtccatagcattctataagcagtcttaaagaggtgtgctttatcccatcaatgataggctggattaagaaaatgtggcacatatacaccatggaatactatgcagccataaaaaaggatgaattgacgtcctctgtagggacatggatgaagctggacaccatcattctcagcaaactatcrcaaggacagaaaaccaaacaccgcatgttctcactcataggtaggaattgaacaatgagaacacttggacacaggaaggggaacatcacacaccagggcctgtcatggggtagrgggagtggggagggatagcatcaggagatatacctratgtaaatgatgagttaatgggtgcagcacaccaacatggccatttatacatatgtaacaaacctgcatgttgtgcacacgtagcctagaacttaaagtataataataaaaaaagaggtgtattttatcaattttaaaacaaattctacaagtgacatcataatttaaaaattagtattcccttctcatttagtttataaaagttagttctctattatatgtgtaaaaaagagaggaaaataagatattttgtaaaagtaggacatactttcactaaatctgcaaagaaataagtaatgttgtaaatatttctcygcatcctttttacaattgtgctcctgaaaaaatgttttagtctatatcaggtggtttaaacataatgaattctggttgagatcgtgaaatggaattacaaattttcaaaaaaaatcttgtatcgacacattcaagtttgcaagaatccttatgaacttaagcaattccctccccaaccccagttattccacagtttattagaataaaaggtaactctcaaatgaaatgatgtaaaaaatttggttttagttggattgtgcagtaaacaaaataagcaaaactttagaaagaaagagacccagaaaaagagcctaggttagggtgtcgattttagttctttcctgctttctcttgtgggagagaaatttatagcatttagtgctataaatttctctcctaatgctgctttttttttttttttttttgagacggagtctcgctctgtcgcccaggccggactgcggactgcagtggcgcaatctcggctcactgcaagctccgcttcccrggttcacgccattctcctgcatcagcctcccgagtagctgggactacaggcgcccgccaccgcgcccggctaatttttttgtakttttagtagagacggggtttcaccttgttagccaggatggtctcgatctcctgacctcatgatccactcgcctcggcctcccaaagtgctgggattacaggcgtgagctgctttaactgtgtcccagagattctggtatggtgtgtctttgttctcattgttatcaaagaacttatttttttctgccttaatttaattatttacccagtagtcattcaggagcaggttgttcagtttccatgcagttgtgaggttgtgagtgagtttcttaatcctgagttctaatttgattgcactgtggtctgatatactgttatgatttccgttcttttgcatttgctgaggagtgttttacttccaactatgtggttgattttagaataagtgcatcacaattaaaagaactagagaagcaagagcaaacaaattcaaaagctagcagacgacaagaaataactaagatcagagcasaactgaaaaagatagagacacgaaaaaccctttaaaataatcaatgaatccagaagctggttttttgaaaagattaacaaaatagatagactgctagccagactaatagagaagaatcaaacagacacaataaaaaatgataaaggggatatcaccactgatcccacagaaatacaaactaccatcagagaatactataaacacctctatgcaaataaactagaaaatctaggaaaaaatgaataaattcctggacacatataccctcccaagactaaaccaggaagatgtcaaatccctgaatagaccaataacaagttctgaaactgaggcagtaattaatagcctaccaaccaaaaaaagcccaggaccagatggattcacagctgaattctaccagaggtacaaaaaggagctgctaccattccttctgaaactatctcgaacaacagaaaaagagggactcctccctaactcattttatgaggccagcatcatcctgataccaaaacctggtagatacacaacaaaaaaagagaatttcaggccaatatccctgatgaacattggggcaaaaatcctcaataaaatattggcaaactgaatccggcagtgtatcaaaaagcttatccaccacgattaggtcagcttcatacctgggatgaagctgcaacacatgcaaatcaatcaacataatccatcacataaacagaaccaatgacaaaaacgacataattatctcaatagatgcagaaaaggcttttgataaaattcaacacccgttcatgccaaaaactctccaggaactaggtattgatggaacgtaactcaaaacagtaacagccatttatgacaaacccacagccaatatcatgctgaatgggcaaaagctagaagcattccctttgaaaaccggcacaagacaaggatgccctctctcaccactcctattcaacatagtattggaagtctggcttgggcaatcacgcaagagaaagaaataaaaggtattcaaataggaagaggggaagtcaaattgtctctgtttgcagatgacatgattgcatatttagaaaacctcattgtctcagccccaaatctccttaagctgataagcaacttcagcaaagtctcaggatacaaaatcartgtgcaaaaatcacaagcattcctatacactaataataaacaaacagagccaaatcatgagtgaactcccatttacaactgctacaaagagaataaagtacttaggaatacaacttacaagggatgtgaaggacctcttcaaggagaactaaaaaccactgttcaaggaaataagagaggacacaaacaaatggaaaaacattccatgctcatggataggaagaatcagtatcgtgaaaatggccatactgcccaaggtaatttacaaattgaatgttatccccatcaagctaccattgactctcttcacagaattagaaaaaaccactttaaacttcatacggaaccaaaaaagagcccgtatagccaagacaatcctaagccaaaagaacaaagctgaaggcatcatgctacctgacttcaaactatactacaaggctacagtaaccaaaacagcatggtactggtatcaaaacatatagaccatttctagttctagatccctgaggaatcgccacactgacttccacaatggttgaactagtttacagtcccaccaacagtgtaaaagtgttcctatttctccacatcctctccagcacctgttgtttcctgactttttaatgattgccattctaactggtgtgaaatggtatctcattgtggttttgatttgcatttctctgatggccagtgatcatgagcattttttcatgtgtttgttggctgcataaatgtcttcttttgagaagtgtctgttcatgtcctttgcccactttttgatggggttgtatgtttttttcttgtaaatttatttgagttcattgtagattctggatattagccctttgtcagatgagtaggttgcaaaaattttctcccattttgtaggttgcctgttcactctgatggtagtttcttttgctgtgcagaagctctttagtttaattagatcccatttgtcaattttggcttttgttgccattgcttttggtgttttagacatgaagtccttgcccatgcctatgtcttgaatggtaatgtctaggttttcttctagggtttttatggttttaggtctaacgtttaagtctttaatccatcttgaattgatttttgtataaggtgtaaggaagggatccagtttcagctttctacatatggctagccagttttcccagcaccatttattaaatagggaatcctttccccattgcttgtttttctcaggtttgtcaaagatcagatagttgtagatatgcggcgttatttctgagggctctgttcagttccattgatctatatctctgttttggtaccagtaccatgctgttttggttactgtagccttgtagtatagtttgaagtcaggtagtgtgatgcctccagctttgttcttttggctcaggattgacttggcgatgcaggctcttttctggttccatatgaactttaaagtagttttttccaattctgtgaagaaagtcattggtagcttgatggggatggcattgaatctgtaaattaccttgggcagtatggccattttcacgatattgattcttcctagccatgagcatggaatgttcttccatttgtttgtatcctcttttatttccttgaccagtggtttgtagttctccttgaagaggtccttcacatcccttgtawgttggattcctaggtattttattctctttgaagcaattgtgaatgggagttcactcatgatttggctctctgtttgtctgttgttggcatataagaatgcttgtgatttttgtacattgattttgtatcctgagactttgctgaagttgcttatcagcttaaggagattttgggctgagacartggggttttctagatatacaatcatgtcatctgcaaacagggacaatttgacttcctcttttcctaattgaataccctttatttccttctcctgcctaattgccctggccagaacttccaacactatgttgaataggagtggtgagagagggcatccctgtcttgtgccagttttcaaagggaatgcttccagtttttgcccattcagtatgatattggctgtgggtttgtcatagatagctcttattattttgagatacgtcccatcaatacctaatttattgagaatttttagcatgaagtgttgttgaattttgtcaaaggccttttctgcatctattgagataatcatgtggtttttgtctttgacccagccatcccattactgtgtatatacccaaaggactataaatcatgctgctataaagacacatgcacacgtatgtttattgcggcattattcacaatagcaaagacttggaaccaacccaaatgtcctacaatgatagactggattaagaaaatgtggcacatatacaccatggaatactatgcagccataaaaaatgatgaggtcatgtcctttgtagggacatggatgaaattggaaatcatcattctcagtaaactatcgcaataacaaaaaaccaaacaccgcatgttctcactcataggtgggaattgaagaatgagaacacatggacacaggaaggggaacatcacactctggggactgtggtggggtggggggaggggggagggatagcattgggagatatacctaatgctagatgacgagttagtgggtgcagtgcaccagcatggcacatgtatacatatgtaactaacctgcacattgtgcacatgtaccctaaaacttaaggtataataataataaataaataaataaataagaagttaaaaataaacaaaaaaacaaaacatatagactaatggaacagaacagaggcctcagaaataacaccacacatctacaaccatctgatctttgacaaacctgacaaaaaacaagcaatggggaaaggattccctatttaataaatggtgttgggaaaactggctagccatatgcagaaaactgaaactggaacccttccttacacctcatacaaaaattaactcaagatagattaaacacktaaacataagacctaaaaccataaaaaactctagaagaaaaactaggcaataccattcaggacacagacatgagcaaacacttcatgaacaaaacaccaaaagcaatggcaacaaaagccaaaattgacaaatgaatgtaattaaactaaagagcttctgcacagcaaaagaaactatcatcagagtgaacaggcaactgagagaatgggagaagatttttgcaacctatccatctgacagaaggctaatatccagaatctacaaggaacttaaacaaatttacaagaaaaaaacaactccatcaaaaagtgggcaaaggatattaacagacacttctcaaaagaagacatttatgcggccaaaaaatatatgaaaaaaaaaaaactcatcatcactggtcattagagaaatgcaaatcaaagccacaatgagatatcatcatgctagttagaatggcgatcattaaaaagtcaggaaacaacagatgctggagaggatgtgcagaactaagaatgcttttacactgttggtgggagtgtaaattagttcaaccattatggaagacagtgtggcaattcttcaaggatctacaactagaaataccatttgacccagcaatcccattattgagtatatacccaaaggattataaatcattctacttataaagacacacgcatatgtatgtttactgcagcactgttcacaatagcaaaaacttggaaccaatycaaatgtccatcaatgatagactggataaagaaaatgtggcacatatacaccatggaatactatgcagccataaaaaggatgagttcatgtcctttgcagggacatggatgaagttggaaaccatcattctcagcaaactaacgcaggaacagaaaaccaaacaccgcatgttctcactcataagtgggagttgaacaatgagaacacatggacacagggagggaacatcacacactggggcctgttgaggtgtgggaggctaggtgggggatagcattaggagaaatacctaatgtagatgacgggttgatgggtgcaacaaaccaccatgacacatgtatacctatgtaacaaactgcagatgtatcccagaacttaaatttwaaaaaaaaaaagagcctaggtgtaatagaaacacgttccactttaaacaggtgcgtattagatagctatcaaataaaactagtaaactgacaggactgtgtaaaaaccacaatgggcttataaatttctaaattttaatttccaaaatctttaaaaaataaagtttacaagcactataaaggcaagaaacaattaccactttagaaataatactaggaaagaataattactaaataataaagtactgtactgaatataaagcatcaggctttatgggtaaagaaacacttttctgggtaaagcccagcacgtagtaggtaattcagacatacaattctgtaataccaattgtttttacttctcaaactatgtatattacatactgacttggtaaagtctattggaagtttgaccacctttgacacttccataagaaaatttaacaagctcctttttcccctctccaatacttgggtaaattactaaataacatacatacacacacaactgctttcaaattaggttaattttccacatttttttaaatgtccgtaagtcatcatttaaaaaataattcccattttggctaatctgggaaaaggaattaataactaaaaagacaagaaatttctgcttcctgttatttctcatctgcagaacaggctagataatttgtgagactcagtgcaaaataaaaattcagggcctcttgtgtgaaattgattaagaatttcaacatagcagtagcagaacattaaaaaagctgagccttgtgtaactgtacaggttgcacacccatgaagccagcctgctctttttctccctgtgaccttgactttggttcacaccatcacccagtccagtctcctgtcaaacacttacttcctctgaagtcatccatctctgccttctctatcttagccaccacatggcttacattcatgctctaagcatgctactatcttcagattgaaaaaaataaaaggagaggtgcagtttgaacaagacaaaaggcaagatccaacccacagtttaatgcagtacctcccaatgatctttgaattattttaattgtaacctaatctttacaagaaaagaataggagatataaaatgcatacaaagatgaacttyctagaaaactataaagtgattactatgtcaaaataagtagtgtttaaaatacaactraatatgtatttttttcagtaaaggtgaaaacaaattccttcaagtagaaggtatgcattttgcttctaaccagagtattcaagtcagttaacatattttttaaatgatttcaaggctacaaagttggtaactttttcagtaaatgaatacttgcataggcaagtgctacgtacaggcaggtaaagaatgtataaagcaggtaagcagaggcctacattaattattaacaaaaaactattcatttattcttttagaaacaagaaaaagaatcactgtaatagagcacagactttaagagttaaaaaaaaaacggctgcagaaaagggtacacagcaatcagagaagcaaggattatactgatatataatcttcartcataaatttgttgcttcaagtacattgttcctgctcttaaaaagaatgtgttttactattttttaaatttccaaaaggataacatactgaatctttataacttggtgaaaatttaatatagtaaatatagactagtctgttcatagtcaacacgtacatagtttattccttaaagactatgtgaatttccagcagcaatctacctttcacattttctgcatctgttttaaaatgtatttttattatttcagaaataaaatatgacttctgcagacctaacagttttaccatataattagcattatcaatgtgtttttatttaaggcaaaagtataagagatgttaagaagtacctagtttgaaactatttcttggaaatgtttaaaatcaatttacaaaaggaaagctgaatatataatatacataatatactagtaatcactctttaatatccacagtattgggcatcttttaaaggaggcagtgtaaacgaaaatctgtaagaatgttgattctattattttgtcttagctagcagataattaggatgaagattcttacttttaaaaatgaactttttacatactagtctcatctctttaaagatcattattccatctaagaattgaatatgttgacactctaaatatttttaaaataattctttagttttgtcagatgttttaatctgccagaaaactgartattagagaacccatcattacatacatgcacacgagattctgattacaagaggagaatgtaggttaagtgtttaatacaggtaagaatttgaaaaagttttaaccaagtcctcatactgcaacaataactattacctggtaactgataaaggttactctttattaagtatcaggttgtatactcagttctttacaaacattgtctctaatcctcacaacaattctgaaacttagtattactatttccattttacacagaaagaaataaaatcatcctccaaaataaagcttttcatttctgtttacctaaggttacrcagctagtagagtaataaaactaatatttgaattcaagctaattccaaagcctgcaccttttctatggtaagcctctcctagattatatttactatatacatatacttctataacattattatatttgtactgaatttctttccaaataatttattgggatttctaacagctaataacaaatagagccccaaaagattgtattaagaaaaattgcagaatgctttttccaagtttggctttatacatccaattctccttgctcccaattttgatctgcaagaagcttcctttggcagaaaaaagataaagtgagatggcagttgtggcacttccggtgtcaagtcaagcatttcaggagtcaggaaagtttaatctccaacagactcaagactgagcactttatccttgtttcattataaaccaaagtcttcataaaaggtcactagacagcaatcatgaagaaacagtaataaagttcaaataaaaaaaaaacacacagcaattgtttcaaagctggaagaaacttcagcagtcactagtagttcaatacttattttacaggtgagaaaactgaaagccagagaagtatactattgtccagggccccaccagtaattaatcaaaaattttcttaatgctcaatcaggggctgtgtccactcagtcaggcttcctttcaaactaaactcatcatttcaggaataccttctcctcccactcatacagctcttcttcctgatcatcaattttttttttctaggatcgctattctttagccactcaggataatactttggagtaatcttagacaaacatttattttacatcttctttatcatttaatcagaaggcaaatagtactgctaacaaaacccttacatttatactttcttttctgttcttattggatggtaaccataccatctccaacctacacttttcctatgtcctcctccttggcctttcttccttatctggtctttcatctttcctgttaacaacaacaacaacaacaacaacaacagcaacaacaacaacaacaaaatactgacttttggttgccttctggaagttgaaactttaatctggtattcaaggtactgctctacctaggtacaaactccctttgcaggttttagggttttttttttcttcttctgttttctctaacctctattctggcttcagtcattcttggaagaaacctgtcctccattttttcttgtctctgtgcaattaaccaagctttattattattttaaaataacatctccactgcctattatggttggagttatatctgtaagactgcaccaaactgtattctaaaggcatctggttaaaaatatatcagaaaaattaccatataaaagcttaaaaacctagcacgatgttaaaattgcagtaaaattgatgggataacaaattagtggagtctcttctgccataacacttattttgaaaatgcaaatttgtttcagtgcagttggtttattagagaactacatgagcataaagagaatgtcacctttgcttatgcatgattttatctgcragaaacactaagtgaacacagaaaattgctgccagcttaactaagtcacataagaataaacaaaaagcacacctgcacacatctcaagttaccagccacttcagttcaccgtgcttctgttacgagccacacccatcacatgcaatgttacaactttccttctgatttcagataatcctccttctaccacttcacattaacttggagatcacaattccatacctacttccacaagcaaacatcagggtttgttcaaggtaaaaagtgtcacttgtataatagtaattatgtatttcttaaccatttaacatatgtaaaactgtgctgcacttgttattagttttctgtctttttaaaaatgtgtcactgacaaaattattgtgggctgtactccaaccccattttcctcataagccctatgatttttattgcccaatctaattctgggtaattagctaaaggaaataatttaggcaaatgcaagaagttatatgcacaaatatatcacctaccatattattaataacagtaaaacaaaacagccttaagatgtccaacaggaagaaaacaatttattaataatgatacatcagcaagatggtctattattagtcatttaaaaagactataatgaaacatgaagaaatgtatgtcataattgagaaaatttggattatgactctatttaaatcagttatgcatatagtcaagaaaaaataattatgaaatttgaaactaattatttggtagctttatgtatttaaaaattattttaaaaagcagttactttaacaaaagctatgttggtaggctgaattagtatttgttccatgctttttgaagatgaaaacttataagacacagaacaaggatcctgaaaagttcagtctctgtactgcctttgaaactcttctggaaatttaaattattttataagtttttttgtaaaaaaattcctactgtactaaatgactacttttaatgataaaagattcttttaaaaagtattcacatcatagcatactcaaatagtaatcatatttaagttcaaataatatttttttttagtattccacactttaaaaatagaataaatggtcaaagctaaggatctgtgcaaaaaagaaagttctacatatataatgataccaatgtatacagtcatatttctaatacctttagctccatgcatgtcatttactggaatatttgaatgcttattcaatgatcccaggagctctcaaaaatccctgaactatgttaaaattttgtgttggctatttttaaattccacttatttattaattcatcaatattaactaagtgtataacgtgggccaaacactatatttctatgtgctgaggacagaccagtgaacaaaggaaacaaaaagcctttatattctagtggaggaaggcaaaaaataaatgaaaaaagtaggtaaaatatatgggatggtagatggtaacaggtcttcaagaaaagaaacataaagcaggaaggagaattggggtgaagyaggggaaatctgcaattttagatcaagtggctaaagaaagcttcattaaattgacatttaagtacaaatctcaagtaatgagagattgatccctgtagatatacagggaaagagtattacagagaacaaccagtgcaaaggctctaaagcaagaacttgcctggcatgttctaagaacagcaaagaagccagtgtggatgactagagcaaagtgggtgtgagcaggcaggagtggttggcagtggctgtctgggaatgacagcccagagcacagagcctggtaggctattttaagaactttagtttttattctggttgagatgaaaagtcaatggaggattttcatcaaaagagtgacataatatggcttatatttaaatataactactttacctgctatattaagaatggactgaagttaagtcaacaggaaaaaacaggaagaccaattacaggaggctttttgcatcaatacaggtaagagatgaaggtgatttggatcagggttgtaggagtagagatggtaagcaataactgaatctcagaaatatttttgggacagaagcaagataatattttggtaacagaaatgtgaagaattatcatatgtggaatgaaaggaggacaggcatccttggtgacaccaaggctgattaaaagacagcaggtgctgttactcagatgggaaaaactgccggaggaggttttggtgggggaaagatgaggaattcagtttactatattacattctaagaagactacaggggccaggcacggaggctcacatctgtaatcccagcactttgggaggccgtggcaggcagatcacctgaggtcaggagttcaaaaccagccgggccgacatggtgaaaccccatttctactaaaattacaaaaattagccaggtgtgctggcacacgcctgtaatccccgctacatgggaggctgaggcaggagaatcgcttgaacccmggaggaggaggtcacagtgagctgagatcatgccattgcactcactccagcttgggagacagagcaaaactccatatcaaaaaaaaaaaaaaaaagactaaaggacttctgatcattagcaaatggatgatcatataaagccatggtactatatgaagtcactaagggagtgaacatgcagttttaaaggcctcaaaattccaaatgttggagcattcccaatttggagatggggaggcaagaagaaatcagcaagagattgaaaaagcagcagccagaggggtaggagaaaaaaaaacaggacagtgtagtatagtatctaaaaggccaaacaaggagtgttaaacaccgttgccaggtcaaataagaggaagactgagatgaccatctgattggcagcatggcagtcattaagaagtacaattctggtgaaatggcaggggttataggaactgaattcagacagcacaggcaactacatacttcagagatataggctttacatgaaagacatggggtagtaactaaaggagaactgggagtaagattttttttaagatgggggaaaaaactcaacattatttgtatgttggtggaaaagatccagtagtgaaggaaaaataatgatgcagagagagaaggcagaattgccccaattttttgagactcactaattatgacatatcccccattaaaaataatttcaatatttatccaaaatttagaatcatagtatctcatacaataatattaataaaatataatacaaagaagccaatatatataatggttctaaaaataagtataaatgttgaataaaccaatgaatagtataatttttaagagctgcccttcccaactcattaacaggtacaaatgttttcttttgccttctttgccttaagtggtgtcttctaaaacaaagattatattttaatatttttcttgatctgaattgtggttgctgtgtaatatatccatgaaaaacaaaatctactttcatattcacatagttctttgaagtagattactaagtccacactttgttcatacactttcaaatccagactttagaaagcgaaactattagctgaatattcagtatagaaaacaggttatcttattcagtcaactttgctaaaattatataaatatactcccaacttcaaaaataatatctatccacaagcattgtatctgcttgtagaataacacatgcatctaggagaacttaaaaactgtactttaaaccacggattggcatttaaaaaaagggccagttagtaaataccatagactttgagggccacataaaatctctgttgcatattctcctttttaaaatcctaatcccttacaatccttttttaaatttaacaattttaaaatgtaaaaacaattcttaggtcataggccatacaaaaataggtttgagggctggatttggcccatgggctatatataatttgttgactcctgctttaaacagttgtgcaaaagattaaatatgatccaggtaagtcaaatttcaggactgaagctggacacattgaaaattctttgtattctgcagaaagyagacatatgcctgtccaaaaataggaaggaatttctacttgaaatagcatattcagaaacattctgtatctaaaaaggcaattgagctgtccttttactgaaagccacggaattgataaaatagccactatctctggttatataatcaacccaactgatatacttttcaggattatctcttaaataccgtatcagtaaatagtgaaataaagggaaagtatttaacgtgttttaatttccccattttaatttactgcattaaaaaaaccccaagatgttgtgcacatgtaccctagaacttaaagtawaataataataataataataataataataataataataataaaaaacccaagatgaagcttctcgggaggctgaggcagaattgcttgaacccgggaggtggaggttgcagtgagccgagatcatgccactgcactccagcctgggtgacagagcgagactccatctctacaaaaaaaaaaataataataataaaaaataaaaaagttttaagttaggagagctcgagctattttattaacttcttctggactgttacatactcataaaggcaatggatccttcctccagaaaaagaaatacatccaaacttttgctttaatttcaaagagatccagattccctgaagcctatccatggatactgagtgaagatattcttaacttaaaagcacactaacttcattccttcaggtaatttcacatcaggtttctaaaaagataaaaccctacataattatcacatggtggtgagtaaagtaaaattacatttataggtaatctaaacagcaagacaataatccatgccttatgactggtgaatttttcagtaattcaaaacttccttaatgaagcttttctctctctcctcacaccagcttgtgatttctgctacagtctggccagtttctcactctgccaatatatgctgtatttttttctgcatcagttctcatgagatgttacccttgcctgcagtgttcttgccatacatgttcaaatcctgcctatttgtcaggacccaaattaaattctaccacttccatcatttcttttttgatattgtagccaatagtttattttcctgggattcactgcttttgtaaacactattaaaacagcgagtcatataataatttgtgttatcacactgtttttgtttgttctgagtatcgccaccatcgtgccagtaacaaaaggtaggagtacttctcaccatcatcatcttaggctatagcactattatacatgacatatttcataagtaattattaaataaatgaattaacttcaatggtttctgaaaatactgatttggttgctcaatgtaaacctgaattagaggcaaaaatttaaaagaaaaaacaacttactgtatacttacaatgttgtgcaacaacaaaaaacctcagtgaaatgaaattgagcatttaatttttaaaattgtattgtctgttaagtgacaatgcccaaagctagagaaaacgctataaactgaagtgcatgatcatgattacttagttgttcctctccaccccatggacatgatgggataagaataaactgccttgattttagttcaaattttgtggtctaaatatagcactgaatcataactggctggcataaaagtctatttaatgttccagtaggtctcaggcatttgtttcattcagtgctagaattattagttatcttcacataaaattttccasaagtataactagtcccaggcagcatcgaaaagaggtgaagtccctcctttacagctcctacgtcactcttttggcataatcttcctttaaaatcaggtgcattcaacctgctctctgatgttcagggttccccctgtggcaccctgcctaggtttgtgctcaggtcagacctcatccctatctttcttttctttcccctgcccaaatctcatgaatatttacttcagtccattaaagtcttactaaataagtaggttatttcctataaacaaactcattttaaggtgtctttattgtgctaaaggaaagaccataatgttggaaaaacaatgcctttaagtatgaaggcatttcaccaatgcctttcatatcatatacctaggaagtgctactcttcttgcataaagttagcactagtttagatgaagtatattctataaataaaaagaaaaaaaagcatgagatgcaacaaaaccactcctaacacatttagkwaaagagtatctcgtgagattcagaggtgaagaacagtgagactagacaagatttgcagttttccatatgtagaactatttgttagcacactgttgttaatgaaggtaaggttattcattaattcagttaataaaacagttgtataaagcagatctatgcaatgtttcacagatgccttaactgtatcagaaattgaattcgttaatcccctgtatcactaaagcacaagcaacaacccacttcctctccagtatttggacttaatgaagggcactgccattaacccctgcccaagtcaggacccaggagttatctctggtgtatgattcttcatcccctcatccaattaagttctaacttgtaaatatctctctatatacccacctctcttcatcctcattgtcaccacactagctcaagccccagtatctctttcctagatttactgtgaagcttactaaattcacaccctcccatccttcatgatgcagattcagcaatctcagaaaaatgcaaatctgtagtacatgcatatgacggaacattatacagctatgagaacaattagcaaccacagtcaacaatatggataaatctcataatcgtaatgcttcacccaagtgaatacacattgtatgcccctatttatattaagtacaatgtaggcaatatcctccatatacagtgagaagtcaggcaagaggtctcccttggtgggcaagagacaggactgactggaaggaaaatgaaggggaacttttaggatgctgatattgttgtttttcttcatctaggtgttcatcacataggtgtgctaagtctgtgaaaattcacgaagcagtakgctaatgcttctatatgtattaggcattaataaaaaactttagaaaaaaaaatctgagcgtcaatgtcttcccactgttctcaagctaaagcccaaaggctagtatctaatattgacttgcaagatatttcaccgtacagtgtcatctttccctctctccgtgtcttttatcttgaatgtgttttgttcttcttcctttatgactcttacatctgctgtgcccttagctcaaaacaccaccttgccttctcatttggtttgattaaatctaatgtccctcagattcagttaaaatttcatttgtgcaacctgaaatagattgtagttttgttttctgacctcagattgggttctgatcacttccactttcccaccatcactcctctttagctgtgagggcaggcaatgtgttttgtttaccactctattctcacagttctctatagatttgatgactgaatatatttacttatatcctatacaaggacgtggcaggtagctgtggcaaagtttcaaagtctaagtactccagtataaatgatgagattgctaagagtgtttgatatgcaaacttaaaggaaataaaagttaaacattaaattgtttatacacaaaaagatataagccatgcatgtatctttcaggcacagggagaagtcacttttaatggttcttaaatgtatttgaaagttctattttaaacaatatctatggtaataaaactctgaaacaaaatcataaagttttagtcattgtctacacacaratgttgaattgtttttaatgtcacgaaaaccaggaacctagcactgttttaatgaattgagtgaggtcaactaattgcttcagtttcttttaatgagaagtcacaaaaatatttaatatctatctacctcaacttttttgaaaaaaactatttacaaatatttgcaaatattcctaagaagaatttaagcttttctaaattaaacataaaataatttgatgaatacaaagtaaaaatataactttttatttgttagaaatacccatggaaaataacacaggtggcctatcaagtggcattcacaaactgttcttcctggataaaaaagcaaaatctggtcactttttataatagcagaaaagcatgagtgataactaccttaagtgaaaatgtccgaaggaataaaaacaaaaccaaaactataatgtttcagaagtcaatacyattttctataatgagctttatactataaattttagaatctttaagcacaatttaatttaaataaaaaatataaatagtacagctgggcatggtggctcatgcctgatagtcccagctctttgggagaccaaggtgggaggatcgcttgagctcaggggtttgagaccagcctgggcaacatgatgagacccccgtctcaacaaaaaacacagaaaaattagctcagcatcttggtgcacacctgtggttccagctactcaggaggctgaaacaggaggatggcttgagcctcagaggtcgaggctccagtgagctgtggttgtgccactgcactctaggctgggtgacagagtgagaccttgtctcaaacaaacaaaaaaatatatatatggatatataatatcatctatataaaagtatattaatatattttacatttatatatatgtagtgttccaagttgccttgttttctactcctttcagaaaataattgtcttttatataacatcctctatatttctttttattctaatattcagtttatggtataaatgcactagatcttaaactaggcagactttactggttagtaccaagaaaaagaaaaaataatatttccttcattttgagaaaaaggtattagtttccctaattaatacagaacttgcttacttaccatttctaaagtcctactataacattaaaagcatcttatgatcaaaaagaccttaaaatgcccttatcactgaaaaccaacaggaagtgtatataggctactgaagaatttctttaactagggttcagaacctaaaactgtcccaataatgcccagtgtaatgtttattaaggcaattacctacttttttaatattctggaaatataaaaataacattattcacctattttcttgagttttagttttggagacagaatttgaagagagaaaaagggatttaaattataatggataattccttttctttttaatctatcttcaagaacttatcacatagcctcatactttattggaaggccattttaatgttaactagtagagtccactcaaagggcagaacagaagaaagcattagcaaactaactgctcccatttaggctggtattttcaagtttaattagttgaagttaaatgtatttttcttttaaaaatcagtatgaattttaaagaaataaactttaattttcacaagtattaaatttcaaatgaagataagttaaattctttcaacttcagtttatcagtaaaatgatcacattagactagatcacagtggttgtcgaccaaattttttgttatgaaatcctctgagaatatgatgaaaatatggacattctccccagtaaaaacacatatatacaaaatatgactgtaattttaggggattcaacagaatctctgaaatccatccaaggatccccaggtaaaaagggtactagattatatttcaggtcttttgtagctttaaattatggtttcagaaataaggcaaaagcctttaaacaaaaggaagtcagtcttgagaataaaagtgaaaaatgcagacacaactcattagtttactcattgctgttgaagacattagctaagcaaggctgaacatcttacttatatagatgtgttaatctgacaaaataattcatacctgagacattagaggttaggcaaaatcagattcttacataaacccaggatatttctagacatgaaaatgtgtgacattcacagctttcaaatgacagtaaattgtctccctcatcccaactccaccatcaccaccaactccaataccttccttcttagagtgaggaagaaaaatatataccgaaagctatatttgagacctttcaggtgactgttttgggggaggggcaatattttcaaattctgaaatttcttatttagaaataattattggatcwcacacacacacacacacacacacacacacacacacacacacacacaaacttacctgtggttcttgttctctgaaggaaatgcagtaattgaaaacatccccacactcttgggtacattctcctaagtgtgaatggatttggaatgcaccatagcttaactttggaacgctaacttatgccaccctgcactggcagttggcatccacctgcctacataaataataatgtaagcctgtcatcttgagtcatgcaccttgtgaaggaaaagtattctctggagagaggtggtgcaatgactgtctttcgagacaaacagtctcttctatagcacttgagggtagatccacactactaaggaggtgactgtatgcttcaaaaatgtactaaaatcaatacattaaaaatgttaaagaatgaaaacggaaagatgttcctctgtaaaagaagctcttaggagactgattgctgaactggtcaggatccaatggtcaacaccagagctaagaattacaagtacttaaatacttgtaacgaagtaagcctaatccctgcattcagtagccttgtattttgtgttcatgcttgactaccagaggtttatgtgacagatgcaatggaaaccaatggtaggaaaataccttgaaatggccaagaccctgaaaactgctgtggttactgtcaaaggagaattagttttcaagagaaatgatagcagcgttgtgctgttagatgatctacattttataaattcaagtaatcattcaaaaattgtaaaatttcgtaaaccttatatcttaatgtaataatttagatgtaaaatgtttaaatatgtatggactaaatccttgccatttgagcccctcttctgtcttaaacatactaggtcattaggaagaaatgggctagagatatcttctagtttacaggctgatttttggaggattattaaaatcctgcgcagagaaagagatgctctattttctagtcctccaagattccaggcagcctgatgatgtcctcttctcaagttaaaccagagaagggttgtcagataaaatataggacacccagtcaaatttgaatttcgaataagcagtaacttctttggtaaaagtttgcctcaaatatagcatgggacaaaattacactaaaccattatttgttatttacttgaaattcaaattacactggacatcctgttttgttttgttttttccttctgctaaatttggaaactctaaacaaggggagttcgcagggtcatccagtggattttggcatgtatgaggctaaaatgagaattccactcattgtctagatctgaactgtggaatatggtacctactagccacgtgcggctattgagcacttgaactgtggctagtccaatataagatgtgctgtgagtataaaatacacagattttgaatgctgagtatgaaaaaaatctcataaaacattctattaattatatgttggaataatatttttgtatatattgggttaaataaaatgtaatgaaaactaattttgcctctttttattttcttaatatggccattaagaacttaaaattacatacgtagcttctatttatggctcgaattatctttgtaccatatagtgctggtctagatgtctccaaaggctagaatttctttgttgtcccatctctaaaaaaaaatcagtacggtaaacacataagactgcttctctcacctccctccagctaccagagtaggtaaagagcatgatcatgccagggaaacaaaatttatagtagggactagcatgaactggctaggaacacttcaaaaacaaaaacaaaatgtggcatacagataccgatgaaagacaaatcagaaacctgatctttgacaaattcttacatgattagaaaaaagaaataaacactaatataggtatgtgtatatgtacacatgaaaatcaaatcttctcccagatattagtttcaatggaagaagccctcggtaccattattttgggttttccctcctacctatgatcaaaatcatagaacaacagttgattttgtcacctcctatgaattgagatggataagttattaataagaattgttaaggaaatgatcttatttttgatactgtagatacagacggcaagatctcatagatctcataggtccccattttatttatacatcctacaaaactgatctgaaattagaacacgagttctaggatagtgaaataaacttttcttttctaaagtatgttgctaaaatatgtactatcataaaacaaaactcactttaaaaaaggtgtatgtttagggagacttcttagattacaagtattttagttagaataaacctttagtttggttaagaaataataacctgtttagttatttctataacccaccttataattttcattaggttggagatttaattcaaagtgttttctcaactggcaaaaagggataacatatttgtccattctattctatgctattataaaggctaagatatttagcatgctcttgcaaataaaaattaaaaaaaactgtacgtatatatagattatctctatacacccaataatctatatttcttttctaataaaacctacatgatatctgttttgaagatttaaatcttttaagtttacctgcagttataataaccaagactagttctaactcctcgaccatttacatacaaaaaaagtaaattggttctcaaggtttttcaaaaaggtccaatttgtattttttcctcattctaacagcaaacacacaagtatttttcctctttaatatcttctattatacagctataggaagaacaacggttttgaaaaattatcctgcatcagaggtagggttgctagacaaaaatcagcagattactccccactttaatggtccataagaagttcacattttgtagaactaaagtcttcaggatcactttaagagctttaagaaaagataaatgaaagggacaaatttaatktctycaccagtactttaagtctcattgttaatactacagaatactgggaattacaatctaaaatgttttactagacatttagtctcttgttattcaaagtattcttgcctaagactgacctaatcctaatattaatgacattttcgaaatcagcatgcttctgctcttctccatagtcaattaatgatatccaaatgacatttgaatttaagactggtcattttgagagacatctatagattatattagttaacaataaggttttctgatgtcagaatttggaagtaaagcacagacattaatttgcttatccttcataaggtttccctgatagaaccaacatatttattcttcatttcctgaagacaggaagaagttgtaagacgaaaaagaaattgccaattttaagtaattttttcaagttttaagtaatatttttcaattaagatctgacataaaaaattttatgattacataccttttaaagattagatgacctttgcttccacactttctgaagtgtaatacagaatacaaaatggtttgaggggctttccctgaagtaaagataagatacagcttcaaaaagatcatgaaaagtaattcttcacagctggctctatcaactgaagctattatgtcactagattgcctaaatggtgtcattgtttcaaaattcttaatccatatctcaagacatacaagaaaaatttttgattaactccagcagttattaactgaataaatgcagactaaactggaaggttttactatgactgggattttttttaaagtaaaacaaaacaaaaatatccatacatccccaggacatgcttcacttctaaataacgaaaagcacctcttgatgaatgtgtgatgtcctacccacaggtagggcctcccttctgtgcgaacgtctgaaggtctcacaccctcaatggagcattccaaaaccagtcttaggttaggagcctgggcccacgagtgtgcactcactacacagtgcttacctttagagaacaaggtggctgacacaaactgatcaagttctcacaccccacacctccaagaacactgaaaaagatctgcagatctttcttggtgcaggagggacctctttatattcctcttgtggtggaagtttaaggttgtcctaagggaggagagaagagtaaaagattatactgggatcaaactattttgatcaagcttatcttctatattacaaaatgaagttttgagaacagaaattagataaaatcatgagtattcttaaaatcacattctcttcattcacaaaaatatctcctctaaatactgcatgtttcaaatattactccttagacccaaaaccttaagtgactagttcaacatccacccccatcactgggaagttgagaagttgaaaaaatacagaaaaactgtaggttgccaaatgatcataattataaattccattttaaaatatatatacatagctaaactcattaaaaagcaatgggttagagccagcggaaattctgtcctccctttgtatttccaagataatggcatatgctatttcctaacaacagaaaagtagccctttgaattctgttaaatgycacagaataatctactataattaataaattaatttagtatgaatcaacagtagaatcaatctactagaatgtaaaactccatgaggaaaggaattttggttttgttttttgacacactgattatctgtagtaccttaaataggtcctggtacatagaaagcattttaaaaaattgcgatgattaagaagaatattaaccgattagtcaatattcttaaggtgaaacttacataaaattaaacaaaaacctacaaatgttctgaggagtttgaaaatatgttatataaaataatactaatatagatgtttaattatatattaaataactgttaggaatacaatattttaagatgccatatcctaaaatattaatgacaaaaatactataaataaatcattataatccaaattccttgaaaggaatggaatgctttaagatcaggaaatcatgcagagtattttaaaatatattattaaatatcaaatatcagaagaagaatattaatacagatgaaaagcaatataccttcttaatgctttagtattaactgttttcatccatagagagtagatcgatataaataaagtgataaaatggttgtctatagctataattctgcctaagtaaatcattaccataatattaaattaaaatcagaagatgccattctatatttccttatgtattttcgtatgtacattttgtctgactataataaacagaatattattcatttgttttcctttaacttttaaactattattaaaaacacagagacttatttcctttaaatgttttccaactgtttccaaatttgataaattagagagaaaaagaagaaacgctggccaggtgtggtggctcatgcctgtaattccagcactttgagaggctgaggctggcggattacgaggtcaggagttcgagaccagcttggccaacatggtgaaaccccatctctactaaaaatacaaaaattagttggatgtggtggcaagcgcctgtaatcccagttacttgggggggctaaggcaggagaactgcttgaacctgggaggtggaggttgcagtgagctgagactgtgccactgcactccagcctgggtgacagagctagactccgtctcaaaaaaaaaaagaaaagaaaaagaaaaaaagaaaagaaaaaagaaaacaaaatgaagaaatgctgaaatcaacatttgattaatggtactgataaaggactgaatgtgtatactttaaaaaaatctaacatgtaaggccagtagaatcagaagaaacaactatttataaagtacttgatttcatttgaccccaaaatctgaaaatgtagaattaaaactcaaaacatactggacaatgtgtatggtgcatttcatttcagagtataaaataccatttgctgtatggtcaaaaccacagtaagaaaacaggtagtaaacttgggatgtatgtccacccttcatcactaaaataatgctttaatggacagattatgctttgattacaggcaataaaaacctttccacatttcacaaataattcaattttatatcttgtctcagggaatcaggtttaaatgtgaaaaagagatttaaaacaaaactttagactaaagaaataagtgtacacaaaaactcacttaatttaaaaacaattttcctattttcaacatgctgtaagcctttgaactaactttggggggaaggggtgaaaacagttacaaagtactaagtgcagataataygacaaaaagagctaaaaaggggtaaagaccaacccaaagttggaaatcttactgaaaggaaaagactactaagctggttgagtctcccaggccaacaagggcgaaaagggaaaacaaactccctagacagaggaactgactagaaacttactcatgctgtggataatggatcccttgcctcatttccacctgcagaagatgaagtctaagtttaccatattcagagatttagggctgaatttttcatttcacctgcaaatacagattactaagccatactaacatctcattttaagttccctacaaaacttccctgagcaatctactttccttctttaatgctggccaatgtttctcacgcaatctgtagtgaaagactgttttctcccttttggggacccaggttcatggactaccgtcatgactatactcagctcactttgcataaaactctccaggcaactgcgttaaaactactggcctgaacttcaaccggggagacaggtgatgtgcctgaatgacacaaatatcacatggctgtaagagtttctaaaccaatatagaaattgagagtaagcatttagtcatggattgattaacaaaccagcaccagttcatagcccattcttcaaggagcactggtgtaggtcatgcgcagtggctcaagcctgtaatcctagcacttcgggaggccaaggcaagtgaattatttgagctcaggaactccagaccagcctgggaaacatggagaaaccccgtctctactaaaagtacaaaaattagtcaggagtggtggaacatgcctgtaattccagctacttgggtagctgaggcaggacaatcacttgaatacaggaggtggtgaggctgcagtgagctgaaatcacactactgcactccagtctgggcgacagagtgagactctatctcaaaaaaaaaaaaaaaaaaaaaaaaagcactaatctaagttacaggagtaggatcttatgttactcttcctttatactttttactgaatccaatttccagttttaattctcatgtgcccttagaaactactgacaaataaactatcagtgactgattccagtatattccttttaccagttctttctacaacactgtacaatagaacttttggcaatggcaaaaatgttctatagcttcattgttcgaaaaggcaaacattagccatatatgactactgctcatttggaatgtggctagtgtgattaaggtactgaatttttaattttacttaaacagatgtaagtttaaattgcacatcaggctggtggctaccatactgaacagtaccagtacaatgctgaagtgttacattattgtcatgtaaccttttaaaaatttagcattttaaaaaaattacctatttccttcaatcctaacacaaatattttaattatgactatcactttccatacgtacatttagttatgtacatacttgtaatcatggcatataaatttactattttattttcacttataccaaacatttctctttatttctggaactacactatctaaaattgtggccactagccccatttatctatttaaatttaaataattaacattaaattaaaaattcagtttctcagttgccctagccacattttaagggctcagcagccacatgtgccaaatggctacatattggatagtgcaatcacagaatatttctatcaccacaaagctctcctgaacagtgttgttctatagtctccaaaaataatcatttaaatgtaatattttatgttgctgttctataattagtttttaagctgggcattttatatatatatatatgtaaaataattagcatagtgtttcctaatatgttattatgaaatttctaaacattattgtgactctcagcatgtattactgcattatttcccaaaagggtctgttagcactgcttacttgcaaatattagatttctctttttaaaaatttatgtcctttaatacaatgaaaaaaacctcatatttctttattattcatgtgtctttactttcatattcttaatctgtcatattcatttctcacttatgtattataatcttgatatctaaacttgcatatttacaacaatatataacttatacctattatcactttccttataatttttaatgtagtttccacaattttctattatccttttaatcataatattttggtccaacaaaaatttttaatattcaagtatcttctgggtgagttctactaattcttcaaatatgagatgtaaaggtattctctctgttaccttttcttttttattcctatggttgtgtaatatacggatgatttttgtctaattagttttaagacatatcactgaatagtactatccaacaccactgaacaaatatcctttaagtgcccctctcttaggaaagattattttgtcatacatttagttactgtatatgataacagatgggacaaattttgtattcctcatagtgctccagtaatctatgttttacaaaatgaaaacaagcttatttgttcagtattcctcttaagaaaacaactgtattaattcagtaaagtatgagtagaagaaaagaatgaacatagatagcatgttccactcaaaaawtaagaaaatcatttgctggtctatcacctattcaggatttcttaactcacaaaatgttaaatgtttgaaactagtaaaggggctggtttcacatatgtattgacactggcagaaaccaaggtggcatgcaagcagaggcagagaaactaaggtctgagtcagccacagggatttgtgtaagtcacgggatccaggccatgtctcttgactctcaccggccatgaagtcgggcttcaagggaaatttactttgttttttttttttttttttttttttttttgagacagtctcactgtcrcccagtctggagtgcagtggcacaatctcatctcactgcaacccctgccacctggggtcaagtgactcttctgccttagcctcccgagtagctgagactacaggcgtgcaccaccacacccagctaatttctctatttttagtagagatggggttttaccatgttggccaggctggtcttgaactcctgatctcaagtgatctgacctccttggcctcccaaagtgctgggattacaagcgtgagccactgggcctggccagaaaatgtatacttaaatctccaacagacagagaagtctcttctggtatctgrgtaacacacctattcttacatcatcatcactgttttagacaytcttgctttaaaaccttttgatatttagtaggacgagacttctcattacagaatcactataaaataaatcactagaaattttggaagttagaggttaaacccaaaaatcttacttttagtcaaataatttgccaatattcttgatttagaaacagtttctctgcttttatttgaatcttaaaattgtttcaaatacactggatgttaatttattttccaaagatctaacatctctctcaaatgtattgctagatattacatcgtttgttgcaattctgaatgggatattttcccagaatgattttcacatggtataaagatacagtatatctggtactttattaaatttttattatttaataaatcattttagagctgattgctgtagatttttctagataattaatcatgtcatctacaaatgaaatattttagttttatttcttcttcaggttttgttcattaccagtattaaataaaaatggggttagtgatgacgggtggacaaatttgtaacaaaaatggtgattgtttcattcctgaatttaagtttatcaccatttattctacagctttggttagatgatactgttcagcttgttgatttaatgaagtatcatgttctttgaggctcaactcatcactcacagttatttcatcacaaaataatgtatttgaccaaataaaactggcaaaaggtctccaactcctataggaccaacactgtatatatgttgactacataaaattatcctgatactgacaacrttcattaaaataagaaatatctttattctgtgaaagtcctcagagtcacatgtaaaataggtactcaaggtgctatgtggtccttgcagtatctcaagttacctttggaatgttacactaggtattaacagatgatatttaagacaccaggcttctttccagtatacattgtttcagataaatcaaaaaggtgtaatttatgaaggaaacttcttcttacagaagaatttccactaataaatgtgtaaggggtggcagatttaaaaattcattctcttgcaaaccctaatgacagaattgatttggagaacagtcagcaacttttcccacgggaggaaagattggtagaaaactctcaatagagagattgggttggcaccactgcccaattttagcattgataagagtatgacaagcagacattatatgctccttgatgtgatgcagtatgaagaaacagttccatgtgcaaagtattcctgcatgccttccatcctcaacaccaaaaccaaagctgaacctgaaactaattaagtctttcaagccaacttttagttcgcaggaaattcagaggctacaggaacaagttagaaggcaacagagaaatccagaatggaggatattctacaggatagtttacccagttttttcattaacacattaaagggaaaaggggagggaaggaggaagaagggggtttgggggtgagtgaggtaaacaagtggtgggaaagaaaagaccttttaattatacagcagtccaaacaaccaaatgctatacagatcttggttggattctgaaagaacaatctaaacgtaaaaaggacatttttcagttaaaagcagagaaactgaatacagagagaatatgaggtggttagtagttattgttaattttgttggatgtaataaaggtattgtggttatataagaaaaattccttcttttaaagaaatgcatatgaaagaatgcaggagtgaaaagacttgaagtctgggatctactttaaaaatagttgaggaaaaagaagagagtagatgaagcaaatgtggcaaaattttgctgattgttaaatctaggccatggggtttattacactagtctctcttaagtgtatgcctgaaattttttacactaaggttttttttttttaattcaagcctttggaacatcatctattaagccagatatattctagtacaagtaaatatggaattacctactctactatataacgaacattcacgagcagtacaaaacaaggatgcaaaagatacggcagactgccctgtgtgtgactggcacagattgacccacgctttaaaagatttattttaaaattaaatttgacttgcacatactgttactgtgtgtgtgtagaaagaatatatgtgtatatatatgtatatatatatacacacacagagagagagacagacagacagagacagaaaaagaggagaattggttaagtttcagtccaacaataccttaggaaagagaatatcagaaaatgaaataatttgtaccctcaaaacaaacaaacaaaagagatgacagtttatggggtatactgaaccagtacaaagtaggttattttatgttgttaccttcctacctccatttctcaacaaaagcatgctgccttctgattttattagagcatattacttgggtctgcattctcacaaattatctcatgattcaaatgagtccttctgtaactaactgatactcccctctctaaaagagaccaactggtctcagctacataataggagtataaactgttacagcctcactgtgccaaacataaaataacggggtattttatacttagtaggtactcaggtatttaagtgaatgataggtatatgtatcaacagaaatatttgagagatttatacgctcctcttaaaaatgtaaatgcatttctactgggtaaagtacatggcagaaatacatttgaactagaaagactttcttatatcccttgtgtatctaccacctgcacatccaccactgttctagtggttatcatgtatcccctcttatacaaagtatgttacagtgtaagatgggattgtctgtttgtcaccttattttcacaacaattaggttattttttgctggtccttgactttacttttaccgtgttaatgattacttaatgatatataagattttttccccaatacaccgcagtaagcaaatcctcccaagaaaaaaaagtttttctttacgctaattgaattttcttataaacttgtcttctttcatatcattgcatgttaatatttaatattatatatttaatattacataattgtatcttttccctaaaaatgtttgcattcaaaacccttgaaaatattttaacatctaaaatacagtaattcaaaatataggtagtcttaaatcttctactaagcctataaagggcatctattttaactctcattttttatctgaaaaattattctaattatgactatgttagcatctagtagttcaataagcacagcaactaacttctgatgagtatgtatgtatgagtatatacatatacttttttactcaatgttcacttgatgctaaacctatcagagcatagacctccacgacactaataaacaactggataatatagtggtgcttcagtgagcagatcacaaatactctcccgcctttttaggagtagtgattcagtgagaacatttggtaaagcagacgtgagtatacatacatccaatatatatgtattatccatatattatataatgtatatattatatatggatatttatattatctgtctatgcataatatatacatactatatatatgtatgatatatgtattgtgcttgttttagttcctttcccttaaaatgctaatctgctgtttaatgaattggtaaattattctgagaactcatgacactgtctgaagaactagaaatgccctctagtgttgccaacagcagagtttgtaatgactgctgtcattatttaaaattcatttataaaaagttaattcaaaggtaaacaaattatttagtacatgttgaaactttatttaaaaaggaattttaatcaacaagaaaatgtctgaaaatgaggcacactaaaggaatttcatgtttcccttgtgaagttaaaaaacattacacttgacattaatgaaaagatcgcaaagtgatgcagaaacactagataatttatgtgggaatatctgagaagccttgaaatagtacatgtaaaactcaatttgaagggcattatacaaaataatttttagaatagaattcttttactcagtaaatttggaaattaaaaccaccttaatgaattcctctcatttcaatttgggaaagaaatattggatggccatgtgtgtatacacacgatatatataataagggtactgagatgctaagatggcctcataattgtaacaggttcatatatctaagatacctctgtttattagtggcagagcaggaactagtggcagagcagtctcacattttgtgctttaagtattctttacatggctcttgtctccctagagcctaagtagaaggatagcataattcttttaggctaccatgatactatattaatagctagtggttttcaatagacaactgttgactggttacattagaactaattgtggtcatgggaaaccatacttgtagtactgaaataattttctctcattcagcatcttacaatgaaaaaaaaattctgtattgcaaaaaaaaaaaaaaaaagacactaggttataaagtatctctagatggcatctctagaaagcctttgagtgactgctgaaattcagctaaagaggccccaaagcttagatgagaatttcacggactttttttttgtttagcagtaataataaaagctctttacataccactctgaaatatatattgtatgtattttaagcatcatctgcaattatttccgttggcacaactttatgaatgaagcaggatatttttaagatgaggaaattattattgtaattattaactaaaacaacatatggagccctttctatgcactttccatatgctagatactcttctagcattttcatatatcaaataatatatttttccacaagatatatactcttattatccccattttacaggtaaggaaactgaagcacagtagagttatgcaggtttcctaagactgcaaagctggtaagtgtcagagttaatactcacacccaaccagtatgactctggagcccaacttcttaactattacaacttggtagttttaaatgtaaaactgcttcatataattgtcttaaatgacgtttataatgtatataatatgcatgtgtttattctgctcatattcacgtttcttggtatctcagaaacctgcagatctttccacagcagtttctcattttaaataagttatacaaataataagaactttttcagtctctactaactgcaaagaacgtcagtctaatttttacatcaaaatgaacaacctcatttcatgaggagtatgagcggattaaaattaatatactacagatcaattgcaaggtatacttaaggactgctttgtttttataatatcataagccactatactttattgtaattacttgcttaatgtctacattccctgcaagacctatggcatcacatcagtcttatgcaatgactgacatacagcaggttgttggtaagaatatactgaatgaataaatgtgatttgctattctatctgttaaatttatttaataatgatctcmctataaatagtagctcagtatttttagtaataactattgcacataaagttttacatatttataattgtcaatatgatgattttacgagatgtgacataaatttccttcaaataatcctcgtgacttatatcagcaggaactccttctttttaacttcttcataacttctgccaaattcttaagaatggatgtagaaaggcaccccattttatttctacatttaaaaggttctttctcatattgaactaaaaacattattttcctttccatatctataaacaataacttttatttaaatttttctcattcgaacttccaattcatttcttctaacaccactgtaattcgcaactcatttcttctgasagtagaaactgccaaattcaaaacaaaagccattacactccaacatacacagccaatcagacactgattatttcctatattgagaagttatataattaaaaactgatgactattggtagaattttgttttagaaagaagtcaattcaaattcattttgataaaagaaatgctatgtatcatcctccatctgcaatatttacataattatgtgtcttaaatatctttttgtggctaaataccaaattctccactgggcatcatgaacccatcaaagccaactaaacagaaccaaaaagagctgtcaaagaaaaatgaatatcatgtacattccaaagcacgttacccaggaaggaatatatttcttcaagacactctttctggaaggtatgggaaggacatctttctcctagcactgacaagggggactgcctggatctctaagttgagatcttcaaatcagaatacttgaactcaggttggtgactttgagtatatccagaaaaaaactaaatttagaagtcactgcggagatgaagcataaacattcagacatccaaatgctctttggattttattttccaaaacgtaatcaacatgtatgcttctctgtgtgtgtgtgtgtgtgtgtgtgtgtgtgtgtgtgtgtgtgtgtatgaaaaacataaatgtcacattcccttctttaaaaagataaaaagatataaagttgacttgattaaggaaaatcatactacctttaaaaatgtctgcatgtaacaattttaaattcagttgaggaaatcagtgtccctcttcagggctttccttcttgaaatcctgtaagaactctcccgtaagtgaaattctcacgtaagaatgctgctttgacagggttttgttgtaaattcttaagaaatctaagaaaatagaatagcagcataaaaaatgtatttctctatggttagaatttagtctttctgatgcctagcttagcagatattaatagaattaactttaaaagttcaaaagcaagttatcaattcaatctaataaataaatgtgtaggttctgtgctttatttatacactaactttattgttcctacccttataggaacttatgccattttatagtattggttccagttgcagtgtgtaattattatctacactgtaattaccattggcactggaagttcaataacagggaatatctgtttttaaccccaccattttattctcagcacctacctaaatgggtgacacatagtagacagactatacaagtatgaattactagacagagggactaaagtatgaatgttgccatctcaagtacttagttcactgtaaacattggaatgattacataatgacagatgctgtgctgggtgcttgtcacaagagctcttcctgatatgtttgttattaagctctagaaaacagctaagaacatggccagattcaattaacataattttgacatctctaattgggcatgaaaaattacttaaactatgtgaatcgcaaaaatcacgtatttgacaatagaatggttaacagaattataatctattattaatatgctaatcttcatcagccattaccttgttatcacaaaactactatgtccgtggacatgctggaataatctcagataaacatcaatcttaaagatttcaaacttgctaagatcctacctccactcttgtccaaagctaacatgactaatcatggatctgattggacacagatgcccaaaaaaagggatatgcaggaatcaaatatattcaggagaaaaatataaatttaaggtcatctgaagtatatgaaaatgtaaccaaatttagaaattattttctcagtgggagtatgtgtaaggcaggagagagatgtctgattttatcaccaaaatttgattctgcgccatattatgaacagctacttcactttgttttgggtatagagtataaacgtcttatcttacaaatttaatagtttccgccaaagtatagtagcaattatacatttttaaagaactaatgttaaactaaatggattttgtcatatgatattatacttttttctttcctattttataatgaaagtaaaaaaccaaacagcattcaacagactaccacaaaatgcatgtctattttaagaagcacttatgaaactgaacagaaaaactcagtttagtacaaattttttagaagttaaacttcagtcaagcaattttataatatactattttaaataactacaataaaactacaaaaattgaatttttaaaccagacatgaactatataattgattttccatacttttatactatttatcaacattaagtatgtaaaatctcttatctataaaaccattctttgcatatattttattaaaatataagtgacagacatataaaattcaaacacttgtcattatgtcctagattttaaaagttctaaaattttaattcaaatataatacattggtaggctttacacacacacacacacacacacacaatttaaatgaaaactcttaccattgacttccttttgatagtcactccattagtctttcttgatagtgctttcctatgtcaagcagacagtagccaaatcacaaaatgacatttggatgatcatgtcttcagatgggagttttcggccaattgccagttgagaatttaaactgaaaactaaattacccaaactttattaagttgttcccacacccaccaactgataagagcaataactctaaactggaaaataacgtgaatatgatttgcctcctgttcaagcagtcctaatattatatttgagaagacatgctataataaaagaatcccataaaattctagtatcttctgaaaacgcttttaagaaaatttcaatccctcaccaaaaagttaccccaattatcctataacccaaattaatacaagataaaaatggtattagattatataataaattattgagtcacaaacttaggttctgtcaagcactgccttcacctaaaagctaactgtaatgtctggaaacactctgacagtatcatctatatttatatttattaaatcatcaactacttgtaatagtacataccacaagaagttagaggttacactttagcgtaatcctgcctgatcatgatactttttgtactgggaagacaaaatttatcgttaccaacttctaattataatataaaaatgactcagctccttttctgtaccaatttaggttctttttctcttgattcttacggctactcttcatagggcctgtcatttatatacgatttttgaccataggctttatgattattgggttgtacagtctgttttgatccttctcaagtattagacacattaaattattcccaaatgttaagatatatctcagtgtcctaacatactttgtgctcagctataagttggcccatttcaatagttattgacaatttaagtctttagcaaaaatacaatcaaataaagctaaactgaaaacatgaaggaaagaaaaacacgtccttattttccttaaaaaatgtttctgaatttcaactataaaaggtgcaaaattaagtgtacataactagatagctatgtaagactcagatgagttataaacattacacacacctcaaattctcatatattctatgtgcaatccttctctctctctctcacatacatgtgcatgtgtacacatgcatgcatatctatccagcctatttctgatgtttacctatcaataacctgataccaaggcattatataagagaatataaagtgaataatccacttatgattaagagaaactgacttcagaaacaaagcctagagcttaataaaactgctatgtctttgagttaataacactgaccctcagttagatatactagaaatagcattattctattcattccaataatttaaatccaaaattctcaatagcaataacacttataaactattcagagactaacaaagttctttcctgggtgctatgagatataaaggaaaggagcttataacctaaaatatgatgggggagagtgagtggtacataaagacacagaaatggatagatttccaagagagaaacaagcacattgaggcagtttaatagtttgaatagatttatcacatgtgggactgatctgagaagactttatatcaagaagcattttttaaagcagaaaatacataacgacgtttttcttatttagcctaatgaaacccacaaagcaaactgtgattaatacggaatatagctatggaagtattcatgtcctcactctgggagaagaccaaagataaattccttagtcaaatgaaattacagaacacagagatatctcctccaacaacccccaccaaaaaataaggctttctgtatttcagaaacaattctaaattgctcatttcaactcttcccaatgattccaatcataatggctgtgatgtaattataaatcaggagacataatgaaaagtcactatcagattacaaaatcatgaattaaaaaccacagaatgatcctctcggtgtgaataacattactgataacacatctacacaagaaagctggtttcatgttccagcagacgatgatcatgaagtgacttgtgtttttatataatcttaaatatattctactcatccattataagagtcttacaatttggccaggcatggaggctcacgcctgtaatcccagcagtttgtgaggtcaaggtggggaagactgcttgaaaccaggagttcagaccagccttggcaacaaagcaacacccagtctccgcaaaaatttttttaaaaacagtcttagaatttaacaccacacacaattttacaaataaagaaacaggtccagtcatatgacattatttacccaaagtcacacaactagctggcagaaaaatcaagacctcttaagaaccacagatgctccttttactataatcaaagaaagaaagagttacaccttagaaagagatacaattttattaggaaaatttcaactttttaacctacatactcaatttcagacattcacctcattagctccggaaattgcaaaaagtcaattcataaagttagggaaagaaagttgtatgattaacttaaattttacacttctctttttatactattagctttaagacatacattcaaccttatttccaactcttcagactaagaatatgagttttaaaaatacgtaaaatttttatcaaaactctctctaaaaatggtaattccctagaatgttccatggcatcacatctatttttcgatctcctgacctcgtgatccacctgacttggcctcccaaagtgctgggattacaggcgtgaaccactgcgcccggccatcacatctatttttctttcacatcctggcaccctttttcattggattgggtaacaaagtaagcctgccatatggatatcagtagaaacagtcttatcttgactgcttcaggtgacataactcatcccaattctatataaatgagcagccagagaagttcaggaaatttgtaaacaggaaatataaaaagaaatatctgcaaatcatacatttaataaggggttaatatctaaaatatttaagtaactccaacatctcaataacaaaacaacaaataacccaatttttaaaaatgggcaaagaacctaaacaggcatttctcagaagacacacaaatggccaactagtacaagaaaaaatgctcggcatcactaattactagagaattacaaattaaaaccacaatgcattattactttacacctgttagagtagcttttatcaaaaagatgaaaggtaaatgttggacagtgtgtggagaaatgataactcttatacagtacattgttggtgggaatgcaaattagttcagccattatggtaaatagtatggaagtttcccccaaaaaaactaaaaatagaactactgtatgatctagtgatcccacttctggttatatagccaaaggaactggagtcagtatgtcaaagggatatctgcactcctatgttcattgttgcattatttacaatagccaggatacggaaacacctaagtgtctatcaatggatgaatcaaggaaatgtggtatatacagacaatggaatactattcagcatttaaaaaggggaaaattctgtcatttgcaacaacatggatgaatctggaggatattatgctaagtgaaataagtcaggcagagaaaaacaaataccatatgatctcacttgcatgtggaatctaataagattaaattcatagaagtagagaatagaacaatggttaccagaggctagggtaggagggtggtggggggagttgatcaaggggtatgaagtttcaggtagagaggaagaataagtttgagatctattccgtagcaagttgacgagagtcaataataacgttttaagtatttcaaaataataaaagcaaatttcaaatgtctcaatatgaaatattataggtgaggtgacagatatgttaattagcataagcacatcacactgtatacatatatcaaaacatcacattgtaccccataaatgtatgcaattatgattggtcaatcaaaaatattaattctacaagaaaaataaacaggagattaaaaaaagaaatagttgaaacactttagatttagttgtaaagatatgtcctccactaactcaatttagattccactgtctgttcaaagtcagaacttacaagatgtttctagcaaagcacaacatgcttgttagttcaactggtttcaaaagtcagagcacttattaggcaacacctaaaatcattcatcaaaattattttggacaggcagtgatggtaaacaaattacttccaccataccaccaccacagccaccactttcactccctactccacttcccatagtctatgaactaaaagggaacaaaatattcttatcatttattattaaaaagataaaatattttagcatataaaaccaaatttatcttatgctactaaaacagaaaataaatgcttaacgagttttacttgaattacattaaatcacaaagtaacatctcaatacacacacacataatattcaggaaaaaaatttaaaaaacaacaaaacaataaaaaataatacaaataaaaatcaatataatagctatttacacagcatttgtattgtattaggtattataagtaagctagagatgatttaacgtatacaagaggatgggtgggtgcagtggcttatgcctgtaatcccaacactttgagaggtcaaggtgggaggatcgcttgagcccaggagtttaagaccagcctgggcgacacaatgaaactctatctctacaaaaaagttcaaaagttagctgggcatggtggtgcgtgcctgtggtcccagctaacttgggaggctgaagtggggggatygattgagcccaggaggtcgaggctgcagtaagccatgattgtaccagcgcactcaagcctgcgcgacagagcaagaccatgtctcaataaataaataaataaataaagtacatgagaggatatgcatagcttacatgcaaatactgtgggacagtatttggattttggtatctgagggtgtcctggcaccaaccacctgaggatactgaagaatgactatacatatagacacacatccatatagagtaaatatatatgcatctacgtgtgtatgtctatgtgtgtgtgtatatatatatatatagtatataataaagcactcttcctaaaatcatgtattttagaaagtgtaattatttaaaaattttcctcaatgttctacgtttttgggtgcatgcttactttttcaccaagaattgtgacaggcttcctaaaagcaagagcaagtatctatatttaggtctagttgttgaagtattcctatatagagtcagcatattgatacttcaatttatataagaaccagtttacattcatatcattcacatcacttaaagcaatcctttagaaagtgagtttaaaaactatcaaccaaaaaaatatgcctcatccttttcatggattcttgacctatttataagaaagtcattttggcgacaagttacttaatttatatctgccacagtttctccatttgtataatgaagataatagcgtattaccacataggcttgctgtgaacattaggttaatagttgcaaactgcctagaaaagtgcagtaagtacatcataagccttcgaaagcagagctaatacaatcatcatcatcatcactaccattatcactactaccaccaccttcataagcatctcaactgattgttagtaaaagtgtagagtcctaggccacactcccagagatttcaattcagtatcacaccaaagttggggaatattgtgttaaagagaaaggggaatagataaatagccaagacactacgtataccagtatcatcttataaatacagtaacgggaagcaaaatactttaaaacagaaaaagcttcagttttaaaagtccagtaacacctttacttcctcctctaaaatacacacaacttatccccaaacccagtgrttgctttccaatgaccctactactcaagagtagataggatacagaaataagtaagaggtcccgggctcaacaaagagttgaagaagcttatatacttcattacttcttggatagagaatagctagcaatttcacacaaaaatatttgtgagtagagcaattatcaaatatttgagcactaactgtatgtggaatgctaaaggggactgaactataagacattaaactttcctggaatcgcactgggaaaataacctcccactttcttccaaggatcactgragtcttgctccagctcaagcagtatacgctgggaactcagagaagagattttagttagggtcgataggaaggcttcatagaagaaaaagatctttgctagacctcataatgactaagatttttatagatagaaattgcatttcaggtcaaagaaaacagtgtgagcacaaagcagaaacttggaagtactacaggtatttcaggacagtacgttgaatatttgccaacactggaaaggatggttttattctctgctcaaaaatctaattagtacttcaggaagattgttttagcaatggtgtacatcatggggtatgttatgatagtgtaaccctggctttgaaaatggacagagacaggaatctaaaggattatttaaattatggccaggcgcagtggctcacggcttctaatcctagcactttgagaggctgaggtgggaggatcacttgagtccaggagtttgagaggagcctgcgtgacacagcaagaccctgtctttacaaaattaaataaaacaaaacaaaattaattaattggcagtgaggacaaattaggtatcaaagatgatttaagtattatgtctgtttttttctggaacttcccagtctgtcctggtatattcaagatgaaggagatggtagacagtgagagctataaaaagtaagttcagggctagtcagagagattttagattgggggaaaggactaacctgtgggagcaaaggtagagagcagtttgagcaaagacttgaaagcgggaaagtgcaaacattattctcaggttgattagctctgatttgctagagccagcagctcgcaactgccttttctttccaatgcatcaaaaggccctaaacgtgttactgaggaagaaagaagaggcaaaacggtttaatgcacagaatgcctgtaaatgatggtaacctggagtttaaattaaatattaaattatgttccctatattcagtagagcatacaaatgtatttcgatatagctgatcatgtaaaatgttcacaaatttggcctggccaacaacaaaaatcaacaataaagctttgctatattcaatctcacccctactttttcaaaaaattttaataagcaatttttgtggaattcattatattacacatatggatcttctcaatcgagtgattcatatgactgttaaatagctccttaaagatagaggccatgcttttcttcttttttccctctggtactatcaaaactcaacagtataaggtatggatttagtatacttattaaatgaaagatatcctataatatgacctgtgaatggattaaataaaaggtatgtacagttataaaattccataacaacagacatgcaatttatttttttattttttaacttcttgccttttaataatatctttgaatatagatggtttcaattctccaataacaagatgtagagtggycaaatggtttttcatacatgtttycctagtccagacacccaaragtatgtccctctcttgggcataagaaaacctagagttatatttagggcatcatgtgtggtgaatagttgaccaagctggcatgctcacaatgaccaaattatgtttgtcatattttaatccaatacattgatctactatgaacttgtaaataatctatttgctttctagacacattccaggaagaccagagaaactgacttttatccatatggaataatccactggcaaatttcttttaggacagaccaaagctgatctataacataatctttacatacttggatccttcccatcagacgagaaagaacatctggggtgaaaggctccattagaagagcaatgtgggatggtgctgtgctgacaactggtagttcctgccctacgtctttgtagaggactggagcccagagcatgccatggtcaactcgtatgttgaagtgaagacctccttcgaggtgtgcatgtgcttattacagatatgccayggtgctaagtaccccaggactacakgaaaaaataagaatagatgctgtatccatgatcatgaggcacacaggccagagcgccagctgtggaatcgcacagcctgggttcaaagcctggctgggccatgaccacctgaatgacctgaggaatggtctcaggcaaatttgtaaaaagtggagaccctgcctgccagggaggcatgtggtaagaggtgcatccagtcaggtcagggcactgcgtcctctctttggaaacctgcggagcaaggctggtggcccttgaggccacggcagccatggagaaggcgggcctggctccaggtggcacagaggcactggagaggccccggggaagcctggcgcgatctggctggtcctgcgctctgcttccaggttctggccctgtaacctgggggacagggccggccaaaacagggccactgggtgctagccagcacctgggccaggcgccaggtggaagggctctggcggatcagcctcgcacccccaacagccccacaggggggcccatccagggccacacacttgcccccaggagcaggatatccctgaggctagagtccagctggaccggtggaagggtctcaccctttgccctttgactcctcttgtaggcaccctcgctgggctcctaagcactcctccacacactggctctgtcaccagccccatagtgatgtcataaactcccagatgcccagtgtgcacccagccacagagaagtgggtgacttaggagtatcctctccgcttctgacccttagtttcgtctgtgcacaactcactcaaaatgggcaactcgctaagcgtattttgttcctggttctgccgcaggtcctggccatgccatcggcaacctgctcgtcttgtccgtgaggccttcccagctggccgggctcaccctgcagctcctgcacctgtgcctgcccsgggaattktgggccgtttcccactcctcttcaaccgtcagcgacatcttgggccttcttttccagtcaggtgggayggcgcccctrtgaggctgtgtcttatccctcrgaacacgggcaccccacagagggtcctgcstcctgtggtctggagccccccctcaaggaagaaacccgtgctgtctcctcacaactccataatgtttggacacctcagccccgtaaggatcccttgtctcagaggcaagtttaaccttcaacttccttcattagatgatcaggtgatcccagccaggctcccgaagacggaggtgagcgcagaagagcccaaagaagcaacagaggtgaaagaccaggtagagacccaggggcaggaggacaataaaaggggcccctgtagcaatggggaagcagcctccacctctaggcccctggagactcagggaaacctcacttcttcctggtacaatcccaggcccttggagggaaatgtccacctcaagagcttgacagaaaagaatcagactgacaaggcccaggtgcatgcagtgagtttctactccaagggccatggagtcgccagttcacacagccctgctggaggcatccttycytttgggaagcctgacccacttccaacagtgctccctgccccagttccgggctgctccctgtggccagagaaggcggccttgaaggtgctgggtgaagaccacctgcccagctctccaggcttgctgatggtgggggaggacatgcagcccaaggatcctgcagctcttggatcaagtaggtcttctccacccagagctgccggccacaggtcccacaaaagaaaactgtcggggccaccgctgcagctgcaaccgacccctcccctgcaactgaggtgtgatagagacgagcggcccccaccggcaaagcttccatgtctatctcctgaggcactgttggtgggtcaggcttcccaaagagaaggacgcctccagcatggcaacatgcgtaagaacatgagagtgttaagtagaatatcaaaattcaggagactaagacagttgcttaggaggagaaagaagacacggcagggcaggcgtggtggctcatgcctgtaatccagcactttgggaggcccaggcgggcggatcaggagatcaagagattgagacctgaggagcatctctgcctgcaccatctgggaagtgaggagcgcctctgccctgctgctccaccatctgggaagtgaggagcgcctgtgcccggccaccgcaccatctgggcagtgaggagcgcctctgcccggcccccgccctgtctgggaagcgacaagagcctctgcccagcagcctcacagtctgggaagtgaggagcgcctctgcccaggccctgccccgtctgggcagtgaggagtgcctccgccaggccgccgccctgtctgggaagtgaggagcgcctctgcccagccaccgtcccgtctgcgaagcgaggagtgcctctgcccggcccccctacactctgggaagcgaggagtgcctctgcccggcccccctacactctgggaagtgaggagcgcctctgctcggccaccgccccgtccgggaagtgaggcgcgcctctgcccagccgcccactatctgggaattgaggaggagcgccgcctctgcctggcctccaccccatctgggaagtgaggagcacctctgcccagctgcctcacagtatgggaagtgagaagcgcctctgcccagccgccgccccatctgggaaacaaggagcgcctctgccccgccgccgtcctgtctgcgaagtaaggagtgcccctgcccggcctcctcaccgtgtgggaaatgaggagcgcctctgccccgccgccgccccgtctgcgaagcgaggagtgcctctgcccagcctcctcaccgtctgggaaatgaggagcgcctctgccctgccgccgtcccgtctgcgaagcgaggagtgcctctgcccggcctcctcaccgtctgggaaatgaggagtgcccctgccttgccgccgtcccgtctgcgaagcgaggagtgcctctgcccggcctcctcaccgtctgggaaatgaggagcgcctctgccctgctgccgtcctgtctgtgaagtgaggagtgcctctgcctggcctcctcaccgtctgggaaatgaggagcgcctctgcccggccaccgtcccatctgggaagtgaggagcgcccctgcccagccgccgccctgtctggaaagtgaggagcacctctgcccagccccctcaccatttgtaagggaggagtgcctctgcccagcccctgcaccgtctgggaagtgaggagtgcccccacccggccccctcaccatctgggaagtgaggagggtctctgcctggctgctgtgcaaccttccaagtgtgaagtgacagccttgtgtgtgatctttctgccctccccaggtttgcattttcgacattaaagtttactttttaatttaaaaaaaggagatcaagatcattctggccaacatggtgaaactccgtctctactgaaaatacaaaaattaggcgggcatggtggcttgtgcctgtagtcccagctactcaggaggctgaggcaggagaatggcttgaacccgggaagtggaggttgcagtgagccgagatcgcaccactgcactccagcctggtgacagagcaagactgcgtcctgaaacgatgttgtagttgagagcaggatggtcttttgggacaggaggaacaagaggttctggttgccactcttcaatcagttcttctttttccttgactgtaagatcagatcgttcttgtaatttgtaagtcttagagaaaagaagtctgattatccagagtatcagaatcccttccaaaataagatggtaagcaggagccttgtaaagcgcctgtaccatctccaccagaacccactgctccgtggcggtcgccatagttagctgcttcctccagacatgcaatttattagagcatccatgcagtactgtttcaggttactgcagctcactgtaacgccactactgtggcactagtaaatgcaaaatggccttgagaactctgtgagattttactttaagtgtatatatgatttctaggtatttacctttgcatttaaaaaaatcactcactaatttacgaactctctggggatattcataaaatatttcaacgtgattagactcggataaaaaaactgttttccatgtttatttaaaatatatttcttgcatctaaatttatattttcagtctccaaaatatttcagcacattttattcatctgatccactgaattaaccaataatatcttgtcacataccattcatttctgaataattaaagagatcttaacagctgtcatattttagggatactgaccctttaaaccttatagcatcatactaaaataggcaaataccatttccaaagtaagtgggtcatttatcttaaagtataaggaaaggaactagcatttgttaaaatacctcctaaactatatccattatatttaatccttacaaccgtgagagatagtatatacaaacccattttgcagttgtgaacttgcttaaggtctcacagctattaaattatcctgttttaattcccatcatgtttgtctagctccaagtctamgctcatccttcttacaataactacctggaacactgccaagtaccatgttaaaaaagagactakggcataaaggggcaggagcaggggcacagggcaggacttagtgaagtaaaagcaaacattgtaaagtccaagtactttactcattgaagtgctcttcaaatctattatgaacattctttctcttactttattcacagacacccttctctgtacactagtagctatcagaattaatatcaagctttgaaaaaacagacactttatacaaatgcaaagcaacaatagctactgagaattatttttgaaaggacaaatggccctatgacatacctcagtagccctgaggcagtgtcttcctgaatacactgtcttaagaaattttcatcaacaatccacagtcactatattttataacaagaggggttgagattaactattctagcaatcaaagaagataggtgtttgttatctggaaaatttactaactgaatgtccaatgatgctatgaataaagatgaataaaattttgatttttctaaaaaaattcaggaagtatctatggtatcattttgtactttccaaacagaatagagtgtacaaattataaatatagttaataacatcagttagtaataaacataattaaaagcattacaaacatagagaaaaatattaaaaattccaaaaggtataaggttcttaattttaagaacagaaaaaccatggttcctgtgttaacagaagctggcagtaaacatacccctttcaaagttaaaagagtatttcagaatggagttttagagcctatagcactttataaatgaaggtggaatttttgttactccaatgtactcctttcttctttccctctctttccctgcccttacctctatatcataacacataagagttctcattttactttaagaaaaatgctatctcatctagtataaaaaggtgagacaactttgcattttaaattaacatagggtctttaggagttttgaggatttcaataccaaaatgcatacaggttggatctttaaaaactgttacagcagaagtgccaaaacacagtctctctagcattttgaacaaggtttcacaataattagcactgcagtaggtaatttaacatgtgtgaccttttgtatagtaacaattctaaataacagccaagagcacagtcatttatttgtttgttaccttgatttggggcaaaacgacacaagaagaccagttctacacaaagaattaacacagtactgtgctaatataagtaaataaagtttagttcaaagagaaacaaataataaaaagtcaaagagagaactgagctggcaactgagaagcataaaccattttggcctacatttgtttgtaatgactatgtgacccagatactaaaatatttggctaacattcagaaatctagcaactgaaagaaataagatatatggttggctgrttaaatattttagccaaaataacagattcttaaaatcatgcattattatagtattttctacacagaaaatttttaaactttaaaaataagtatttcttttttgctttgtaaattatcccataaattatacttcacctttataatcagacaataaagatgacactatttactacagaggttatgatacaaaactcctttggagagaagagctgagagaaaatatactttttaaaagtaatttatttaagaaactgtattttcctaaactatctttgttccatttatggcctgcatagtttactctacagacaggtgtctattaaatgagaagagaatttttgggaaaaaaaaattcttcaactccgaactatataagctctgctaatgagggtgcttgaaacacaggagtcagagagtagattcactagggactcgacttcatacttacaggcttgatgggggaaggtggtgtttcacataagtaaaaaacgtaatacacaatccttaatgcaactgtggtggaccatgctgagagcctatccaacgcttccttcttcctaatgatccatgattggatttctatatccacatctctcccagtggtcaatgcgcctcagggtaagctgactgtcctgagctgcaagggtagaccacaattaatctaatccattatggtaagctcatcccttttgccaacgattagttaaggcatatttagaattaagctaatttaggacaataaggagcaagttgggggcaggagtgcataaggacttctcagagaaaagaacctatattgcccatgagaacgccaagagaagtttatttctctctttggatctgaaggaggaaacacacaatcctgattgcagccagcagccatttggcaactacagtgttgggataaaggaaatattatggataaagagtagagtagacgacaaactgagtccttgaaaaaaatcactgagccactggcgtaactaatcctaatatatgtattttcttatgtgagctaaccaatattctttttatttaagccaaattagactaatttggaaactaattagctattaggaaactaacaattgccaagttctattttcattacttttagaaaactttagaattttacccattcctagctttaaaaaaaaaccatatgctactttttgtatattttcctgatttcctacagtgattgtgtattacatgtgctattgggagcagagttattcaatcttagtgtaccaatatgacctcttcttgatcatcagtataaaaaattatgcttttagtctagtaatgctttcaggggcccatgatgtactcagatcgctatgttcttatagcctgattttgctccaatatcaactgtctcttgttcctgctgtactctgctcacaacagtttcagagaaccactacactctcatctacagttcattggttctctacgccctgtgcattctcatcctactctgagttcccagttatacacacgcagatggctgaagttgctagaagtatgttctgaagcatatgaaaattattctcaggacagtgaatttctttttgaacttagtttaaaaatataacctagataactagttttgtacttcttttaaaaagtatctcatttatgccttcccttcctcccttcttttggcattcacttttcctagaaatacttttgacctcttacttttaaatagatattgaagatttctatatggtcaaggctataaaacaacagcctatgggccaaatatatttaacaggtcgattttgccctgtagagttattgtcacagagtatcttaaaaacacctaaattaattaccaactaatttacataaaaatctgtattttaggatcctttggaaaaactgaaatattgggtaacaatcagcctgaatactcccatgatcaccatcagatggagcagaatattagctgtccctctactcagttagatgagcacaaattctctaaagccccagtctcattattatttccctaaatggcctaattctttatagttaaggcccgtataggtagttgactatggtatccctgatacaacaggctagtaacagccataggtacatgaaagaaataagattggttaagaaagtacagaagttcataaggaattctgtgaagtctgtttccaaaatgtttcctccggcatcttttaatttaaccagcagtctatctctagagccaatgatccagcaataaattctctgaataatcatgaaaaaagtgtttcttaatagaaagctatttgaaacaaaagggttaaattcttcatgtaagtttcaatcaatcaaccaataggaaaatcctaaagagtcaccttccaaatctgatattcattaataagtggtgtaaacaagatgacctgcacwatatatatatatatatacacatcatatatgtccaaaattacttatgtgttttatgtataaatcaggaagtcaaattatcttttaaaactaagttctccctatactccctatattagttaatgaagtcaaacaataacaagaattagcacaattcaaaaattattttttaaggaacgatgttttctaaattatatttataatatagtcacttcctcctaacattaagtacaagttacctgaaagtattttagagataatcttataatcagattctataggtggaacaataacaatactattaatagttttacatttctgtcaaatacaaggctttgttcacatcccaaatttcaaatctattcccttctctccagctccactgctgtaaccatcatctccaacctggcctaccgaaatagcatctaacaacaatgcttctatatatactatagtcagactcatgattttcaaatgaaaaatttaatcatggcataccccgatgcttaaaacctttccatggtttcccaatatcccttaggatataggtcaaaaaatcctgaagaatgcataatctctttcctacattcttctctacatttacttatccttcttttcaacgctcacactggaatcttttcagttcttccttttacttttgtagatgctatttctgttgcctgcaatgttccatcctaacccttctcctaattcctaggcttaagctaactcatgctgattcttccaatctcagcccaaaagttatttctcatgtcctaccctcagttcacattcaacactcccccaccatcccagagcaggttaagtccgcctgttatattctttcctatcatcttacaatttctcccttaatgctcatcttagttataattatttgtttagttccaaagctgctggtttcgtgaggacatggaaagatatctgtcttgtttactgtgttacactatcatttaacacaatgactggcaagaatagcatttaataaatatttgttgaataaatgagtctcattaaatcaaacccacagataaatgaattattgttgaaaatgcagcatagtatacagcacaaatatctggaagtcctgaagacctggttcatgattccaggtggactacttgctgtatgactttagggctcaaacacccagattctttaccttaataagaatattatccaatgcctgctctgtcttccttaaacagctgctgagagaaaaaaaggaataatttactttctcaactcttaaagcacatttttttcacagtaacatttttcaaatcaataggagtcttaccaaagatatcaaaagaacttttaataacaaaggagatactatacaaaatactataatgctttgtattacacccacgtgtattattgtatctctgtgtgaacttagacatgactaagaatttaccttctgttcacttatcagcatcaacagaactatgcacagctaaattttaacttaatttgaaatccctaaattacctcttaaaatgtcttttaaagatcactataatgcagcattgaaacaaaaagttattatacatgcagaactttctgtgacatgtggctgaattatgtttaatgaaggtttcacaagtgataattctgagcagataccaaatatctggctgttaaagtcttctggatgactttcaagagaagttatttaacttctagtgaaatgtaatataattagtaaaaaaattttaattaaataggaaatggaaacctcgccaaagtaattcctggacatggctcagaacgacactatcaatcctaaaagtgttaaagatcaggaagagcagcatttgctacagtgcctatggcccaaaggaattcagaataatccttagaaaaattctcctcctcccccaagaaaagtgttttatttttccaaaaagagacattaaaaagttgttatgaaatcaaagaatgtgccttacaattgatgagcttttagaatcgagaaaatatagtaatatgcatgaacatattctttaaattaactgctatacaaacaggtaattttaaaggtgcccactttgtgctaagtacaaaaaaagtgctttatataaaacttaaaagcttctcccaaagtcacttataaagtcagtgtttgaaaatgaaaagatgaaatgggattccaatatcattgtttcagaagaaataaaatgttccccctaacgctgaacagacagacttgacaaaactaaatccacttcttttgctctgttcccactttaagcactgcccacataattcataacactgtcatttgttaaattctttaaaatattctgagaaactaattctaatatctaatcactagcatccaaaagttctttgtgtctatcctcattctttcaattattatattcaatgtaatatttcacttgattttgtattttgctgatactgttttaagcaatattcacctcagtcttatcttcaagaacaaatcaggacatgtgctttcagttaatcttctgtaagtagtagtactggttttctgtgactccttctcctggtgaccaaaactatgtattgccaatatgacaggttggtggtgctggtgactaatgagactaaaaccaacaaagctgactcataatcaaacctttgactgtgactattcagtacctgttttaaaatattttatctctattccttctttagaaatgatcattggaaaattatctctttagacttctttctctgattcagtatcttaatctctttggctaggtacttgtcaatttgatcataaacaaattctggaattgacctaaaaagatggcttaggaaagctgtaagatttttctgcaaaatagaaggtagaacagaatgtagaactatggcaaatagccacttgtttctaccaattagtagctcattacattgtgagtagcctatatacagtggtttataaagaattctagcattagacagatgcttgtattagaagatctataaattatgttaatgttataaactttattcagattggaactattgaactatcttggtaagacaaagactttagatgaattatgatttatctttaaaacatacctttaagtattataatcacaaatataaaaattaaacatgagggacatgggaaaagaaacaggatgggagtaatggaatttccagcactacgctgtgtacttccaaattatctcacttaactgtcaatcctgtgaggttgatactactactgtcatacagatgagaagacagtggctgatagctcttaagtgaccctagtgtaaatccagtggtcaaatccatgtgtgcttgactataccagtttctgaaatgtggtaatggcaaatacccatgctcagcaaaaactgcacttccttgtggtagtttgcatttccatagatggctgcaacaatacatcccaaaccatttgctcttctacagtgtaatcttgctactccatctttaacaaatgaagcctatttctcttcctgttgatctgggctggccttgtgacttgttttgatcaacagaatgggcagaagtaatgctaagtaacttctaaatatggccctttaaaaggctgcagcttctttgcccttggaacatttctttttggaatccagctaccatgttgtaagcaagcccaactaacttcacagagaggcacacttaaggagagctgaggcacccaggccacccccaactgtgctccacgccagcagcctgcatccactgccagctatgtaagtgaggccactgtggactgccctctttcctagcaccccagccaagaccacacaaagcagaagactcactcagtcaactctcaaaattatgagaaataatgaattactgttgttttaagccattaaactttggggtggcttgtcatgcagctactaatgaagtgaaacactcaccatcttccttagaaatgtatttcaacaatgccagtgttggcactagaagggccaataagaagccaaatttttgtttttttgtgactaccgaaatagaattatggaaaatcacagtaacgcttaaatttcaataattactaaaagttacactcattttacattgaaaaacaacatggttcagcacttaaaatcacaatgtttcataaaatcacaatgactttggataaatttaatactgagtgaaacactaagtcttatgaaaataagggcaacgcttaaaagtttgaaaaagaaaggcaaataggtaacagaataaagtctgattatatcaaaataaagctcatatatttgatttgtatcctatgtattatgaattatatgctttacatgtattatatagcctatgtattatgattatgggctatataaagaattagtatacagtaaaacatactacattgaattttactaaacataatgttttgtcttatttagaaacttctttaaagataaacattgtatttggtgaagtatcagtataccagcaaaataytacttcataaaaatttccagttgacagaagtytggattacagtccgttgccttattttaaatttctgttatacaactgtaaaagtcttgttataccatgaaatatgctgaatacatgcagacttaaaggaatatttttagataacctctgaaggatatcagataatttattacaaaaataaggattagttaatttatgaaggataaacataatttccagtagtgacattatcaaagaagattattgtgctagaaagacaattgccctgacccaataaaagagtctcttatgatttaaacagcagagagaaaataatctagcgtaattccaattttggtgctataataaaaggtaggaaaaaaaggaagtccacataaatacctaatacagtcttcataattcttagaaaataaagaattctaaaatagcaagtaaagaattttgaaaattctatgcttatcagactgatgctgaaaagttatttagtctagtaaaaaagcatttctgaaaaaactagaaaaaataaatgatttactcaattttaaaacttaattttgttttgacgcagacactacgaaagattctatatccagaaataaaatcctattttgctaaaaagagatttccagagcaactgtaccgtaagagtaaggtctagcaatttacaactactatatttcttttcagttgctactagaaaatatacattcaagacagattcttaattctcttccatgactccagatactcagctaacactgaggttgaaactatgcccaagtccctgcatattcacacaaggttgctatttggctgcaaaggagccttttacaagagagaaagtgaacataatgggggagaagggaactgaagagaaagaaaaagctgcttttgtgccatatgaattatttattcagtcaagcaatgaactcactacttctaactctaacaatttatcagagaactctaaatagtgaactcaaaggcttagtttgaaaattatcactattcagccaagctgtaattttttccacttgaaaatgtttttaaaacataaattgtattttatccagtaatttcaatttccaatttataaattttataatcagagccaaagtgttaatttttaaaacagacccaaaaaaaaccccagataataactttcatcacaggctattaggaattaacaaactactcattttttgttattcttagtttaggaagctaattatagacatgtcaattcatgaaaccttaaattwttactatttgtgttcaactgataaccaagtatcttaaactagttcaagaaaacctttattcatctggtgagtgctgttgagatttattttaccaaagtctccatgaggtagtcctggttcttgatcagtatagacagactagactcagatttctcctacaatcagtaatgatgtttagttgcctaaattattaatagagattaaatcactttggaataagaatagagataaggtacttgcttcttgaaaagagaaataatcaggtccaatctgtgcccaaatggccttttcttacatatcaaagataatgcagaatttttgccacctttctcatcataaaataatttacttaaaaaatatgaatataatagagagaccacacatttatggtcaattgattttcaataaagatgccaagaacacacaatggggaaaaaacagtctcctcaataaatggtgttgggaaaactgaatgtccccatgcagaagaatgaaattagaccctcatctcacatcatttacgaaaatcaactcaaaattgattaaatacttaaacatgaaacccgacactataaaactcctacaagaaaacatagggaaaaagctctctgacactggtatgggcaatgactttctaaatatgaccctaaaagtataggcaacaaaaacaaaaatagacaaataggattacatcaaactaaaaatttctgctcagcaaataaaacaatcaagagtgaagagacaacctgcagaatgggagaaaatatttgaaaacacaccatacaactgataagacattagtatccaaaacatgtaaaaagctaaagcaactaaatagcaagaaaataaataaacctaataaaaaaacagcaaagggtgcagacatttcataagggatgacatacaaattgccaacaggtatatgaaatagtgctcagcatgactaatcatcagggaaatgcaaattaaaacccaatgagagactacctcacacctgttagaatggtgattatcaaaaagatgaaacagaacaagtgctgatgaggatgcagagagaaggaaacccctgtacgctgttgctgggaatgtaaattggtacagccactatggaaaacagtatggagggtcctcaaaaactaacattggagctatcatatgatccaccagtctcaccaatagttataaatacaaaagaaatgaaatcagtgtgttgatgaggtatctgtactcccctgttcatttcagcattattcgtaagagccaggatatggaatcaacctaagtatccatcaacagatgaactgatagagagaatgtagtatacgcacacaacagaatactattcttccttcaaagagaagaaaatcctgtcagttgcaacgacacggatgaacctggaggacattataataagtgaaataagctaaggcacagaaagagaaatgccaatgatctcacttatacgtggaatctaaaacagtctaaatcatggaagcagagagtagaatggtggtaaccagaggctggggtgtagaaggggtggggaaatgttggtcaaaggatacaaaatttcatctaaacaggaggaataaattcaagagatccatggtaaatcataggcctacagttaatatactgtacacctgaaaattgtgaagagtagattttaggtgttctcacaacaaaaagtatgtgaggtaatgcatatgttaattagcttgatttagccattccacaatgtgtacatatatcaaaaaataaagttgtacaccataaatataattttatcaatttaaacaaataacagaagataatgaaaatattttgtattttgtgtaaatgaatgaataacatactttttttttggcttgagtcattctgtaacctaaaacggacacagaacacaacttcttttggaaagttacacacttgtctccttacactttcattttctatttgaaatggtttgaaaatccctaagtctcaggaggagtgtctatctgacataattttatgggactctattttttcttttttctttttattttttgagaccgagtctcactctgtcacccaggctggaatgcaatggtgcaatctcagctcactgcaacctccaccacccaggtgcaagtgattctcctgtctcagcctcctgagtagctgggattacaggagcccgccaccacacccggctaatttttgtatttttagtagagatggggtttcgctatgttggcaaggctggtctcagactcctgacctcaagtgatccacccacctcagcctcccaaagtgctgggattacaggtgtgagccactgcacccagcctagactctattcttaaaaaaaccagaagagcaaatcatgttttgtgcatttcccctaacttgctcctttttctaggtacatctgacattccctgcttctgcttttttcccagacaaatcacttggtaatatataggcactgattctccttgattatactcatattttacagaatgagaattaaggccagtagaatagttaaaattcacctgagttatggtgaggaaagtaaggcccacacaacctatgttactaacccagatatctacaactagtatgtggcacagcaaagattaaagaacatgtttccagacaccatctgttgctctttgcaaaatgtccccactaattcccctgaagggccctggaattcatatctgggagtctatacaactgataaaatctttgcaacacactttagtaataatttactgtgaggcttaaaagggtatgcccaataattctactcctgggattctatcctatcataaaaatccaacttgtcagacaagcttcatatataattattcccatctagtatttatgataaaaattgttttaaaatttttttaatttttcaaaatgtccaataataaggggagacgctatttccactataatgaagaaatttaaaatgtttatgttaaaggtttatgaaagtgttaaaagaggcactttcctatgtctagtgacctgtcaggaggcaacaagttacaaaaatacatgaatgtatgctaaataagtgttttcaatcaaataaatcattagatcttacccaggcatggtggctcatgcctgtagtcccagctacctaggaggccaaacaggaggatcacttgaacccaggagttcaaggccagcctgggcaaaatagctagacctcatctctaaaaacattaaaattaaaataacacagatatatgctaaacaaatgttttcaataaaataaatccatagatcttcactgagtgagagtctatcacattaagactgacagaggcaagactggaatcttattttaaacaggtggcagttacacagggagagagaatgatctactttatgtaagaaatacattgctttagtttctttaaactggcattgcacaattcattttcttcctcatagggaagaaaaacctgcctcgataatcacttgaaggtagttaaaaaatgagtttcctaacacctccccaccacataaaaaaacttcaaggtcctcattattaaagctgagctttatcttactttggaaaactgtaataaatatcttccaagtgtttttaagagactaaaggaaagtcctcctttaaagcaccacatctcacttatcaaagctttaaaccatcctcagtagttacaggccttaaacttaaaaatctgtaaatcttgtcttatcttaaccccaaggaaaagacttaattagcaaaagtacagtctgaagacgataactgacttaattgagcatgcatggttatacttttaagacagaaatgggacttacaatgtatgtaatttgacaagatttaagttcccttcacacaataagaacaaccagactaaaggcagcgaaaaaacggtggtatttttcctaacaggatatttttctattttagatgatatttcatttttcttcatcaagtggtctgctcttgacttatcaagacatgatagaaaaggacattagatggctttatctatctcaaaaagaaaaaaaaaactctacgtgcaaaagtttcaattttatatttattttttgctaaaagcagtatttttactcccaaagccatctaatttaaaataaatcattaagggcaactactaaaacacctcaaaaaggtactatttcattcaaatttgtaagcactaaactcacatcatcctacctttattttgggtctaaagtttccacgtatcaacaactcatattcttttactagtttctgtaactagaattctgaaaaccaactatccagttacttaaaataaccctgaagtagctgaaacatccaagttagcaagaaatttcctatagttctgttcatagggaggtaagagtttttccacacaagacatagaatttttcttctgaaacaaagcagatgagctacagtgaacaaattgtaaattaactaatagttgtcataagcttccctataaactccctacattttaatgatgactattcatacttccaaacaactggacacagtaagaaaatcgtagcttctgcttcaaactagctcttgtgatgtaagccaaattacataactttttgaggttctcagttctatctataaaatgaaccagaccagatggatttttaaggtccctttccactttaagaatctatatttcattttctctgagacttttaaaaatctttttcaaaggtggtaaggcatctttggaagaaggaaaagaatttctttctttttacagtaaaagaaaatattttcacctttttctgacaatctgcacagaaaagttttctaggctytctcctagcattttcaatacccccttgggatctagggaagctgatttcccttttaacaagatgatctctataaatgaatgaggctgtttctgctaatggcctcctgttcaccattctccttttagagtatcagctactaattccaactgggcaggtttacctacatatcctgcttagtcaaggtgggcctcataacccacacaagttgatctcccataaaaggtgttagcagttgatttggttttgtctttagctctttatgggaacatcaaggcttctgggaagtagttttatacaggtggacaactcataacacttagcatctacattccccacataaaatgccacaaacctacagaacaaaatgaattttagttaccagtttactttcctgtcattaagaaaattctaaaacgtaaaattaatgtttctactttaacaggtttaataggatttattacattatataatacaacccccgcccctgccaatctatttttttctatcacagtgtatactttaatcttcaggtaaatggagtaactgacaaatggagtgatttaagagcactataaatgaaaagactagtcaacaaaaatgctaagtacataaatggtttagtgaaatgtctgtgaatctggatattcaacatgctaatttgggcttgaccacctccccaactcccttctgcctctcccaaattgtaaaatccaaactaattcttccagtagaaaacttccagtcaaacattaacatctggataaatttttaaatgtttttattttctgtattttcccgtatcaaaatatcagacatctcctctggtaatatttttcattaatttaaatttcaagttaagatttctttttcattaaatctattaaaagaatcttaagctttaatcactaaactgctgattcagaaaaacaaacaaacatgaattagttctcaactattccaggagtccaccttaatatgttcaaaataacccagaacaagttaaaatgtccaggatagcaagaaaattcccacaatcggagtctaaaaggaggtaaggatcttttcactcaaggcactgaatagagcttttcttctaacacaaagtgtatgaggtacagcgaacaaactgtaaaggtaactagttcttttgtcatatggtcccctacaaccttcttatattttaacaattaatgactattggcagcttctaaccagtaaggatacaatagtttctgctggggaaattgaagtgagcctaagcatattactaattttctaacagattatcagaactcaaatcagaaaatttaaatgagtaacattcaagaattttctatttcattactgtaaagttgacattaaatcttaaatacttatttaagtatatttatatgtaagtattttatacttgagttgacaaattgtcaaaattaccaaattaatgtaaaaaatacacaaataatcttttaatatatactacatatatccatgaacatatgaaaaacttaattactgggagacaatctaatctaattattgactttaaaaagtgagattttaaaaagcccatggctatatatttacttaatataatttgtcagttaatgtgcctattacataaccaaagacaccagatcaaatggtaaccaaaaataccaaccagcaacccatctagtctgctctgcatttatgtatgatatcaccaggatccagtgaggctgtcagaaaaagtatggagaagacagaaagtccacctacacttagcctgcaccttttcctcagaaagaaatgtcaccccttccccaagaaacctctataatagaaaaaraaaaacgtggggattatgccaaattgaccccaagctttagtctcctcctcaaggcgcattcagtaaaaacatcgaaacacacatctgatttgacaggcatttgagtttacaaagaacacggtaaaatgaaatcatacttggagcattcatgggttctgtgtcaaaggtcacttagtagtatttcatctgctgcctactaagatttaaagcgggcagagaatagagagccaccaaaccatagcacacctgctctaaatggcaccttcagaatcatctcctccaaccttttcattatacaaacacattttataacatatttgattaactctgaatttcctaagagctatgacagaatgatactaatttctgtgaaagacatacacacacaaaaacaaagataagcaggcacaaccacaaaatgaaaaattctataaatcaaaggccgtactttaaatgtgtatgataaaaaataaaaataaataaataaatgtgtatgataaataatgaaatcttaggcttaatacaatactataatggattgctggatttttatatttctctgaagagaaacgttcaggatacaaattacaatgctatggaaatagatgaaaagaaattagagactttaaaagcaaatgaaatatcagattgaatcatctctaaaaatgaaacaggattgctcatcaaaacattctaaaaatgattaacttaaaatgttaactacagtttagtgctaaaatgaataaactttttcctgtgccacaatataacatagaaagctctcaagagcttcatgaaacaaaaccattcaaaaagaaaaatgggggaggggaagggtaaaaggatcggcaaggaaactgagaataaatgcaatccactagccagtggctaaagatttagaagagcaagtgcattttgtttttaccgtccttggaatgtgtacccaacagctatgaaacaaagaggtgagatgtgctgccacaaacacaaacaaaaattttgttctactactatataaaaaggaggaggtagcttttcttgcaggggagagatacaagatttagaattcataccttaagtagagctggcatgtcaggtaaaatttgaaacttttgtatttatattctgaatatttctggagctttccaacgagcttatccatatgggggaaataaattatatgcagcaagcccaatttattcctgtcttttcagcaaaccagatctaacctcaatctacgtttaaaaagctagaattgaaataagaaagcttatctattccactctctgctgcttcttatctatagatctccaattataccacttcatttatgaggatggtatcataatgttcctctctattcaaacttctagtataaccttaggagccttcaacatctacatcgacgcctacagagattcaataataaacatcctttactccactgctaagacttgaccctttgtcataacactgaacaaccctatctcaaaaaatcataacctccaccattttactctctgatgataactttctccccttctacatctctcatgcctttatttccactatcctcagagagatctccagacctaaaatttctctattttccatcagctccctaatcctgggctcaattcctttcctactggctctaccactaaaaattgtgaatgtaagttacttaatctcttcttacccggtttccatatctgtaaaatgggaataatagtatgtatctcatattctctcatttattcaacaagtatttgagcctattctgtatgtcaggcactgagaatagcacagacaacaaagcatacccaccttgctcttatggaacttacattctagaatcttctgtaacaactatggttgtggtgagggttaagagttaatatacgtaaagaataatgtacagcacataatttgcaatatttggcacagctgatcatctaaactgctctaacttcaaacaacttggtttccctaaactcacaacttttactgtaccatctggtaaaacctcaatcctagactaatgttacattctgatctcccccaccaatttaaggcttctaaggaaatcacaacgatatagatttgttccattaaaaatgtgtggtttctagtcttgcttggatcttcaggttggcccactgattatttcatttttttcagttccttttcttatctttgtggggcttctttttctctacttgactctgaaacacttctgttctccaagctcctgtcttctgacctttttttctcttcagcccacacaccttcccttgatggtcttatgctttcaatcacctcctgcaaactgatgaactcttcaagctgtatttccagcccaggacccccatctatatcccacagcatcaagttcaaaggttaactgccttgttagccttcctccattagtgatgtcacaaccatcttaaactcaaaatatccaaaactgacttccgtttgtctcctcaactgattattcatatattcactctgtttggtgtcatcgctatccctggaatcacctcagctagaaactttggagttaatctcgtccattttttctctcccactggtcatttccaagcatcgagtcctactaaatttactatttatcaacaacaaaaaaagtacagactctgaaatctactccctcttctccatttctattaagtgtcagtttaagccctcgtcacctcttatcaagctaactacttcccaaatggcctctctgcctccaatctttttcccttcaaatttatccttcacatcagctatcagagtactctactcaacctgaatacaatcaaattgggcccctacttaaaacccttcaatgactgtccaactcacaaaaagatgaagttcaagctcctaaacatggcatttaaaaagcttccatgatttggtttcgtatctctccagactcaactccaatcactctcttacccttatctcatactccttccaacagagatctgcttgtatgtccagaacattccatgttgtttctcacccatgtgcctttgctcctgttctcctttaggctattcctctcttcctattcccctgggccctctcatttcaatgctcatgcactcacaatcaatatctacccttccttgtctctcccactgacctccctttagtattcagttcaggcattatcttttcaagtaagctttctctggccattctttccatttctctgtattatagtgaccatgctttatacaagtgtctgttttgtgactgtatccttcatttgactgtgaactccctaagtatagaccacagctttacctaccattccatctctagcacttggcacagtgcctagaacatggtaggcaaacatcacatgtttgtaacatcacactattcagtctcataccaataccaagtcatcaagtaccaaattgtaaagttacataaaactgaagatcagaagctggatgatttgtttttcttttctgaatgttaagtgctrctactaaaatgctatcaatgggtcttaaagattagctgctactccattcaacaaaaaacagatttctatattgctagagtttaccctctaaatgatttcaagtctgtcctaaaaaagtaagttagtaattcataaaatgtatccctaggtgttttgacatctgaaaaaaatatatcctgtaccaaaagcaggatatgcttggtatggaaagggagaaacaacacttgatgccacaaacaatgcaatcatcctagataattcattgaacccaatttttaaaagaaaaaatttaatatgaatacacatgaaccttacagtaatgcacacaaataaattatggagtaacataacaattttgcattaattttaaagatacaatcaagaaatatttctcactttctgagaaacatttcatgacgtttataccccaaaatctaccaggggtataatttgttctcctgtgctgtgttgatatggatttatctaaaataacataaaaataccatatattatatgacctcctctccctagtagagaaatgaagcaaaacaaataagagatgtgggtggtacactgtcataatcacccagagctctctgtgaacatcccaaattatctgacttgatggtcacagctataaactgctataaactattttatataggttttttttttttttaatttgagacagagtctctctctgtcgctggagtgagtggtgcaatctcagttcactgcaacctctgcctccccggttcaagcgattctcctgtctcagcctcctgagtagctgagattacaggtgtgcaccaccacacctggctaagttttttgtatttttagtagagaaggggtttcaccacattggtcaggctggtctcgaactcctgaccttgtgatccacccacctcagcctcccaaagtgctgggactacagatgtgagccacggcgcctggccttatataggttcttaacaaaataaatgtctacttcactgcaagagctttcctttttatttaaaagtaaataagtccttacaatatgccacacatgtgcaaagagacaggaaatactctctctcagaagattctctaaaagtgaatttaggccatataaaccatttctgctctaaagaaaaatcattaacagtcatgtgttttgcctgttaaaaccatgtgtcactgaaagttaagctatttaaagtagctaacaaaaagcacaaagagaagctgaaattcttagagatgttttatatctatatatatagtgagcatatatggctacaggatgagatcttctctcaagaacttctacagtaaatgctctaaatggagtgtgggtctgaatgggtaaagaactattactctaaaggatttgtctgattcttctctctttgcctggtgcctcactttagactactactactagtttcttcacaaattacttagaattttccctgttgacagtctaactctattttactatgagaatttcccaaaggtatcatgtcaacatccctgaatcaaatatcactctcccataaatgatttatacatcatttatgatgtataaatatcaaatttatacacgctactgttaaactcttattttaaatcatgactccattaacccacctttggaagaagaaagtacactatcaccatttgtgcattacgggtagatctgcaatcagactaacaggtacttttgcctatctatttttctcatctcatgaacgtacggacacaaaattcattgaagagtaaatctaagcaatgtccagcagtgtgtaatttaccagtattgctttttacattctcagatcaaacaaagggaataatataattatttcatcataatctgacaatatgctggcaccgctcaaaaatagtaccctgtttattaaagaacattgaaatagatgacatactcctcttagagatctacttcatatggtctcttacagcttagtggttaagtgcacagactgtggaaccagactgcctaggtttgaacacaggctccacttactagctaagtgaccttacccaacactttccgtgcctcagtttccctttacctatcaaagatagcaggatctttctcatagggttgcaatgaatactaaataaattaatattttaacgatattgagaatagtgcctgatacaaaaatgctattgtttgataaacaaaataaaatgtaaatattctaaaatgaaatgttatatccacaagtgcaatagtaacacacatattttaagttagaaaaaaatataataaggtaatacctttctcaaacttcctaaaaggtggtcaataaacagaaaatatgtaaaggtagaagccaagtaaatttagtgactacaaaaatataaaagaattaaaaatgcctatacccctaaaaataaatgaatacattttggagtatcacacaaccagggttagaaattattatgcttaggccgggcgcggtgtctcatgcctgtaatcccaacactatgggaggccaaggcaggtggatcatgagggtcaggagttcaagacctgcctggccaagatggtgaaaccctgtctctactaaaaatacacaaattagccagcgtggtggtgggtgcctgtaatcccagctactggggaggctgaggcaggagaatcgcttgaccggggagacggaggcagcagtgagccgagattgcgccattgcactccagcctgggagacacagcaagactccatcaaaaaaaaaaaaaaaaaaaaaacagaaagaaattattaagctttatctgctatattaaatacaaagatagtataaaatactaaagatactcaaaagaaattgattacatttgagaactcacaaaaattaaacatacgtacataggaaatacatggcaaatactgagttcccccaaaaatcattcacttttattttttcagttactattttagattaaatgttgattatcagtagccataaattactatcagtaattattaatatcaaacattaaagaattctataaaataaatttaaggtataataagtaatacaataaatatctgagttccaccatcgtttttttttaaacacacattatcctgacctgtgatatctactctgtgtccaaattcactcattcctaaattttatgtttatcatagacttgtattatgtgtattggtatccttaaacaatatattacttaattttgcgtgttctttgattctatataaatggaatcacactatattcttcagtgatttgttttgttcgaacattattttcctaggatgatccaagttgttaagcacaggtgtaattcattcatttttcagtattgtgttgcattccattgtataaatatactacaatttacttatcctattatttatttttttgttttgttattgtgatcagtactgtataaacaactacatacattacctggtatgtctgtatagagatttctctaagacataggaatactgggtcatagtgttatgtgtatcttcaactttaataatgtgaaattatttcccaaagtgaatgtacctacttacattagcatctgcaacgcctaagtgttcagttgttccatgtctataccaacagcagtattagctggcttctaagttttgagaatctaggagacatgaaatgccttcttaacgtggttttaatttgcatttccctgattcctaatgaggttgaatatcttataatacactccttggccaaacgagtttattcttttgtgaagtgcctattcaagcccagttttctatcagattgttcatctttatttccctgggtggtagattttgatatgtgctaaatacgggattaggcactctacagtatctattagtgaaacaaaattcttaattttgatgtagtcatatttgccaatcttttgctctgtgttttatgcctttttatctttactcaaagtcatagagatattctagcctatcatctttataaagtgttaccattttactttacctatacctttaccttacctacagatttagatctataatccttccactggtttctctaaatagtgtgaggcagcagtccaaccccaattttttccatttaattaaccaacaaccccaattattgaaagggtcatcctatttcactcattggcaatcccagtgccatcacagatccatttcatgaatgagtatcttgctattatctcttagttcttccatgtaagtttttggattagcgtgtcaaattcaacaaaaacctgtcaatattttgatcagatggcacagaacttacagataaaattggggagaaatggcaccattacaatgttcaagtctccttttataaacatggtacattatgctatttaattagatctttatgtctgccaatgtttcataatttctccataaagatattgagcacgttgttagatttactcacagtgttttatacttttatgatgatataatgctacctcttaattgcatttctatgccagcaaaaagtctgaaaaataattgaatttgtataataattctgcatccaaatttaaactttgagtaattcatctgtgaatttttctgggttacacagataatcatataatctgcaaataataatagctttttctttctaatcattgtatctttgtttgtttactgtactagctatacttctagtacaatgttgactaaaagtggcattagcaggcacacttgtcctttgatatcaaagggaaccaatgccttcaatactttaccatgaagtggaaagaaggtagggctggaaattttctttggaaaaaaatgcctttatcaggttaagaaaggggccttctcatttactgacttgctaagagttttatcacagatggatctattgagatgctcacatgattcttttcctttaaacagatgatgtggtaaattctattaagtgactttctaatataaaaccaactttgaaattctagagtaaacccaacttggttatgatgggttactttcttacacattattggtcaagtacagtaattcccctttatcaacagggcatacgtttcaagaccccctgaggatgcctgaaaccatggatagcatggaagccctataaatactatgtttttttttattatctgatgaccaagacggctaccaatggtaactaatgggcaggtagcatatacagtgtggatatgctggacaaagggaggatccacatcctgggcrtacaatttaaaacatatgaatttttatttcttgaattttccatttaatattttcggactgtgattgagcataggtaaccacctacagatggataagggggtactaccatgtgatgatatctaatctatgaatttttgtacataggtctgagttaaagacaatcatcattttttatacttagagcttcgtaaaaaaaagttggggacagtcatttctttttccaaaccatgaaatactctctgtacaactggaattattgttccttgaatgttttgtagaatttgccagtaaacctgtctagaattggtatttttttctttgtaagaatatttttcctttttgttttaagggtattccattttctattacttcttgggccagcatgagctacatttttttttaggaattggtccacttaatctttcaactgcattaaaataaagttgatcattcatgaaacacctgtagtaacattcccattttcattccagatactgctttatgacttctttccccacctattaatcttgccagtggtttgctaattttgttactcttctcaaataatctatttttagttgcattgtttcctttttgaattacttttactttctctagttcattaattattcccctgttatttcaatcggggagtatgctttttttctaattcttaaaattgcatgtttattattcctcaacctttagtcccataatataagcattaaaatctataaattcccattttagctatacataagttgtcgtgtacaataatttactgctatcattacaagtttttctttgatccacaagttattttgaaataaacatgttaatttccaaaacacacacacacaaaatttctatttaagttaatggaattgtaaacagaaagtgtaatgtgatgccaatccactgaaatttgttaaagctggctgtatttgaccagaatgtgatcagtttttctaagtgttcctcctctactttagttgtggaatacaatgttccatacgtgtccattacagcaggcttgtaagtcctgttattaaaatcatctatatttttcttaatttttttctgcttgttctcacattaacagagattattttaaataagctataataatgataaatttacctatttcttctgcagtcctagtttctgcttaatgtattttgaaagtgtattatcaggtagtcacttatttaaaattataccttccttttataactattgagtgaccctcactctctcggacaggttttctgcctcaaagtcaactttacatgatatatatagccatacaacatttctattggttagyagtgtcaggaatatctttttaaatcctttttactttcaagcgagaatatgctttttaaggtattgcttgtaaacagcatataaatatattttgttattttatcccatctaataaccagtttctgttaagtggaggattttttcaactcatatgcactgtaattactaatatatttgcacttattgctgctatgtacttttgtgctacttgtcttctcttttccatgttttctttcttcagcttctttacctttttttcagattgaatattgtttcttgttctacttcccttctctactagtttgtaaggtacacataccttctagatttttattccttatcttagaaattttaacatgcgttaaaacttaccaagcctacccgtagctaatcaataattttaccctcctcccaagttttatataatgtctgtctgaaactaaacatatttaccacttcttgtgttctttatcctttttacatttcagaccatccatctacaactattttccttatctgtgagaatgtggtgatcagaaactcagagaatgtaatggtggaagtatgatccaatactgttacttgcactgctgactttacattaaagatatatagcaattcccaggctctatacaactcaggtgaaaatgaacaagatgggagtgttgctgtgaaaccttaaaatagctaacaccttgctttcctctccacatgcttaatatactgtcaaagaataggctgtgaagatctgccttactgctttataccatttttgaaattagtacagtaaaactcctttatctattagcaagaggaagatgatgttccccaccaaaaaagtcagcttaacttgataaaattatatagcattttataaccattcagtttcattactgtcacagataatacataggcaggttaagcatgtaaacaaggtatagtaaagtataaacaaatactaatgaaatgaggttaatttttaaagttttggttaaaaaatacgctatataataacatagaacacaaaagtccctgaatatacaaagtagatcacatgtgaaatgtttagaaaattgatgcataaatcaagcactaatttttacatgagaattattaaacttaagaggttgaaacatgataaaggtatttcctcagcagctggtctaaaaaaaggcactggttttaatctatcttgtagtatacagcataacctccaaaaaaacagtgaactgtttctattcaaataaaaacatataccaggcctgaattacagctattctgaatgagaaacattcaggtaaataaagttttattttatttattaaatatctatgacacagaactgatatcaaagtacaataacatgttcacaaggtggagctctatgcagaaccattaataaatgccagaaataatctagaaaattaactagtaatagtgaatgaagagtattttatgtctttggagagccataattgatagaagtaaaaacattttattccataggtttgtaaatccacaacacatttgtttgcactgatttactgatttgagaaaaggaaaaaaaaatatacaattccccctaacagtgcagggactagaaatgcacagccaaacttggtgcacagataccagccactataacgtaaggctgcttatgcttctagtagcgtaagtcttctactaatttatggtggtggtagaagtggtagtggcagcaccatttcgaagcaattactatgcaaatctattagtattatcagaatagataagcaaaaactcaggaaagcaggatacatcaggttttacaacttttttcacttttagtaaagcaagcatatatattcttaaatttttaatcatattaacactgagtatataaagaaacataatattataaattactgtatataaatgtaatcatgtcactctttgcttcaagacctgtggtaatttcccatcatgtccaagataaaatctaaattcaggaaagcaatataaagcattttttcttcatttgcttactatccaattctccagcctcatctctagccattcttccgctcaccctacagttttaccaaacgtgacttgagtcccacaatatgtgtgtgcatgtgtgttatgcctttgcacataatattccccctgtatggaatattattttccactaggatattttactaggataacccacacacatactttaagacttggtttaagcaccatcccctctatgcatataagacagaatatcacatcagttaccaaactgtattctaaaggtttctttcctcatttttcttccctaccacactataatctccttagggcaaggtactacatctctcatcttcagggtctcattaccttgcatacaataatccatcatattcatcccacagatgaacaaacataggcccagataaatggaattattttctcaatttcagaggccaaataatggcagattcaatattagaatttaacacttcgggccaggcgtggtggctcacgcctgtaatcccagcactttgggaggctgaggcaggcagatcacgatgtcaggagatggagaccatcctggctaacacggtgaaaccccatctctactaaaaatacaaaaaattagtcgggcatggtggcacgcgcctgtaatcccagctactcaggaggttgaggcaggagaatcacttgaacccaggaggcggaggttgcagtgaaccgagatgccactgcattccagcctgggcaacacagcaagactccgtctcaaaaaaaaaaaaaaaaaaaaaaaaaagaaagaaagaaaaaagaaaagaaaatgaaatttaagactccttcccagttcaatgctttttctataaatgcacctaaggataccagctcagaaggaattatgcattaatatacagaacgttcaagacagacacagagctaaaaggagtattaaaaagcgagatctgtaaaaacaaaaataaggcacaggttacttataacgaattttcaaggaataggaataggtgataaaataaaacagaaaagttaaacttaaaaaactatcttaaaataagaattacataggaataagtaacatctatattttctaagaaatgaaagaaataaatataataaacccatctgtaatcaacttatcaaagttaaaagtaactaaaaactttttctttagctataacaaagtgaggaggtaaaatatgtagccaaaaatcagtaagatcaagcatttatctcaaggagaaaactacatcccttaaaaactcaagataaatgttaggtttaaacaaactccccatctaaagataaaagctacggaacatgaaaatgaattggtatagtgctaaattccttaaaaccttgtaggaaataagaaaccttgaagacaacactcgcattcccctaactagggccactctccttaggcatctttctctgaaactgtatcctcaataaagtatatttcagtgaattaaaatgtgtcaaggacatgaagaaccttgaaaaccccaactaggcacaatgtactcactctcagttaaaaatgttcaaaaccagggaagtaggacttgtgttcctctataatcctgagctttgggtattagttgggccctgagaaacatttttaaaaatttcaaataaaaattcttatgccaaattctggtgagttaagaccaaacattaacctgaaatggattacagacctaaatggtaaagctataagcttctaaaaatacatgggagaaatcctgaagatctggaataggcaaagatttctcagaaaggacacaaagcttaaatgaataaaattatgaattaaactccatcaaaatttaaagctttggcacttcaatggtaccattaagaaaactgataagccaacagaaagagagaaatatctttaatacttgtatccaacaaaaaattttggtccagaatatacaaagaactcttacaactgaataataaaaagacaaacaatccaattaaaaatggacaaattatttgaacagacagttcacaaaggaaaatatacaagtggccaatacatacaccaaaagatcttcaaacatcattagtcaccggtgaaatccaatcaaaaccaaaatgatactaccactcatctactagaatggttaaaattaaaaacatggacaattgtttgcaaggatgtggaacaaccagaactctcatacatggctggtggaaatgtaaaaatgtttgttacaagcagtttgcaattttgcagcttcttaccaagttaaacatayacttactatatgtacttagaagtacagttacctgtactataactgtactcttaagtattgactcaagaaaaatgtaagatatatatgcatataaattttatgtaaatgttcacagtagctttattcattagagcaaagaaccagaaacaacccaagttaatagttccactgcaggtgaatggcgacacaaattgtgtatttggtgatataacattcatacaatggaatactactcagcaatacaaaaggaatgagctactgatacttattaattttgataatatcctgtgcaaaagaaggtgcacagaaaggacatactgcatgattcggtttatatgaaactctagaaacattaaatctaacctctagtgaccaaaagcagatcattgctagggggcaataggtggggaagattggctgagattaagtacacaagaactctttaggatgatggaaataatgttctaytacatcttgactgtggtagcagttacacatgtatgcaagtatgtcaaaactctatcaaaatgtacatgcatagtggtatatcttattgtatataaattatacctcaattaagttcacacgcacacacacacacacacaccagggtatggttttaacttttggcttagaatagtcctgatctataccataggaacacagtaagacagccatcttcttaaatacattcccagccaaatggatatatgagaaggtgcagactccatgttgcttagactattcaaatatagaatgcacagcttttattccttggacttgagttctttgatttatgtaacagaataacaatgggacattatccttgaagttcatgtcaatgttatacataaaagtgatatggtaaggtctctctcatataatggcccttaaaaagatccaaggaatccttcctaaagctgaaagacataccaaaagtagcattaagatgaagcttcagtgtctattgatcatttaacagctttgtccaaggtctgaactaagcaatgttaaatgtcaaagttacacaaacaatgtacaaattttacagcaaccccctttcagatggtagttacattagctggagttaatactggtcaaaaggataaaaaattgtcagctgatccaagatatatttaaaataaataagtaaaattttaaatgaacatgtgttgaaaacttaaaacatgtattaggcacaatgcgtcatatgcttcatttaaactttcccaattcttagactgtcatgtccaatttacatgcagagaaactcaagcataaaaagactaagtaaccyggccagggtgataggtagtaagttacaggatcaacccaaactcttaactgctatacttgttcctcttaagaaagggtgtattcaaaaggtgaactcctgatgcattagacatataaatacaaaaaatacaactaagaaactaatagaagaaaatccaggaaaatatctttataatctatagattaggaaggacttcttactacccataaagtcaaaattttgacattaaaattaaggattcctgtaccaaagtcaaatgactgaaacgttggggattatcatcttaaatacacaagagaaatggaaatctatccaaaaagaggggtaaagggtatgaataggccagatatggaaagggaaacccaaacagctagcaaggatatgaagaaatgatcaacctccctaataaacagagaaacataaattaaagcaactatcagattatatttagcaactgaaaaattagcaaaatgtagaatgttgtacaataccgaaggctggcaaaaacgtgagaaaatagttcttttacattgttggtgagcgtaaaaaatggtgttgctgtttttaaaataatctgacagaatttagtaattattaaatatgtgattgacctatactcagcaatactatgtctggacaataccatgtccctagatatggtagtgctgagaaactcttccacagccattagcaacacgtaggaggatgtttattacagaattattggtatctaagaattggagtcaatctgggaatctgccattaggggaattgataggtaatttgtgcttactacataaatgaactactgcaaggttaaaagcaatgaactagctgtacatatagcaacatatctagctatcaaacaatgctaagtaaagaaagtaaattatatgtcaggtgcagtggctcacacctgtaatcccagcactttgggaggctgaggcaggtggatcagctgaggtcaggagtttgagaccagcctggctaacatggcaaaaccccatctttactaaaaatacaaaaatcagccaggcatggcggtgtgtgcctgtaatcccagctacttgggaggctgaagcgggagaatcacttgaacctgggagacagaggttgcagtgagctgatatcgcgcctttacactccagcctgggtgacaagagtcaaactgtcaaactgtctcaaaaaaaaaaaaaaaaaaaaaagaaaagaaaagaaaaagaaagtaaatgatagagcaaagtagcacttatagcacttatgtaaatacaaaacacacaaaagaggtacaaaattttacaaggctagctacaaaaccaacagcatataaaaaacatattagattgggtccaaggtaggaaggatagagtgaatgggagctgaaattgggaatagtgaccaaaagtataatccaaatgagaggatgcctctaaataatactaaygctctgcatctgaaatattttaagtgatataactacatcaactactaaatttgacagatgtatgcatatgtattagaacttgcctttgagatgatgaagcattctacacattttggttttaagtataataaatttgaaaattcatggtatctagttcttgcttgttaccgtcttagataaatatgctcaaatgacctaatgaaaagaataccgaactaggaacccaaaaagctgtgacctagtccaagctaactagtaacataaacttggcaaagtcatcttatctctttgactgtctgctttactgcaaaatggctttggatgattctcccaaatctctccagtccaaaattattccacttcattttcttaatgaatatttattcatataaagttattttttgtctactccaattcctccttcctttactttctccctcccaaataaagcaaaagccaagtgtatcaaaagagattcagaaaagtgatgtagcaataggagcaaatagcaacttaactttagggtagaaaggagaaaacrttaaagagatacagtgattttgacagccttttcaagtattcaaggcagagcaaggttaccctgagcccaggttcagaaaatctactccttgaaggatttcactacatgttattccatatgtcactgtatctgcctggcattaccccttcttaaaacacacattaaagtctcttctagagtttctacttaaagaccctaaatttcagcttatctgtgtcagttttcagataaaaagttattttggaaaagatgaatcttccatattaaaaatatatgattccaagaaaatgagtttttttcatcagcaaactagttacactcagcactatctacttaaaaaaaaaaaaaaaaacccaaaaccaaacactctgctagaattgtggattaaatgaatacaaagaccttaagagtaagggaaatcagaatatattttaggccgtgagcatgaatagtaacagatatataaataatggtgtcatattttattaaaagataattgaaatcagagtacttaaaatatcttaaacatttaaaattagaatattttaaaaagagaaaacagaggactttcaatatagaataaaacaataaaaagaaattaacataatttataaatttatcttccattcacatttaattttaaatctgaatgggggaggggaagggagagggagggaattaagagatcacaaaacatctgttatgaataatttcagcacagatgtagttgttactgcaaaagagatgaaggttttcccaggttgccatactgtaaggttttctacaaacatagttcatacctcaacctccatgtaccaagtctcaataaatacataatgttgattaggaggagaaatgtgcatatggacagataaatgcaatccctatgtatagagggaacgtgtattaaacaacagggagctgtttgaagaaagagaaaagtaactttgtagagaatgaaaaaagcttaaagtttcacagctataatacaaatagacacttgaattcaattttttgcttttcctttcataatctttccatttatctacatccatattatataatccaaaaatatgctttaacaaaattaatgaagttctaaaaattaagttgttttctctgaaaacaatcataaagcaaattttacttattagagagcattttgctacttaagtactgtattatattgccatctttttaagcaacccagttttaagttaacagcgtaacccacctccatcaaggctaaaatccagacatgctcataacatattgaaatttttatttagtaaaactaatgtcctaaagatgtttcctttagtgacataatactcaaaacactgccccatgcaaaagaatgattagtttatatggcaatgcctacataatagatcaaatttaattttaactagggttgctacaaaactttctctactacatatatttctacttgcttactacttttagttcatatctagttgaatgattatttagccagtaatatgtacaacatctaccctttaaaaagtagtttaaaaaatcattttatcatatttcctaatcaggacactttttctagtttaaaattttttgagttttctttcaacaatggacttttattttagcttatatctcaattagaaataaagagcatgcatttccacataaattagtgactgtactgcaaagaaacctttttcaatcctatttctacagcttcaagttttctaacctctcgctgtactcttgcacactaatgcatatcttcttccaacatctgcatgatttttctcctcctctgctgcaattcaatacaggtagttaagagtagctaacaatataattccacatgatactgcatctgtgtttacatctggctctaaccacatgcttaaaagtgatttatacaggtaaatccacaagaggataaagcaaaagaaaaacacaactatgagaaatcattatgctcttattttaaaaatatcattctcaatttaacagaagtttctcagcacatgcttcaaaagctactacataggaggtatgccatttcaaacatactagagactagagaaaggaagaaaacagtattaaacaaatatttcacatgctttttatatcagggtcatcttcataaacgattaatattttcaatttataagatactttaagttttgctccatgctacaatgtatctcgtgactttgtggcaaagtttctgagttcataaacatttaagtgaatcacacctattcactactgagccctcaggaattagaatactaaattcaagaaatacctgtcaggaaatgaaaaactatttacacacacacacacacacacacacacacacgaagaaccatgacatcctaaaataagaaattaacacaggcttacctggcaattcaatacctacttagttcaagataaacagtatggctattccattacggtactgatattgatgcatttataaaaacaccactaaaaataattaaggaaataaatacttctaatgttctacctaatgagaggcttaaaatttacagttatattaatatacctataagaacacaaaatgaaaagacataactaaatacagtctcatgcaattatttatatgcaatttatatagtttcttgaaaggaattatttaaatacaagcatacagcaacgtacgaactacagagttttactgcatataagatctcaaagcaaacttatattccttaattacaactgacaaatttaaaacgtatgcactcactgattcttaactaaaaaggtgggggagggctaccagtaggaaaagacctgaaggggaaggaaaagataaaatctaaaaatcactaacatctaagtgactgctagttaccacctccgttagtagctctctgccaacccatccatagtctaagtctacataagttatataaaaataattacacagtattatcaatcaattgtaattttccttgctactcttaaactttgaccattttagatgtattttaacatctaaaatatatattttaagggatcttactatgaattttaaaaaggggtgattaaaaagtattctaaatatgcaacataaatatgggtcaattattacatattcttctccaaacctaagaacataaaacaaaatctttttaaaataaggagtaatacaactgctctaaaacaagaatgaattaacagcaatctcaattagagacttaaataactcaaatttataaaattattcaagttaaaacagtcctgcttctttctagtttcggcaaactagaaaatgcttatgcctaatttaaccaaggctagttttaagtaacaataagactcagaattatactgaaggtcccaatcagcacagtcgatagagagacttatgatgctaccacaccaataatcatttttgttagcatcctctactggtggtttccaatgacagcaaggggaaatggtgctgatgacagaaggatatgtaccttctattccatctaaagagaattaatcagcatgtggtcattagtagagtacatctctctctcaaaaaaaaaaaaggtagaacaagaagaaaaccacatagaagaaagcagaaaaagaaaaagacagattttttaaaatgcaacaaagcatgaaattataaatggtaaaaactaattcaagcaattctaatgtcactcctttacggatgactaacatcattaagttaccacacaaggtttgatgctttggccaaaccttactcaattggtttacccctgtcagttacattacctgatactccttttaatatcctaccttcagacatattccagaaaggaaattaaaatattttacagaaggcttagcagcaaaatccacgtatcttatttcaaaatgaataaaacattatttacatatataacaacataaactatctctacgacaatcttccactgtatatatcacatatttcttcattaaaaagatttgagagttaacgttttgccaggcaattttctccaataaacatctgcaacttaaatatgactgcactgctaagaaatattaaccagcacatatactgaggtttcacaacacaatggaatataacttcatttttaatttgcaaaatataaggctaaatcaaatagcatggctataatcaccagcaatggatgaaatgcatttgagaacaaaaagaaatacaaggacagagccaaaagtgatgaaaatggaagatacctgtagtagtacagtgctatcttaaacaccttttgttttctgagagtaatgcatactgcagacaagacgttttgtgctaaacagacgcaaatctgtttttctaatattaaacacaaaggaaaaacactgacagcaagcgtggtaaataaatccctcccttgagaatgaaagcagcagacaggagggggctgacatacatgcaggagaaaactaaacaccatctttttttctacctgcacaagttgccatttgctgcagcgatcaagaacctctcttycctgttgatttcaagtatctttcaggatcgcttttccccccttaagtcatctgttgatatgccttacgagtgtaatattcatatcacaggatctcaaggagaaaaatccattctttcctgttcaggtaaacatgtttacagcagctgcacagacgctgggtggttcagactcacatgtcacacacatgtcgtcagcaacaagaaaagcccctttctctggcgatcaacattttaaataaggtaaaaagcgaacagctctttccgaaccaacttacctttcataaagccacatcagcaacagcggcaacagctcaatatggaacacacactatttgacgctaaaacaggaaattaaaattgcaatagcctatgctccactccttgctataacaagtcatctctccacaatgagaataccaaaatacctttcgtttataatcaacagacgtctttaaaatgcaagtgtttatttgaataattaaaatcacgaaagcagtgattttaatgatggctcgaatatattaaaaatataattatggattggaaggaaacatcttgaaacagcttaaaaatcttcgtatctgcttctagacaggaaatcccacacaaaatctaaaattgccaggaaaggttacaaaacctcgcgtttcgcatcccagaggggagggagaaagggagcccaggcgcggggggtggggctgggggagcacgagagagttttctcctaaacacgtatttcctcgttttctcgacgctgcagcggtcccattatagacgcatttattgcccctctcttaaaagtcgttttaaaaataacgcaggaaccaaagcgagcccctcggtccgaaatgtacgtgtaattccttatatagcctgggctgcggccggcggcagggccgttgccgcccattattatacaaacaggtaccggggcggcgcaggcgggggctgctctccctgcgctcccgccgcccccgggcggacaagtctcgcccctctcgccacaggaactgtccagacaataacaatcagcagacatttcgctgctgcacgagagggagagaaagcatagcatcgccccgagataaccagaaatacaatcaacttacaacgtctctccaaactggaaaaggcgactgtgcaaccaccaccacatgttcaggtctcgatccctcgggctgtctctctttttttttaactctcacgccaggcagaggggtgtgtgtttcccttggcacagcagcacaaatcaataaacactgcagctgcggtgcaagtagcagccccgcgcgtccgtcggtccgtccgccccctcccccaccctccttccacccgagacccagagcgccatccaagccccattatccggcttcagcgctccgtgcgtccggcccaggtaacaacttccccaaaaaccgaaagagaaaagcgcgaggcgcacgcacaccggcccatcccggcgcagagacctcgtctgccccgggagggggatctgtctgtggtgcttcccggtctctaagcccaggtaacaactccgcaaacacacccgccgcccagctcgcccccatccgcgcggctcccggcggcgttaagtgggtacctttcctgccttgttccccgcgccgccccgccgcgccccgccaaacgtggaccccactcgcggggctcgccgcggagtccccaggccggggctctgggccgggcagcgggaggcgccagggaggaggggcgcttagggacccgcgcccccgcgcctctaatccccgttacgcgagcgcgcccggcccgcgggtcccaactttaccgccgccggccgaaccctgtccgcccgcggcgcgcacagccggcgcccgcgcacacgcgcgcacaaaccccacgcaacccgcggccgccccgtcccgccgccgccgcagcccgcctgccgcgcgcccacagcccggcccgagtcgcggggcccgagcgacagcgacggcgccggccggggccgcggcgcgcggaagccactttgcacggtcagcgccgggcacaagtttgttccgcggctcccgggggcctgggcgctgagggagaatcgcgctgagggggccaggaggagggggagagggaggcgccgaagggcacaagagtggggaaaagtgcggaaagaagcaacagccgctccacccgggaccagaaaagtggccagtgcgtcccggccgcccgccctgcgccggggatgcggcggcgycggcgccggctaacggtccagggaggcggcaggggcggcgggagccgctaggcggagagagaccaggtaagagacataacggttcagggagagcgagcggccgcggcgcggctccggcagcggcggcagcggaggggggcagagagcactactttctactttcccactccactttgccgtccctgccccggctgcccccagcccggctcgcccccctcacccccgggggcgccccggctgcccagctccccctgactccgccgctccccggtcccctccgccactcaccgttattgcgccgcgggttcgcctgctttctgcgcttacacctggggccatccgccatgatcctctcgcttgtgtctaaatgctcgagtcacctcctccccctccctcccccttcccccccacccctccgcctccacccctcccccctccccaccgcacctggtttacgacactcccggctttacgacatcaccttccttacacctagaggctctcgctctacggccggaaccttgttgctagggaccgggcggtttgcggcaaccgtgggcactgctgaatttgaattgaggggcgagggaaaagttttcctcaggtgtggtggggagagggaggcggatgccgggaaaccgtagggacgcggtcagaaaggcgacgggctgtcggagttggaaaggtaaagttggaggctcggcggcgtcctgcctccgcgctggccacacccgccgcggctgcccggggcagggagggatctggctgattctccctgtaccctgtgccctcggagctgcccctccgagcgcccagaggtccccgcctgcctgcttcctggaggcagggctaccatcagtcccacgcctcgcgtgtccgccccccgcaccccggggccaaggaaagggatcgcggtctggactccccggggagttcccttgatgaggggaagggcaggtttggggacggcgaggacacgcggcgaccggagagaggctacctgacccgcgcagcccggactcccttcccttcccttccagggacgcctggtttccccccaagcgaaccgggatgggaagtgacttcaatgagattgaacttcagctggattgaaagagaggctagaagttccgcttgccagcagcctccttagtagagcggaatgagtaatacccacacggtgcttgtctcacttccccatccgcacccggccctcacctgctgtcacctcggcctcccacacccggtccgcgctccccgccctcttcctcgcgtagaaccgtgggatcctaggtggcaggactcagagctaaggtatccacaggccatgaattccttcctaaatgagcggtcatcgccgtgcaggaccttaaggcaagaagcatcggctgacagatgtgatctctgaacctgatagattgctgattttatcttattttatccttgacttggtacaagttttgggatttctgaaaagaccatacagataaccacaaatatcaagaaagtcgtcttcagtattaagtagaatttagatttaggtttccttcctgcttcccacctccttcgaataaggaaacgtctttgggaccaactttatggaataaataagctgagctgtatttcaagtaatatagttataaattaacaatgtagcagttattgatagagaaattgagaaaactgaaacgtgaccggagtattggaaataacgtagtacatcacctagcacaatgacacatagtaggtgctcaataaatttatgcttataatttttgtcacttctatggcaggatttttttattaggttaaaattatcttttaaacaccttccggaattttagaatattcattaataatgtcttcaaacctttcaactgaaataaatttacagctgaagtctgatgatttaaagttagaaagtttaatcttgaatataaatgaacattttctctcccacattttcttgggcattttgagaagtaaatgcgttatttattggtccatgaaatgtgactgtaaatattctttgctatacattatgtctatatatctgcattcatcctcaatgccaaaactagaatcattagtcttaatgatcattttaagtacaggcagtcctcgctttccttgataccatgttaaccgaaacttgtgtatgtcaacacggtgtccttgctttgcttggttaagtgtgagttcttcctccctttttttaagagttgtacaatgtttttcagtcgcctaccgaatcaggtcatagactatggaattgaccccaccccaccaacatttttacagctaccctgatttctgaccagaaaggaaaaaaaaactttccagctctatcacacattttacctactcttaaacttaggaggtattacaaatagcattttctcatgttctctttctggcctgtacctccctgctaagcttccttcagtgttcatcctcacctcatagagagatgaagtgaagagacaaacagaagtcattttcttccttactttagtggtttctggtttagttagtttgggccaaactgtggacaagtaccttttcaggtaacttttttttcttatttctatgtcctcaacacctagtggagtacgtagccaatagtagatgcttaataaacatttcttaaattaatattgttgaccttttctgaccctgttcttgacagtaaggtacataatctgccttcatccctttagtccttaggaacagataaagtcatggatatgaaagtgatcactgtcattaatatccacattaaaattgctcttgattttagtttctccataatcattttccctaaacaatgaactctgttcacctttttttttaaaatatgcacagtgaatattactggtagcccaaatcttctaacataaaatttccattttgtaaaagcttctgataagcatatatgttatgaattgaatgtttgattattatactttaatattcttgaaaatattgatacctggactggaaagaaaacagacaaaagtaaatctcagaataaattactgctttaaacatgatgcatgtgtgacggttgcttcttatctcttaaatacagctaaagaataggggaaaaatctttagaatcaatttataaaagaagattattaaaatttaggtttattcaaatcaaacggtaggggatactaatatatgactttaacatgtatcctgcattcttggttttagtaattgtagtgctgtcatacagcatacattcaatatatatgcttatttttaatatgtcaatgaaatgttaacacactgcttctactgagcactgggattatatatgctgaagggaagatattctaaaaatgaatttctatactattccaaatttacagggaaaaatgtaaatggatagaatagttccaatactgagttttttctataaatttttcataaaccctttgcacctatttgcttttcatatatgattcctgtataaattaggataaaatttgacataaaattatcttaagtttaaaatgtagagatttcacggtgttccacatgaagcatatcattcccacatacctcttccaaaacacattgagaagtgcaatgtataattctctagtcttcatcaaaatttaaagttcgttaatttcatggaaggatagcatgtaaatgcaactcttgaattcaatacctaattttaatcttagagtttttgaaggaaaaagaatgtgatacatgttatccctcaaagtacagaatgtagaggtcccataaagccgctactcaattcttgtctctgaccatggctcctgacctacagtaattctggatttgcagttcaccgtggaacaaaggagggcaatggtcatttcactgttgcagtctcaccaaattctgcagtcattgagtcaggaaggaaacatgactacagggtgatgcagaacccacagttggccacaggacccatgccagcccttcgaatacagcctcccaggagatatcacagggacaaatgttttctccatacttccatgtgatttttgttacatagtttaccacagaatggttcttacccctctggggaatgaggctcctatttttaatgtaagtcaatgaaatgttaacacgtgtagtttcttatttacgaggtgatttttcaggaacgtgtgtaatacagagatagatataaatatatggagaaagatgtttgcaggatgtcggtgaatatccaaaaagtaaaactagtgttttccatgaagtcacagtaattaaaaaggatttctttcaaaggctgcctccatagaagttagattgtagtttctattactaatattacttatgaatatgaataacatttaattttttctacacttaattatatgtaggtaacttgagaggaagcaacacacatatttttgatttaagtgaattttaattatttaccatgatatcagtggtctgatagctggtttctactgctgttttttctcttttgtatccacgtatttcttttttctgtcatcttgacttcttttagcagctgattgattctgttacagagtatggctgtttctttgacctacagtgctggtgttctgtaaaccacagatcctcagttacagtcgttgcctctgaacagaggcaaggattgaacatccttggtgtacatgcatttaaaatgtttgcaatcagtaacaggttttagatgttctaccattgtattaaacttacatgagaaagatggtgataaataccctgtgtccaattatatccacaactttaagatccctggtcacacccttctcattctcttcagacctcaggcctctatttcttttctctctctctttatcctacttacataaatagatcagacattgtgcccctcccccactgttttactttgtaatcattcccttcctctgtctttctttgtgcccgctctgtttggatcatttccctttctctttttgtttaaaattttttgaatcgttccaactctgtgaaatgctttgctttttcatattatccttgttatgctctgtccttcaaagtccattctctgcctttccatgctctgcgaggctgacttctgtggaagtcacgtcacccaggcttctttgccctctggttcctatttggtttcagccaatttggaggctttggcaaatgatcagagaaaggaaaaagagagaggtcaggatatttattctattccctgctgcctggctgtggctctagcttcgttcctctacctgaggtccctggctcctgtccgacaccctcatcccatggccacaggtcttgccaagttccagaaactgcttcttctctttgtgtcttcaggcccagggtggtaatgattgattgcttcatcactccttcctttaaaacctgtccacacctctgtaaatagtctcttcattaaactctcttcagagtatcctttgaatgtgctatatgcttccggccaggaccctgagtaatatgcgtatagaaataaagcattttaaccttatttcttaccaaccaataattctgctatttccattaattacaatactaatgttaaatgtgatataaatgtcttatgtcatttgttgaacaagtatatactcacgttccaatgtatgtacttgcaaaatctggcaaacactatcacgtagtaattattcaataacctatttgtggaatgatggcctctgccttaatctaaaatctaggcgagacaacttttacatatttaaaacaatgagagaaaaaaatcataccacaatattaagatagagctaattgtccctaatatgtttcttcctcttttaaaattatagaactgtccatttttatcacacttgaaataattcttagctgggtgtggtggttcatgcctataatcccagtgctttgggaagccaaggcaggaggattgcttaaggccgggtgttggagcccagcctgggcaacatagcaggattactctctacaaaaaattttaaaattagctaagcatcgtaaagcgcacctacagttgcagctactcaagaagctgaggcaggaggatgacttgagcccaggagttcaagggtgaagtgagctctgatcacacaactgcacttcagccagggcaacagagtgagacctgcctctaggaaaaaaaaaatggttctgtttctcttcttgtatgtatctaggtctcactatgctacttagttctggccaaagagatgtaagtggtgtgcacaacattgacaaagatcttcaaaaacagatgcttcaccatcctttcccttcctcctgtggattgaaatcctgctagattttctcaacttgggcagagctgtctagagctcctt

SEQ ID NO: 98036 - DNA, 117276 bp, Homo sapiens
tcacctgaggtcaggagttcgaagccagcttggccaacacggtgaaaccccatctctactaaaaatacaaaaaatggctgggcctggtggcagacgcctgtaatctcagctacttaggagactgaggcaggagaattgctggaacctgggaggtggaggttgcagtgagccaagatctcaccattgcaccccagcccgggccgacaacagcgagactccgtctctctctctctctctttctctttctctttctctctctctgtatatatatatatgtatatttaaaattagccaggcacggtggtttcagcctgtagtcccagctattcaggaggctgagatgagagaattacttgagccaggagttcaaggaccctgtctctttaaaaaaaaaaaaaaaatcatttcagttgtccctgctatttgccaggctatcttgtagcctagggtccaccaaatgccaccaactcaggtcccaccttcacaactttggccatattcatttgcaacctgggctcttatgtacttaatatttgtatttaaattgattaacgtcctccccctacaatttttcattttgacaaatttcaaacctacaggaaaattgaaagaatagtgtgaaaaacatccatatagccccttagctagattcaccaattgttaacatttttgccacaatttgctttttcttttctttcttctttttttttttttttttttttgagacagggtcttgctccgttgcccagcagaccctgcacagacactgcccaagctggagtgcagtggcacaatcatggctcactgcagcctcaacctcccaggttcaactgatcctcccacctcagcctcctaagtagctggaactacgcctaagtttttgtatttttttttttaatagaggcagggtttttccattttgcccaggctggtctcaaactccagggactcaagagagcctcccttggtctcccaaagtgctggtattacaagtgtgagccacctcgcctagcttacaatttgctttctctttatttctctccatatatacacttaaaaaaaaacatagatttatggtagggggcactaaaggtacttaaataagctttctttctttcttttatttttttttttgagagggagtcttgctgtgtcacccaggctggagtgcagtggcacgatattggctcactgcaacctctgcctcccaggctcaagcaattctgcctcaacctcccaagtagctgggcccgcgccatcacacccgactaagtattgtattttaagtagagacgggggtttcaccatgttggccaggttggtcttgaactcctgaccttaggtgatccacctgcctcggtctcccaaagtgctgggattacaggggtgggccactgcaaccaggcttaaataagctttctatttcagaatagttttagatttacaaaaaagttgcaaagatagtacagagggctctatccaccctctacggatttcttattgtttttcttaactgttcatcgtacattactatggtacatttgtcaagaccaatgaaccattatagttacactattgttaatttaactttatactttattaggattttgttagcttttcccttatctggtggattcacttttaaactggaaaaaaaacaacaccaaaaaaatagaatgttcatggaaaaccatgatcaattgccaaacacagttctagctagatgctgttagcagtggaatgacctaagcgtggggccggctttctctttgttaaaaagggagattggccaatgttaggtgttaaagacaggctagctcaagctgagactttctcccggccaaatggcattgaaccagcatggtcataggagggaaatggctttctcactatgagattcagtgtttagtgcccagtctgtgtgtcatctaaagtcagcttgggtggcaccccttcgggaggcccactttgagaaacactgaaaggtctggctgtgccacatccgaagaaggctggaaacccagacctgaggctgccgggctccaaacctggagcttccttctgccctggaagatggggtcagggctgggtgccctgattggtggtggttgtgggggatggggggctgtggggaatatcatttgtcttgtctagtaactcccccagctgttttcccaaagctggcaggcgtttaacaagtgatggacagaaaagagcacactgcagaattctatccacagctccttgtcatgaacacaagggccatttatttgcccgtcctgtcggtgagatgcatgtggccatatatttagtcagtgagggggtgggaagtggctgaaatgaaatggctttctcaactgccctttgcataatgtctgaacttgttcatattcattccttgaaaatgcttcaaagtggtttttgtgttttattagttagagtaggtgatattgcttcctgaaaccaaatctttgctttccaatatatatctgccgacctcatttccaggagacttcagcccactacaaactaactcgatggctctcctaccctgaaggaatttcactctggaataagtcactgttggctcatgggtctggacatctaaccggaggtgattcaaactagaatgtttgcagaatttctgggttcacccctaaggattgctctttcttccttatttccttcctttcatttttttcttttcttttcttttttgtctctcgctctctttcttttcttccttcctttctttctttctttcttttctctttctttctttctttttggtgggggctgggggtgttctttgtttttttttttgggacggggtctcactctgtcacctaggttggagtatggtggtgggatctcactgtgcctgtaatcccagctgttcaggaggctgagcggggagaatcgcttgaacccgggaggcagatgttgcaatgagctgagattgcaccactgtactctgcctcctgagctcaaacaatcctcccacctcagccccctcaagtagctggagctacaggtgaaagccaccacgctcagctaattattgctttgtactttttttttttttttttgagatggagttttgctcctgttgcccaggctggagtgcaatggtgcaatctcagcatactgcatcccccacctcctgggttcaagagattctcctgcctcagcctcctgagtagctgggattacaggcatgtgccaccactcccggctaattttgtatttttagtagagacagggtttctccatgttggccaggctgatctcgaactcccaacctcaggtgatctgccctcctcggcctcccaaagtgctgggattacaggcgtgagccactgcgcccggccttttttttgtacttttattaaatatggggtttcaccatgttgcccaggctggtcttgaactcttgaggttaagcgatccgtccgccttgtcctccgaaagtgctaggattacaggtgtgagcccccatgctcagcctgtttctttctttcttttaattattattattttattttattaatttaaaaaatagagacagggtctcactatgttgcccaggctggtttcaaactcctgccctcaagcagccctctcacctcaggctcccaaagtgctgagattacaggagcatgagccactgcttcctgcagaatgctgtttatttctgacctgacctatggtagaattattttagtccaaggaagcaaacggttgggatgaaattttctccacataggggtgcaatgtccccaaagaagatagatgggtcgggtgcggtggcttatgcctgtaatcccagcactttgggaggccaagacaggcagatcactttaggtcaggggttagagaccagcctggccaacatggtgaaaagcagtctctactaaaaatacaaaaattagccaggcgtggtggcaggcacctgtaatcccagctacttgggaagctgaggcaggagaattgcttgaacctgggaggtggaggttgcagtgagccaagatcgtgccactgcactccagcctgggaaacagagcgagactccgtttaaataaaaaataaaacacattttttaaaaagaaggaagatggctgggacaaaagtaacagaccaatctattctcacttttagaaatgaaaggattacaggtaaaagcgtcactcccaaactcttttcccagaggtagcaactcagtttggtttacatccttccagcctgtcttgctgtctaagtgtttccacagtgtttcattttatgtgtgtaaagggggaatgttacacaatcagcattctaccaaatgtatcatgctgacccccttttcattcagtaatatgtcttggagatccacctctgctcttcaatacagacatagctcttttaaaactgctggctaagctgacacagtggctcatgcctgtaatcctagcactttaggagaacaagatgagaggatcacatgaggccaagagtttgagtccagcctggtcaacatagtgagacaccatctttatttttaaaaataaaaaaataagaaaaaaaagtaccttgctgcctcatcccaacctgggaaacatggcaagaccctgactctacaaaaaatgttttaaaaaaattagccaggcatggtgggtcacgtctctggtcccagctgcttgggaggctgaggcaggaggattgcttgagcccagcagatggaggttgcagtgagctgagatcacaccactgtacttcagcctggatgacagacaaggcccattgtcaggaaacaaaaaacaaaaaaccgctgcctgatgtaccatatctttcacatcttgttcaagcagtcattattggatgagcatttcagttatttcccatcatttcctatgataagcagctctcagcaagcatctctgtgcctgtctcctgtgcacaggcataagtagtaggagaccctcatctctggttttcagaggtctttgccaaattacccttcagagtctgtgtgtgtgctttaatggggaggggtgtccgttcctgttctttggtgctgtttatttctggtttcttttccacactagctgcagagtggaaaggagccaaggcgagggagagaaatctgtctctaggtgttccaaggccctggatgtgccacagggctggcctcccctccggaggcggtaaatggctgctttgttcttgggtccgtccctgagcagaatcaggacgcagagatgtgtcaagtggacaaaagaaattgtgcacatcaccaagcctggatcccaccccttgacctggagaaactgttaactttgtaggagtcgcacacacaccagtgtgactgggcatggggcgagcgcccaccccgaaccctgaaataattaagttatacaaaagaaaaaaaaacataacaaaagagcctgaccctcactaatggatgtaaaggaaagaaccaagctgactctcaatctaggagaagtgggaggcgcaaagggggaaaggggcttgggggaaacccaggacggaaggaaggggtgtgcaatggatcagatctggactgaagaggcggacagatgggaaaggggaaagaaaggagggaaaggagaaagagtgaggaaggggctggaggaaagtgacaaggtaagaagaggaaggagagggctggaggagggagggggtggccaagagcagtttaggaggggtaggctgcgtcccagtctgtttgtgattagcacgcagcctggtgcagaatggagtaaacagaaacttccaggcgtcccctccgcccctctctgaggcaaagcagaaatcagatgctctgtgattaatcgtggaggattcaggacacgaccacaaacgctgtgcggacttgaaattagctgccttttcccagtccccttgccaaaatgggagtggggggtgggacgtgaaggggtgggggccccgcctgctgggggccagcatggaattccccccggcagagctgggagtgacactgacaagcaatcggccgcgtccagagcagcaggcggcatccggggggagcggggccggctggggggccccaggagggcttcctggaaccccagctccatggccgcctgcaccctgacacaggccagataagagtcccggctgcattatcagagcccggcagggcaccggcctccctgcaccagaaggaagactcggggcgcagcaggtcctcaaggcgatcttcccagagagcgggaccagcggctggtggccagtgtggatggaatttgcagagccctagctcgagtccgggagtcccgggccagatgggagcagacgcttgctggcggcaatagggaaagtgaggcagctgcaaggagggcggcgggactgcactcgagtgtccagacctgctcgatggtgagtgtgaagtgactgctccccatgtgtgccgtgacgccgccttgtgtggacagacttctggagctgggggtgacaggaggaggcagccgttcctcacaggccacctggagctcccaaggccggaggagggaacctgggttgaggctgagatgggatggcggtatcgtgctgtgtggccttaggcaagttatttgccctctgcaggcctccatttgtccgtttctaaaacagtggttgaactaggtgatctttaagagattctcatgatgacagctattccttgtgtatctgctatacgccaggcactgtgtaggcatttttgaagcgtcggctcgggaaatcccggtaagccccctgcagggtaagtattattggtgtcctcattgtaccctgaggaaacagcagctgggcgaagtgaagtgacttgctgaggtcacacagccggtcagtggcagaaacgaaaaaagacctaggtttttcygacttgctttggctaaactctcctgtacacccccagtattctgtattctgtgctccatggttctgcaattatcccaagcagcaggggtgaaggagaaggaggtatggatggagcattacctgcaggaaggaggcagaggtgggacagaaggagtgacaggctgacactggcaagcagccttttactctctaaaggatgtgtcagcccagggtggaggctggctgccctgggatggggcaggggctccaggcttgaacgaagagtgcccagtgcaatttcctagatttgctgccttgtcgtaggaggctcctgggggcatgagagaagagggttaatatgtcagaggtggagagagctgggggcagggaractggcatatgcctcaactaggttttgttccaattttattttgcctttgcagaaaatctgtttcraatcactctgggcccgtgcagtgtttttggatgaaacagaattgtgaaacgcatacagcgctttccacatgcctcccctggggggaatcacatattaatattatcgtaagctatttgcatatatatccctgcagctgtggctggcagcagccaagagataagagacagataaagtcagctcgtgtctccctggcacggaaagggagggtgcaggttacactcaagggccaggaaacacacagcaggtggggaatccctggggttccaggcatcgggccagagtgaaaggtcccagcacccagatgtggccttttcttttttcttcccttggaaaattccatcccaaagcagctctgtactgatccaggcctcctttcctttcagggactggctgtgaaccccccaccacccaccttggggacaagtcagccctgagttgtggtctcagatctgggagcaacttgtccagaagcccccccagtcccaggtaaactgggacaattggtcaccctacccagttccaccctggattttctctgtgaccttgagcaagtcacttcccttctctcagcttcctcgtctttaaaacaaagggactatttcaggaaacctctaaaatctctccgcaaccctgagattccatgagtctggttgaagagcgcttaagttccgaactgagaacttaagcgtctgagagtaagatgtctgagagtaagatcaagtttggagtgaggctgggcgcggtggctcacgcctgtaatctcagcactttsagaggccaaggcaggcggatcacctraagtcaggtgtttgagactagcctggccaacatggtgaaacctcatctctattaaaaatacaaaaattagctggccgtggtggtgcgtgcctatagtcccagctacttgggaggctgaggcaggagaatcacttgaactggggagggagaggtgcagtgagctgagatcgtgccactgcactccagcctggccaacagaacgagacttcgtctcaaaaaaaaaaaaaaaaaaaaagaagtttggagaggagtaaatctccccaccacttccctagagaagtccaggatggtactggasgaggcgggaatgaaggtggacttggggaaaaggactgatggcctgtggtaccacctgcatgggtgtcggttgtaacaaccctatggccctgcagcttctgaggtgcctaatgggttgttgaaagcgtatcatgattttgtggctcagcgtttgtgctaagtgatttggcccagatgcccactggttgctgaggttttccccatcagaacctcagtgctccccccagggtcccccagttcatcctggggagctccaaaggggtatttcgagtgcctttgtgaacyagtctctagttttattcatccttccygcttcctctttcctctgaggccatttggagacgcttccctgcccagcacagcagcgtccatggtgccatctctgtaaactcccaaagcttcccgctgtttagtgcttgagataccctgggttctgggcagatgtgaagagaatggcttcctcctcagttcggtgatattctttgccatgttgtccccagacagaggtgtgctggaggcagcttgtaccagcttgtgaaagctgattgtcagattttcaggaattaggtgaacgggttgctaaacacaccattgttaaaaattaaattatatgaacttacaattcaataaattctatgaaaaacaaaggyagtcaaggctgagtgtggtgactcatgcatgtaattccagcattttgggaggctgagacaggaggatcatttgagcccaagagtttgagaccagcctgggcaacataacaagaccccatttctacaaataatttgagaaaaaactagccgagtgtggtggtgcgtgcctgtagtcctagctactcaggaggctgaggtgggaggattgcttgagcccaagaggttgaggctgccatgagctgtgatctcaccattgcactccagcctgggccacagagcaagacactgtctcaaaaaaataaaaatacataaacaaataattagaaattttttagaaaggaaaatattaactggtatttctgaagaattacactscttcatcaattgtaaccataggttgattacagattttgctgggggcaaaaatcaacaaaactgctacctgtgagtgaaatgattatattacatttataaaagaaaaggtattgtaagttttatttttatttgtaaattgtgtgctgcacatcctttacatcaaaacaatttttttttttttttgagatggagtcacactctgttgcctaggctggaggacagtggcgtaatcatggctcactgcaacttccgcctcccaggttcaagcaattctcctgtctcaccttcccaaatagctaggattacaggcacccgctaccatgcctggctagttttttatatttttggcagagacagggtttcaccatgctggccaggctggtctcgaactcctaacctcaagtgatccacctacctcagcctcccaaagtgttgggattacaggcacgagccactgcgcccagcctacgtcaatacaatttataataaaccraagtatatgtgtgtgtggatatgcaaatatatgtactcgcccatgcacacttgtgcaccacacactcactttcccttggagagctggttgctaaacctttgccagcataccactggttccacagmatctatggttgtgtctggattgtcaaaaatcgtctcctgaacagtcctcagtcctcttccaaaggaattcagaccccaggcatgggccttggatgcaaatctttcaatttccccatctcacttaaaccagcagccaaactcctctctcttgcccgaagcactggagtggatgcagagagatcgggtggagtagagatcctgtctacactagcggcatgtgggccccagctccaccagcgacaaaggccctggtatgcactctccattgcgtccactgtgtctgcatttgcagggcatttctggattctgtccgcagcggctcccgattagtcctcttccgtttctagtctgtctcctgccatcctttgttttcatgcacagcgaatgatgccctaacagaaatggcatcttggaacaagtcagaggaacggctaagccaaacctataggaaaagttcagatagcttgctatttttagaaactctaggagccaggtgggcccyttccagttytaagggcctaagccagcaagcacgagaggaaaatatttctcattctcaagttccgctctcttatagtccaggccaaggacaaggcccaggtgggacattagctaagagaaacgcaactgcaatacaagaggagaaccatgcccacagcagtttaaaagagaactaaaaaacgtgcacttttttttctttctttcttttttttttttttaacagagtctcactctgtcgcccaggctggagtgcagtggtgcgatctcagctcactgcaacctccgcctcctgggttcaagtgattctcctgtctcaggagctcctgagtagctgggactacaggtgcccaccaccacacctggctaattgttgtatttttagtagagatggggtttcaccatattggtcaggctggtctcgaactcctgacctcaggtgatctacccgcgtaggcctccaaaagtgctggaattacaggcatgaaccaccatgcccggccccaagcatgcgtgttttattgttttgcgaggtaggaagggcgcgcctgagtttaaacctcagtagctcctatactcaccctgggccacccctgttaagagcccgttgtcttggccgggcgcagtggctcacacctgtaatcccagcactctgggaggccgaggcgggtggatcacgaggtcaggagatcgagaccatcctggctaacacagtgaaaccccgtctctactaaaaatacaaaaaattagctgggcatggtggtgggcgcctgtaatcccagccactcgggaggctgaggcaggagaatggcgtgaacccgggaggcggagcttgcagtgagccgagattgcgccactgcactccagcctggggcaacagagcgagactccttcttaaaaaaaacaaagaaagagccaggcgtctatgctttcaggccattcattcacttcattcctatttttttctttgtcacgtaattttaattttcaaaaatgggatcattctatacattttattctgcatcttccttctttcaaccaacaggtgtcctggacatttttccatgtgagcccatgaagacctaaaacattcattttaatgcccacatcacagaagtcctagaagaggagggtttttttttttttttttgagacagagtctcgttctgtcacccaggctagagtgcagtggcgtgatcctgctcacttcaacctctgcctcccaggttcaagaaattctcctgcctcagcctcccgagtagctaggattacaggcacatgccaccatgcctgatttctgtatttttagtagagacgggggtttcgccatgttggccaggctggtctcaaactcctgacctcaggtgatccgcccaccttggcctcccaaaatgctgggattacaggtgtgggccaccgtgcccagcctattttttaaaaaattttatcccatcaggccaggcgcagtggctcatgcctgtaatcccagcactttgggaggccgaggcacgtggatcacgaggtcaggagttcaagacaagcctggccaagatggtgaaaccccgtctctactaaaaatacaaaaattagccaggcgcagtggcgggctcctgtaatctcagttactcgggaggctgaggcaggagaatcgcttgaacttgggaggcggaggttgcagtgagccgagatcgcgccactgcactgggtgatagagcaagactccatctcaaaaaaaaaaaaaaaaaaaattctatcccatcatcagctctcaagaagggctcagtttggatggccatgtctctactttataaccaggtctcaaactttcttgacccttaaacacttaaatagagcccagcctctcccactttccagcaaaaaagaaattctacactggacgtggtggctcacacctacaatctcagcactttgggaggccaaggcaggaggatcgcttgagaccaggagttcaagaccagcctggtcaacatagcaagacctttgtctctacaaacatatttttaaaaattagctgggtgtggttgcatgcacctgtggtcccaggtactcgggaaactgaggtaggaggctcacttgagcccaggaagttgaagctgcaatgagccatgtttgtgccactgcaatccagcctgagtgacagaatgagacgctgtctcaaaaacaaagaggaacagaaaagaaattccgttggctcccctgtcaacctgcacccagaagctgacagctctgtcacctccgctccctccaccctggtcccagcggccatggtgtctctctctgggctattgcagttgcctccccaccagtgtctctgcttctcctcttgcctccctcctggtctactctccgtgtgcagccagcagggtcctgttaaaatgaaattagatccagttccttctctgttcaggacacctcctatctccagccctggtcccaccttgcccagagcacaggcaaagtcctcaycayggcccacaaggcctgcagggcccaggcctctctaaccttatctctcctccttcccactccccacaattgctgttcttgaggtcgggcacagtcctgccccaggacctttgcaatcgcttttctctatgcctgggtgctcattcttcagatatccaagtggcccacttgttcatatcgcgcaggtctttacacaaacatcacctttgcagcgaggccatcctgactctccatttaaaattacagcttccttcactccctggtcttcttcatcccttttctggtttatttttctccttaccacacacgtctcatcatctaacatacatatatattcttattttcttaagtgtcccctgctggaatgtgagtttcctgaaggtagggatttatttttttttttgagatggagcctcacactgtcgcccaggatggagtacaatggtgtaatctcggctcactgcaacctctgcctcccgggttcaggtgattctcctgcctcagcctcccgagtagctgggattataggtgcacactaccacgcttaactaatttttgtatttttagtagagacagggttttgctatgttggccacgttggtcttgaactactgacttcaggtgatccacctgccttggcctcccaaagtttctgagattagaggtgtgagacactgcacccggcctcctctagaattttaaaaatggacctcaagtaagtagaattgaccaggtgtggtggctcacacctgtaatcccagtactttgggaggccgaggcgggtggatcacctgcagtcaggagtttgataccagtctgaccaacaggagtagagacagcccgtctctactaaaaatacaaaaataagtcaggtgtggtgacatgaacctgtaatcccagctactcgggaggctgaggcacaagaatcacttgaacccaggagctggaggttgcagcaagctgagatctcaccactgcactccaacctggccaatggagtgagactccgtctcaaagaaaaaaaaaaaaagaaaaagtaagtaggattgaatgattcataattccataatgamatactgaaagggcacctgaacagccccacctacmcttccatctaacaatctctttatagctatttataaaatgataaaygcctgtgaacccatggycccacctgcgtgctggaactcagacaaccattttatatcaacttccgaactcttttcccatcttgcctccctccctctctcactgtggtagtagctgctatcttgaattctgtgtttagctttcccttgcctttctaaaaattgtggatagaatttatcactttagccattttaagggtacaattcagcggcattacgcacattcacaatgttgggcaattatcagcgccatccatttccagaacattttcatcttctcaatttcccttgcttaaaaaaatagttttatcaccaggcacggtggctcatgcctgtaatcccagtactttgggaggccaaggcgggcagatcacctgaggtcaggagttcgagaccagcctgaccaacatggagaaaccccgtctctactaaaaatataaaattagccaggtgtggtggtgcatgcctgtaaacccagctactagggaggccgaggcaggagaattacttgaacatggcaggcagaggttgcggtgagccaagattgctccactgcactccagcctgggcgatgagtgcgaaactccgtctcaaaaaaaaaaaaagttttatcacttacatgtatgccaaaataatatatcatttacttttactgctgtttgaactttacgtaaagatatatcttgtcttctggcacatacatgcagaacacacacacacacacacacacacacacacacacacacacatattttgagacagggtctcactctgtcacccaggctggagtgcagtggtgcaatctcagctcactgtagccttgacttcttgggctcaggtgatcctcccacctcagcctccctggtagctgggactacaggcgtgcaccaccacacttggctacgtttttgtagagacggggctttgccatgttgcatattgcccaggctggcctcaaactcctggcctcaagcaatcagcctgccttagcatcccaaagggctgggattacgggtgtgagccatggtgcccagcccctgcacttacatttttataaatcattttattgctaaaattcgttgatataattgcatatcacttgttcattcacttttctctgctgtgtactattccatggcataccagcatttatttttcctgtctatgaccatgtggkttgtttccatttgtcagttttgtttgctacatacacggttctgctttgagggttcttgtactgtcctattgcacacatacaggagtgtgtctcaagtttgtacctggaagtagaattgctggaatatgaaatcgtatgctgaattatcttctaatggttgtaccaattcacaagccaccctctacacatggcatttgtcaaacatcttactttttgccacctgaatgggtggaatttgccctagatcttgactgacatcaaggacggggctggaatgtccaaaagccttgaatgggctgcgtgtttgtgacgtcccacatctttgtggcacagcttctcctgcaggagaggcaagcctggcagctgtgctacagaaaggaacacatggggtggggattacagatctgataacatcaacttttccttcctcccctccacctccttttatttggtctggttctcaacgcgtgtggggaatggtgtggtgaggaaggggcgaatccttggtccgtgacaggcactgttgcatgcactttacagatattgctgttaattatttacctctcagatcctgcaaatggaggtgcccttagaagccccactttacagatatggaaactgaggaacagagaggttaagtgacttgcctgaaattacacagggagtaaatggcagaactgggtttgaatccagctcttctggcttcgtccaaggtttatgctgcctttcagtagcgcctgcagtgaagggttgcaaactcctcagtcctacagacttgggttcaaaccctggatcccctaccacctcactgtatacctctgagcagttacatcacgtctttgaacctcaatttctctaaaataaaaagagctatcttttccagaagcctcattatatgttttttttttttctagtgccttattgtttcttttcttttcttttttttttttttttttttttgagacagagtttggctttgtcgcccaggctggagtgcagtggtgcaatcttggctcactgcagcctccacctcctgggctcaagcagatcctcccatctcagcctcccaagtagctgggactacaggcatgcaccaccacgcccagccagtttttattttttgcagagactggggtctcactttgttgatcaggctggtctcaaactcctgagctgaaatagattcacccgccttagccccccaaagtcctgggattaaggtgtgagccactgtgccagctattgtttcttgttaggtcatatgccccttcttgaaatttccccggaatatgttctttggcttacgcctgtcagagctcatctctggagttgagggggtatcaatgccactcacacttgtacctgcaaatcagggtgccctcccaccccccgacccaacaaaagccaaaggctgttcgtaggagcaggagataggtgctgggcatcaggaaagcaagtgtccactctggtctggctgggctggtttgggccactgaccttcatgaccattgtattgcgtaagaggctgctctggttgagctgtaaccagcacaggcagcctttggccaggtcggcgtgagattaccagcctcgcacaggcggctgcacacgacacgtctgcaatacctattctgaagggtaattctctgggataaagcatgtttatgttttttagggaggtggggaagaaaattccatttctgttgccaattagttctgcttgagaacagcttttctcaacaccaacatattggctgcccagacttgagttctgttgattaactcaaagtggggaaaaaagtgatttttctttccttcctccacccccaaccgtgaaacccggctgttagtgatgaaaggggtcctgtggatcatttagttttccttgtcatgactccaggaaaggctataaaaataatcagtgggccccgctggccgtaattgactgtagagagaagttggctaccacagcgcctgagttatgagaatctgtttcagatgcaggcttcagttgagcctcgtctaatgacacctgctccccaaggccagcggagggtgggggtgctgacgcttgtctgcatgcttctcttccttcccgggttccagggagctcctggcagagggacccaggacaaaacagagaygctgggaggagaggaccaagcatggatctggccctgctgcttgcaccaaattccaggtctactgtttgtttgtctgtttgttttgagacaggatcttactctggttgccaggctggagtgcagtggtgtgatcttggctcactgcagcctcaacctcctgagctcgggtgatcctcccacttcagcctcctgggtagctgggactacaggtgtatgccgccatgcctggctaatttttgcagttttttagtagagacggttttttttttttttgagacagagtctcactctattgcccaggcccgagtgcagtggcgcgatctcggctcactgcaacctctgcctcccaggttcaagtgattctcctgcctcagcctcccgagtagctaggactacaggtgagcrccaccacgcccggctaattttttttttttttttttttgtatttttagtagagacagggtttcaccatgtttgccagaatggtctcgatctcctgaccttgtgatctgcccacctcagcctcccaaagtgctgggattacaggcgtgagccactgcaccagtggagatggggtcttgccatgttgcccaggctggtctcgaactcctgaactcaagcgatcctcccacctcagcctcccaaattgctgggattacaggtgtgagccaccgtgcccggcccagtccactgtttgttggccatgaacctggggcaagaaacttcacttcttggtgcctcttttttaaattttattcttttttttaaccataaactcaaccaagtggcaccctcattttatatatttttaaatattatatatatattttttgaggtatatatattttaaaatattatatgtgtatctctctctctctgtgtgtgtgtgtgtgtatatatatatatattttttttttttttttttttttttttttttttgagacaggatcttgctttgtcacccaggctggagtgtagtggtgcaatcctggctcactgcagcctcgaattcctgggctcaagcaatcctcccaccttggcttcctgaatagctagtactacaggtgtggatcaccaggcttggctaattttttgaattttttgtagagatgaagtctcactttgttgcccaggctggtcttgaactcctgaactcaagtgatcctcccacctgggcctcccaaagtgctgggattacaggcattataaacagataataatggttcctcctcctggggtgatgtaaggattgaatgagttaataacatgcaaagcacttgcaaggagcctccaccatgtgcaaagtcctgtgtcaacgccagcttttgttatttattcaagactcccccactcttcctcccttgacacttgagtcgtatgtggttgtgccaaaatatcttagtccagtcccctgatgatggacgtgagatcagttccgatcttttgtgatcacgaatagcactgcattgaataacctgtagcttgtgagccaacccctccacccaccccttaaggtatgtgaaccccatgataaccttggccttggactttccttcccggagcctgcagaacgaggagagatatgtgggcatgtggccaactctggcctggcatgcaaacaggcctgtggggtggggtgggaggtgggggtaggccctccctgagccaggtgggacagattcctgctgtgtccatctggtgagtgaggagccacagggtgagtttcagagggttgggccaaggccacccagcccccaggttcctggtgaatgcccttatgtggactggagagaggaaacctgtactgtgccttgtgggctctgcccattttttgtgatcttcctctaggaagcccgctgggatctctgctccaacacactttgctatatcagccaccggtttagcacccatggtggctggttctcttcttggggggcaaaacccatgatgattgagaaaatgagatggggagtcaggaggctgattttggtcctgacttcccagcacctccacccttgtaactcctgtggctccgtgtcctcatctgaaagcagactaagaagacgaataataaggccaggcgcggtggctcatgcctataatcccagcactttgggaggtcgggacgggtgcatcagttgaggttaggagttcaagacaagcctggccaacatggtgaaaccccgtctctactaaaaatacaaaaattagctgggcgtggtggcacgtgcctgtaattccaggtacttgagaggctgaggcaggagaatcacttgaaccagggaggcagaggttgcagtgagctgagatcgccccactgcactccagcctgggtgacagagtgagatcttgtctcaaaaaaaaaaaaaaaaggccaggcgcggtggctcacgcctgtaatcccagcactttgggaggccgaggcaggtggatcacctgaggtcaggcgtttgagaccagcctaaccaacatggtgaaaacccatttttactaaaaatacaaaaattagccaggtgtggtggtgtgtgtctgtcatcccagctactcaggaggctgaggcagaagaatcgctygaacccgggaggtggaggttgcattgagccgagattgcgccactgcacccaggcctgggcaacaagagcagaactcggtctaaaaaaaaaaaaaaaaaaaagtaaaacaagaaaataataataataatggtaacaaattcacaggaaggtcttgtgaagtctcagagacgtaatgcaaatgggtttggaccctgtgtctggcacaagaaatataagctggtgtgagaaaatgacctatctatgggaatgtctgggccacaggcacttgcagccacctatgaagggagttagtccgaattcccagggccttggcaaatcatccaccctcagaactgagttttctctagcaaatgagggtgctaatgatatgtatcccaagggtttgatgtgagaattaaatgagaccaggcacatattgctttgcatttacactgtggtattgttgatattattagttatctgtgttgatagttgtgagcatccttccagacattggcacaatgcggtgcacgcagctggtgcttggtgactgcaaatggattgacggacagggcccagtatctgggctgggtgtgggtggctcacacctgtaatcctagcactttgggagaatgaggcaggaggattgcttgagcccaggagtttgaaaccagcctgggtataagcaagacctctactaaaaaaaaaaaaaaaaaaaaagtagaatctggaggatgcactgatagagaaacccatttctgatgttgtggagcccttagggagaataaaggggaaaagcctgatgtgacctcacctgtgggtttttttattttgttttgagactgagtattgctctgtggccccagctggagtacagtggcatgatcacggctcactgcagccttgacctcctgggctcaagtgatcctcctacctcagcctccagagtagctgggaccacaggcatgcaccaccatgtctggctaatttttgtatttttagtagagacggggtctctctatgttgcccaggatggtcttgaactcttgggctccagcgaacctcctgccttagcatcccaaaattctgggattacaggcatgagcccccacacccagccctcacctgtggttttatagtcagctacagcttaattctgggagatgatgggcctcatcccacacaccatggcaagtacgtgacacagcaggaggcagaccaacttcccctgactctcagggcagcaaccttcaccctgaccttcagccccatgcaggaagcagcccgtcggggtgagacacagtatccatctgtggccagagcccttgcacatttttgacatttttgtgtcttgggacaaaaggcgaaggaactcagatgaactggttcttgtttcctggtggaaaaacactcctgcccttatggaatcttcgctgttgtgtggttttgcctgtatttgtgtctctccctcactaccctacagttcagcagtagctattctagaaaacccacataaggtagacccaggaatgatttctgggattgtctgaggatatttaaggggccagagggctccctgcaccatcgatgctggccctggatctcctgccccrtctgccrttsgacttgccctgaatgcgtgaacaaatgaatgagcagacatttgctggacagctgctgccctccaggcactggtgtgctggtgttccacagcccgggggccgagagccactcaaagcattcatattgggaagttggcagggatggtctggtcaacagcatgggcgttggcattggagtcagatgaacctggctttgtcagaccctaaatagggtggccttggacagacctgcctgaacctgtttcctcaactgcaaaatgtgaataaagatagcacagtgtggtcggtgaggactgagcaaggaagtggctctagcacttggcatacacagttggtccttaraagtgggctttagaccagatagaccaaattcaaatctagatccagctatgagtcccttaacttctctgagtcttgatcactctctctgtaacatggtatagtaacctcttacagttgttgtgaggatttaggtgaattcacacatatgatgcatttataatgcagagaacctagtgcatggtaaccacctgtattagcttcctaggactgctgtaatgaagcacctccaactaggtggcttcaaacaacagaaactcgttctttcacagttctggatgctagaagtttgaaatcagggtgtcagcagggccactttccctctgaagactctaaggaagaatcctttcttgcctcttagcttctgctggtggtcagggatccttgttgttcctcagcttgcggctgcaccatctttgcaccaccacttcctgtgtgtcccatcttgttttagacaggatctcactctgttgctcaagctggagtgcagtggcctgatcatagctcactgcagcctcaaactcctgggctcaagcaatcctcccaccatggctggctaatttttaaattttttaagtttaattttatttattatttatttattttttaatagagatggggtcttgctatgttgcccaggccggtcttgaactcctggcctcaagtgatcctcctgtctcagcctcccaaagttctaggatyacagatgtaagccactgcacctggcttttagtttcttttttagagactggatgggtttcagtatgttgtccaggctggtcttgaacttctgggctcaagccatcctcctgtctcagcctcctaaagccctgggattacaagtgtgaaccactgtgcccagcccctatcctcttctaataaggacaccagtcattagacttagggcctaccctaatctagtatgacctcatcttaactaattacatttgcaaagaccctatttccacaaatggtcacattctgtgtctctgggtggacatgaattttgggggaacactgttcaactcacaacaccacctaatcaatagtagctattactaatactcctcttactayggaatttgctcagtgcatactatgtcctgggcacttctccaaactccttttattcctcttcccatttaatcctctccatgactgtgaaataggtcccaggattatctctgttgagggccagagaggtgagctgatttgcccaaggtcacatttgttagcaaatgataaatctggggttgggactcttttctctctgactccaaagctggcaaggttttgagaccctccaatcccatcccaagagcttggagtcggctgtactttctgtcctggaatcccaggcatcagacatatgctctttcctggcccacacctccttccagacacatcttacccagagaggctataaaaagcgggggaaaaggaatcttgtctttataatggccaacatggagttctgctcctgccttggaacgctcgtgtccggctctcccgtggattgaaagcagcrtgactcctgtgcatggcagagcttgccaggggtgtatatttcatgcctgacatctggtaacattttgggagtcttgacttggggctacaaatggaaaaatggttcatgaaggtgtgatttattcatcatcaagataatgctattaaataaatgctcgcaacgattcgctccattgggtcagagagccctgacttcccaggccgggcctggcgaaggccctggcaggacaaggctgtttctttgacgctgaggagagcatggaggcgtggtgaggccggactggggcctgataggggcaaacggtcacgctgccagatgatgaatggccgtttacattttaacacgcctgtgtcttggacgtggagtaattggctttggctgatcgggggtgggtgcagttaggagcctctgacagccatgagctggagaaggaaggagggtcatttccagagactggggctttggggccaggaaatagttgctttgtcagcagggagagccagtgggtgggttggaggcccctgagagagatcagaggatcctgaaggacaaagccaggctggccacctttgcagggggtagctggcaagggtgtaggaaccggccacgtggcagagagcaatgccccaaagccaggctgcctgggttcaaatcctacctccctcactgaccagctgggcctgggaccgcccctccctaacgtagggaccattacagggcctacctcagaggggtctgtgggtattgcatgggcgcgtggcacctaggggtcttcactaagtgttaactgcagttgtcatggtggtgatggtatctagagaagagtggaggctgggacgcagacagaagcagcccttgctgtcttctggctgtagatcaaggacaagacttaccttgccctctgcacagcaggtaggagccttctcctggacctgcctcagggcagtggggacatccaccggtccagctctcagcacattcaatgctggggttggttgccacccagcttgggcagcccacatactcagcatcactgggtttacccccaaatctccatgcgctacaggtgagttgccatgggttggcaagcagtccccgcacctgtggacatcaaggatctgtcttcacatccccttctgctcacatggctccagcccaggaggagatgggaggacaggtgtgcrcctctatgggcagccaaacctggggtggtgggtggggaaggtgtcaagtctgatgcatgtctgttagggttctgggcactgtgacgtgcatgcaggtggaaagtccattctcctgacttggagctggcatctgttacaccatgagagctggggcctgacccttcccctgtgtccctgttgcccccaggactggccactgacggagccatggtcaggctgtgggactcaggccagctggccgcggccttcccacaagagtcagttactggggctatcagatgctgtggctgttggttggtttgtctctgtggtgtcaagctgggccagcttttgggcaagagcagcctcatggggaacataatcaatgagaaaaggatggcagaatctagcctgggggttgctgggtggagggcagagggtgctgggctgcctggccatgcctcctcttcagtactgagctcagcagggggccccaaccccttttactgtaggactctgctggcttctgaccagaggtagctctaagcactggtcctttgcagccccaggaggaactggctgcgggtgaagtgaggacggaggtagagcttcaccttggtgaggggctttcctagggggacagccaggtgcttagccttgtgacagctgctcagtgagggttattcacagccccatcgggacttactgattgggcttcacttcctgattctgtgatattcacacggctccagccagtggttccatctatccacccatccatccttccatccatccaatcacccacccacccacctacccatccatccatccatccatccatccacgcacccatccacctatccacctaaccatctactcatccacctatccatccatccatccatccatccatcttttcttccttccacccatccatctatccatccaccaatttacccatccccacccactcactcatccacccatctacccactcatccatccatccatccatctatccatccatccatccatccatcccttcgcccacccattcatctattcacccacccaaccatccttccatccatctacccatctacccatccacccatccattcattttcgtggtcctcacaattagcctgtatggtggggatgtgctattatgcccattttcagatgagggtacacacatacaggttaagaactggtctgagggcagagctaatgagtggctgtattagttatctattgctattagttatctatctattagtggctggaggctgatttcagttcttttctatgtgggtatctccagcatggcagcttgctgtgtcaaagcaagaaagccaagaagttatatgtgtgtgtgtgtgtgtgtgtgtgcgcgcgcgtgcacgcgcgcgtgctcatgtgagagagagggagagagaaaggtggaagtcactgtgttttataacataatcttggaggtgacatcctgtcccttttgccatattctgctcattagaagtgcctacccatggctgggcatggtggctcatgcctgtaatcccagcactgtgggaggctgaggtgggtggatcacttgaggtcaggagtttgagatcagcctggccaacatggtgaaaccctaaacaactaaaatacaactaaaaataaccctaaacaactaaaatacaactaaaacaaatcctaaacaactaaaaatacaaaaattagccaggcatggtggtgcatgcctttggttccagctacttgggaggctgaggcaggagaatcacttgaagccgggaggtggaggttgcagcgagcggagatcacaccactgcactccagcctgggtgtcagggcaagactctgtctcaaaataaatcaaataaataaataaatagcagaagtgtccacccacactcaggccaggaggtgggatcactggaggccatgctagaagctgccttggccaagccaaggtttgaacccagtcggatctgacttaaaacctgtccttccagaggaagccaactacatacagagccttgttcttccccagtcccagagaccagccacctgtctgctgccacgcagggttggaatttaatcatacattgactcacttcatgggtgtttactgagcgcctactaacacaatgctccacaggacggtgtggtgcctgcctaggggaatgcaccgctggtgacggatatccatgctgtacatttactcacctgccatgtgggtctgcagagaacatgtcttttctttatttcctgcaatggatctgatatttctcacaaagcctactcatagggcaacaaggaaaaagaactagatttaatttaatctgatccagtactttaggcctttaggtaatgcttggtctcaaatttccttctgctcctcccagcttttctctaagctggcactgggtgggtgggtgggggtgggggtgtctgggtgttgatgacgagacttcccaggaggagagggatttctagccaagtccgatgcccaagattgctgcttggctttctggcattttggccgaaaccggcagtaggtaaaactcatgctctgggcctccgcctgcctggttgacttggctctaccttggctcagagcgccctcttcttttttttttttttttttttttgagatggagtttctgctcttgttgcccaggctggagtgcaatggtgcgatctcagctcactgcaacctccgcctcccgggttcaagtgattctcttgcttcggcctcctgagtagctgggattacaggcgccctgccaccacgcccggctaatttttgtatttttagtagagatggggtttcgccaggttggccaggctggtcttgaactcctgacctcaggtgatccacccgccttggcctcccaaagtactgggattacaggcatgagccactgcgcccagcctttttttttttttcagagccccctcttctctactgcatctgacccctacctgagccatctactcccagacccttctgcaggtccctctgccccttgtcttaatgaggtgtcacctacctgagcaagaacacattgagcccatcctggcccggaggggaccagtgtggccaaggaaagcgaaacaccagggcttccttcctctcaacttgctgcacctccaggggccccacccctaagctgctggagggtggtctcagagcactttcctcccaagcccccagagggtcagtgcgcagcggtgacttctaaacctactgtctcatagcaaagtctgtgttgatgatcaggaactagatctgccatggtcctctttattccttctgtacaaattcaaatattttccaggtagccaggtgcctcaggcctgagaggggaagggctacttacccagaaaggccaaagaggaaagcccagtaatatttttcgagctattaatattacctggtaccaaaatgatcacacatgtaattagtcacaatcgtggtaaaagtgctgaagagaaagcctatgagtaatgagggtgtcaggagagtggcctgacctagcctaggggtcaggagaggtggtcctgaaccagggttgggtaaggggatccagaatgaatagcggggtggctgggtgaagaggggagtgtgtatgtgcatgtgtgagcatgcatgtgtgggtgtgtgagtgtgcaccatgtgtgcacatgtgtgagcatgcatgtatgggtgtgtgcgcgccatgtgtacatatgtgtataatgtatatgtgagtgtgcatgtgcatgcgtgtgtgtgcatgtgtgtgactgtcctgtgtgtgcatgtgagcaggtgctgtgtgtgcatatgtgaacacatacatgcatgggcatgtgtgcatgtgaatgcatgtcatgtgcatgcatgagccatgtgtggtgtgtgcatgtgtgtgtgcagcctcatcatttcctgaatttttttttttttttgagatggagtctcgctctgttgcccaggctggagggcagtggcttgatcttggctcactgcaacctctgccatccaggttcaagtgattctcgcgcctcagcctcccaagtagctgggattacaggcacccgccaccacgcccagctaatttttgtatttttaggggagatggagttttgccatgttggccagtctggccttgaactcctgacctcaagtgatccgcccgccttgacctcccaaagtgctgggattacaggtgtgagccactgtgcccggccatttcccctaatttgaggcactccattctctgagtctggattgttgtgtgggtgtgtgtgggaaaggaaccgcactgaggagggagaatcagattctctgaggaggaggcgcaaaggttggggcctctgcaggaagcagctttgcctgttcatgggactgagaggggactcagcttctggagtctgagtggttggcaccaccaggggaccacagtggtgggagcatcaggggcaggaggaggaaggtcactgtgtcccccattaggaatgtcctcctctctttcctgctggtctcagagctgaggaccaggatacagatggccaggtgcctctgtcaacagactcaggtgactgggcagagtcagtttccccacctgtgcacagcgaaaaagagatctgtctctgccgggatgatgagtggacagttctcccgggactggcagagcaagcctcagactgagggcagccagggaacagcaggtcatactcccatggcagaatgatgctaaggttcccagggtgtcccaaacacccttcccaccccctgccccagtctcatgagagggccatggacgctgacactgtaactatcctctgctagtcaggcagatgctagtcacagcagcatggaatctcagaaacagccctcacagtgggcagtattagtatcccctttccacagaaagagaaatggaagctcagagaggctacggaacttacccgtaatcacaaagcaagcacgtgtcccaggtctatgtgatctcaaagcctttgctactctgactcccacggctgctgtgtgaattttcagtttcctgaaggggagaagaaaacaatttgctctaggaaaagcttcaagggccagacttcagaaatgcccagagctgtgagttcagtatcatggcccctgccctcccctctctatgcaggggccgtacagtgagctgagccgcggtgaggacgtgttaagaacttaaagcagcggccgggcgcggtggctcacgcctgtaatcccagcactttgggaggccgaggcaggcggatcacgaggtcaggaatttgagaccagcctgaccaacatggtgaaaccccgtctctactgaaaatacaaaaattagctgggcgttgtggcgggtgcctgtaatcacagctacttgggaggttgaggcaggagaatcacttgaacccaggaggtggaggttgcagtgagccaagatcgtgccattgcactccagcctgggtaacagagcgagactccctctcaaaaaaaaaaaaaaaaaaaaaaaagtagtttaaagaacttaaagcagaaacccgattttgaaatgttcaaggacaaggccagggaggctcgtttggggatggggtggaggtttcagtccatttaagtgggctggaggggawttttaactttgccggctgatggttaatgttcccttcccaaggtattcatgatttatgctgatgctttaaaaagaaaatttagccaagctaggttcagagtccaggaagctaaggacaaggcattcaggaaagctttgtttgtaggggaggttaggagggatagaagcatattccagatacctcgcccgcttttttactccactcacccaaaggagaggtcaccttatcacataagaccgtaagatagctccccaggagggatcatgcagataagatgtttcttcctatgtttgaagaaataggtgtcctaggctggtcgcggtgactcacgcctgtaatcccagcactttgggagactaaggcagtggatcacttgaggccaggagttagagaccagcctggccaacatggtgaaaccccattgctacaaaaaatacaaaaattagctgggcatggtggcacacgcctgtagtcccagctacttgggaggctgaggagggagaatcgcttgaacccagcagaggttgcagtgagctgagatggcaccaccgcactccagcctaggcaacagagtgagacgccgtctcaaaaaaacaacaaacaacaacaaaaaacaaacaaaacaaacaaagaaatgggtgtcctaggctgggcgtggtgactcacgcctgtaatcccagcactttcagaggtcggggcaggtggatcacctgaggtcaggaattcgagaccagcctgagcaacaggcgaaaccccatctctactaaaaatacaaaatttagctgggtgtagtggcaggcacctgtagtcccagctacttgggaggctgaagcaggagaattgcttgaacccgggagacggagattgcggtgagccgagattgcgccactgcactccagcaacagagcgtgactctgggcaacagagcgtgactccgtctcaaaaagaaaagaaaagaaaagaaaagaaaagaaaagaaaagaaaagggtgtcctttctctgtattctaggcctcttgtcttggctgaattgaagaaaaatgtatataaggccctagatgttcactgtcatgttaataaacccttccttggtcttcattctggggcctgaatggaaaaacgaaaggcccagagtctgggccttgggactcagcattacaagggatgggaccctgatttatactggcttaagcaaagaagggaatttactggctcataaaatttagatgtctgggattcggtttggctttaggtatagctggatacagtgaggtgcgtggcgacggggggccttagggctgattttccttcacctagcttggagcagattccttggttgaaccagtcatggtggccaaaagaacgtggaggtgtgactgtctgtgttctactccatgtaactacgtgmactgaaaagtggtgtgggatcattcgccataagaaacccacccggcaggcacagtggctcatgcctgtagtcccagcactttgggaggccaaggcgggtggatcacaaggtcaggagttcgagaccagcctggccaacatgaggaaaccccatctctactaaagatacaaaaaattagcccagtgtcgtggtgcgtgcctgtaatcccagctactcaggaggctgaggcaggagaattgcttgaacccgggaggcggaggttgcggagagctgagatcacaccactgccctccagcctgggcgacagggcgagactccatctcaaaaaaaaaaaaaaaaaaaaaaaggaagagggggctctgagccaaggtagagccaagttagccagacaggcctaggctccagcaatcttcttgcctcagcctcctgagtagctgggaccacagtcacacatcaccacgtccagcattttttttttttttttggtatttttagtagagtcagggttttgccatgttgctcaagctggtcttgaactctagggctcaagtgatcctcctgcctcagcctcccaaaaggctgggattacaggcgtgagccaccgcacccggccagcaccatggggtttttttgtttgttttgttttgttttttgggttttatttttgagacagggtctcgctctgtcacccaggctggaatgcagtggcatgatcttggctcactgcaatctctgcctcctgggttcaagtgattctcctgtttcagcctcccaggtagctgggattacaggcatgcgccaccatgcctggctaatttttgtatttttagtagagacaagtttttgccatgttggccaggctggtctcaaactcctaacctcaggtgatcctcctgccccggcctcccaaagtgttgggattacaggtgtgagccaccgtgcccagccgggtttcttttttcttcccccaccgatttcccacttcatggcagacacagcaccctttcctagtgagcccatacacagcctcagaatctatctcaacactatacccaaagcaaccaatatctcccaccttggcgttggaacctgagctgaaactctttgcaattcctgctccaagcagatggagataaaaatgcgcagctctgagcgttgagtgatttgcccaatgtcacacgggaactcaggcagagaaccctcctgactcagccagccccctttcccgtgggatcctgcctgatgtgagccttgaaagaaggtctgtccctcagtggagatttccactccaggcagcggctgcacacacacatggaaaagaaatagactcgaggtcagagcaaagccaacagtgcgactgctgacccagctctcaggagtggcgcacagcatggagagcagacaggcgsgagggctcacagcctagcagccacgctgtttgtccaccacagagatctcactgggcttcacggtgtcctaccttaaatattaggttggtgcaaaagtaattgcagtttttgtccttgaaagtaatatattggggccaggtgcggtggctcacgcctatagtgccagcactttgggaggtcgaggcaggtggatcacctgaagtcaggagttcgagaccagcctgaccaacatggtgaaaccccgtctctactaaaaatacagaaattagccaggtgtagtggcgagagcctgtaatcccagcaagtcgggaggctgaggcaggagaatcgcttgaagccgggaggcggagtttgcagtgagccgagaccacgccattgcactccagcctggggaataagaatgaaactccatctcaaaaaaaaaaaaaaaaaagagagagagagagaaagtaatatattaggtattcaagtattagatacaattaaatctaataatgtgctcgagttgacagccattctcaaattgtgagagaggtgaggtgttttccttctggggatggggatcagggttgtcttggatggggggacaaatggctggcaccaatctagrgaagccagaaagtagagagtaaatactgatgtggccattattctgccagctcagtcttgcccaatgaaggggagaaaataggtggcagagaaccagccgcttgtttgccatagaaaggtaccgaaaggctgtcctgacctctaggggcctcttgtgatatgaacttcatcattttagggagctgaccttgggctcatgtgctcacaacgccaagaccttcacatatgttatcctaattagtattcacagaatagtcctgtgaagcaggtagagttattccctatgatcagacgctgcactggggcgcttggagaggtggagtcgcactgcctgaccctggctagtagccactgtgccatactccacgggctggcagacactgtgaagccgaacagaacagggtatgtgagccacctgacaatcattaagcacgttgtagccagcagtaggtctgggtaaggtgctgatgggaggcagcatgtggcagtcccagcctcaggtcacttgctgaaggacagaggtgcactggagaaaatgtggcctcggaggcagaatcacgtcagtgaatacctgtgtgactcactcagttgagctcagggcctacaaacaggtgcagtcagcagtttgaaaacttttttttttttttttttttttgagacagtctctctctgtcacccgggctggagtacagtggtgagatcttggcccactgcaacctccacctccccggttcaagtgattctcctggcttcagtctcccgagtaactgggactacaggcatgcgctatgacaatctggctaatttttatatttttagtagagatgaggtttcaccatgttggccaggctggtctcgaactcctgacctcaagtgacccacccgcctcggcctccccaagtgttgggattacaggcgtgagccactgtgtccgtcctgaaaacttcttgtctagcacaaactcccattgtacaggtgagaaagctgaggcttggaaagaattgacttcccccgtgtcaccacggccagagagtggtggggccaggactgggatcctccctggggtcctggtccagtggacacccctgtgggtccacgagagaaggtatgaactgtgatggaagggcagtggtgggccacccgagaggagggtcctgggtgggcagaggcatccaggcacaccagatggagaaatagcttagggcgctgtgtctcactctctgcaacaactccccatgggagggatgacagcagtcacggctgcacctatgaagtccgccacctgggctccaagctagccctgccactctccagccagtggctctgggtgagtcatgtcacctgcctgaacctccctggacctcagcaccttcctctgagcgtggccgtaagcctcaagtgacattatcccacagcccattgcctggcccttagtgcccaatttcaccaatgtggccaattatgactgcttatttatttccatttggaaattggcttttaattccttttggcttttcccttcttctctgagggctcctccttcagagggtcctgccctggataaagacaaaagcagatgctcccaggtagtctgggtcacacccacgcctcccgtgggtctggaagtggctggaggaggagtgagtctgcggctgatccttttcctcatcaggagtcagctccttggagcctcccagggatgtctggaggggctgctgattgcagaaccagctggaagggaaattcgagggcagatgtggcgacaacggaggctgcagcagtcagagcttccccgcactgtagtggcacaggtgccacgcctggagcccatcagccccatgttcaaatcccagtgccgccactgcctgcctgtcgagtgaatgtgattcctcccacggttggctgaactggctatggacagcagctgtcctgcgcgggaccccaggggaaatggaaaacatatctctgccccaggccagcttccccttctctcccaggccccgacctgccctttagactcaggagtcctggcttcaccctttgtccggaccttcaagagacaacacaactctgataacagcagttccgaggctgagaaggggttgtcgtggggacagcgtgttcctgcagctaagccttaacctctttgcctctcctcagaatgcttcagaccaggaaaggggaacttgtcacttgggacttgcagggacactgttttgaaagtaaactctcccaaagagcctctgcctgctttagggaggaatgtttgtttgggttctatgaatcagaaacctactctaccaatttcaggttaaaaaaggatgtgtcacaaggctatggagatgtttattttcttttggttattaaaaacatgttaggctgggtgtggtggctcatgcctgtaatcccagcactttgggaggtaaagacaggaggattgcttaagcccaggagttgaagactggcctgggcaacatagtgaaactgtgtccctacaatttttttttttattttttaagacagtctcgttctgttgcccaggctggagtgcagtggcgtgattttggctcactgcaacctccgcctcccgcgttcaagcgattctcctgcctcagcctcccgagtagctgggattacaggcatgtgccaccacgcccagctaatttttgtatttttaatagagacaggttttcaccatgttggtcaggttggtcttgtactcctgacctcaggtgatccactcacctcggcctcccaaagtgctgggattacaggcatgagacaccgcacccggcctctacaaaattttttttttttaattagccaggtgtggtggttcctgtagttccagctactttgagggcataggtggggggtgctgaggtgggaggatcccttgagcccaggaggtcgagcctacagtgagctgtgtttgtgccactacactctagcctgggtgacagagcaagaccctgtctcaaaaaaaaaaaaaaaaaaaaaaaggtaaatcccagaaaacccaatgacactaatttaaaggaagattctttggttcgtgtaatggaaagttcgggggtagtgctgtgatttggatagggggtgtttgtctccaccaaaactcatgttgcaatttgatctccactgtggcagtgttgggaggcggggcctagtgggaggtgttgggctatggaggtgaatccctcatgaatggcttggaagtgctaccctctcaccagtgagtgagttcttgctgtcactctcgtgagactgaattggttctccatctaactcattgctgtgagagtgggttattataaagctatgatgaccttcaggttttccccttttttgcagtctcccttctgttttcccttttcctgcgtgtggtgatgcaacgtgcaagcccttgccagaagtcaaggccatccctttaaatgtctcagactgcagagctataaaatgaaataagtctcttttctttatacattacccagttgcaggtattcttttatagcaacacaaaatggactaagacaagtagagtgggtttcaggtgaagcttgatccagccacttagctctatcactgggatccagaatcccacagcacctgctcctctttctatatggacgtactccccagratgaccaccccacatccaggtatccatcaccttttagctcaagtatctggaccaacaggaacatcctgtgtctcttgattcacgtttctgagggagggaatccagtacccaggctcatccttttggggcatgtatctgaactcatgttcgtggccagtgagtgaatggtctctccggggtccggtgtccatagcttgttcagtcatcagtggccagaccatgtgggtcacgtgcctcctccacctgattggagatagggtgtctgagaaggggtcacaaacaggtcagtcaccccaataccttcccagagaagtcaggactcagctggtgattatccgaggaccccataactcctccctggcctggaaaccacccaaagaggcctattttggtcttaatttgtaattttgggagaattttaagtttggttctggttagaatttttttttttttttttttttgagacggagtttcgctcttgtcacctaggctggagtgcaatggtgtgatctcggctcactgcaacctctgcttccagggttcaagtgattcttccgcctcagcctcccgagtagctgggattacaggtgcctgccaccacgcctggctaatttttgtatttttagtagagatggggttttgtcatgttaaccagtctggtctcaaactcctgacctcaggtgatccacccccttcagcctcccaaagtgctgggattacagttgtgagccaccgcacccggccctggttagaattttcatgcctggatatttcctgatgttttgtttctggttcattcaggaggagaaattcagacttcggttcaggaaatggttttaatcactgtccccaagaaatcggccaacaagcacatgtgtccaccatcaggtggaaaacccagaatcattttcagatggctgttaaccagcggcagggtggcttctgcaagcaaatgctgcattattattttttttctttcataccaggaaaagggttttatcttcaaaacaatgtatccacgtcactaatcggtctggaagaacttgtttggccaaatttagaatccacaataaggtcagagagaataaatttagaactgaactctgagctctcagggccaacagttccgtttggcactgggtacttgctaactccatctgccacctagagcttgattgtatttcccctttacctcccaggtccaccagaatttgcaggataacgtagccttggagagtaagacctggcatctaaacctgtcttcaccatttataagctatgtgactctaggaacgtgtttcatctctctgagccttagtttcatcatcttttaaagaaggctggagggtaataataacatcttataaaataacatgtaaagattgattataattttttttttttgagacagaatctcgctctgtttcccaggctgcagtgcagtggggcaattacagctcactgtaaccttgatctcttgagtctaatcaatcctcccacctcagcctcctgagtagtaggcatataccaccacacctggctaatttttaaaaagttttattttgtagagataggayctcactctgttgtccaggctggtctcaaactcctgggctcgagcgatcctcccaccgtggtctcccaaagtgctgggattacaggtgtgagccacctcgctcagtccaaccattctgatttctgtctctgaatttgagtattctaggaacctcatataaaaggatcatacatcacttgtccttgtgtgatgggcatattttcttatcataatgtcttcatggttcatccatgttgtcgtatgggtcaacattttcttcctttttaaggctgaataatatctcattgcatatatacacaccacattttgtttatccattcatctgtcaatggacatttgggtctcttgcacctttttgctatgatgaataatgtggctatgaatatagatgtacaaatatttgttagagtccctgctttcgcttcttttgggtacatacccagaagtttgattaaaacattttatggaggctgggtatggtgtctcacacctgtaatcccagtactttgggaggccgaggtaggaggagcacttgagcccaggagtttgagaccagcctgggcaatataccgaggccctgttactacaaaaaaataaaaataaaaaaaaattagccaggcatggtggtgcacctggagtcctagctacttaagagagaggctgatgcagaaagatcccttgagcccaggagttcaaggctgtagtgaggtatgatcgcatcactgcactccagcctgggcaacaggcaagaccctgtctctcaaaaaaaaaaaaaaaaaaaaaagtaaaagacatttaccctatgcttggcatgtagtaaacactcaacacattgtagccaataaaactagtattagaaaaatactgggtgaaatttttttaatgcagatttaagaatgagatgtcattttgcctgtcaaattaacaacaactaaaaggtaataatcctcaatgcagctgggatgtggtaagatgggttctctctctctttctctctttttttttctgagaagagtctcactctgttgcccagactaaagtgcagtggtgtgatctcagctcactgcaacctccacctcccaggttcaagcaattctcctgcctcagcctcccaggtagctgggattacaggcacatgccaccaggcctggctaatttttgtatctgtagtagagatgaggttttgccatgttggccaggctggtctcgaactcctgacctcaagtgatccacctgcctaggtctcctaaagtgctaggattataggtgtgaaccaccatgcccagcctctctctttctttgtgtgtgtggagagatggggtctcactatgttgccaaggctggtcttgaactcctgggctcaagtggtcctcccaccttggcctcccaaagtgttgggactataggcatgagccacctcgcttggccacagggttctctcatacacatctgtaggtaatctttctcgaaagcaacttgcagtgctaagtatggtatatcaaggctcttggaagtgatcatactatttgaccaacaatttaacttctgagaattcatcctaaagacagagcctcaaacatagaccaagatttgagtctggaggtgtttatcacagcaatctttataatatttcggaagcaacttctatttccatccataggaaacggtttaaaaactaatgtagggatgggcccccaatggactattttgcagtcattagaaatgcttgtgagttggccgggcacggtagctcacgcctgtaatcccagcactttgggaggccgaggtgggcggatcatgaggtcaggagttcgagaccagcctgaccaacacgatgaaaccccgtctctactaaaagtacaaaaattagccgggcatggtggtgggtgcctgtaatcccagctactcaggaggctgaggcaggaggatcatttgagcacagacaggagtttgaggccagcctgggcaacacagcaagactctgcctctaaaatgaggcagtgaaacaggaaactgtatacgctatactgttttatgaaaaagaagataaaaaattgtatatatttctcctataaaataggtaccatttgcatttattgttgctgaaccttcwctaagctctatatatactttctcttgtttactcctcccaacaatcaaagaggcaggcactattattacaccatttgacagatgaggaaacagaggttccaagtggtgacatgattctcagggttacacagccagcaagtggcagagctaggattcaaacccaggcccctcgactccaaagagtagaaaaggaaaggacagcctggccaacatggtgaaaccccgtctctactaaaaatacaaaaattagccgggcatggtgatgcgggcctgtagtcccagctgctcrggaggctgaggcaggagaatcgcttgaacccaggaggtggaggttgcagtgagccaagatcgcatgctactgcactccagcctgggcaacagtgagactccgtctcaaaaaaaaagaaaaaaagaaaaaaaaaggaaacaattctgcagtcaagcctaacctaaccataggagtgatttttactttcttcttcatacttgtatttttttcccaaactgggaggaggtagagggagcaatttactagataaaaagggaaagaaacaattgctagtttcaagcaggcatctttgaagataaaacatgaaggtctcgtgcctcatgccacgaactcagttcgtgttcatcttttttctggttaaagaagagcagagtgtcctggctgagtcttttggctgattgcttaataatgggagggtgtgctgtggacacacacacacacacacacacacacacacacacagcccacgctaaccgagacaggagggagacaaaacccagcagtagccaaaactctgctagatcgatgcagactgttacaggcgcagctttccaaaaagcagagctcagtgaaataaatatttttcctgtgagaagaggcttaagtcggcgatcttaacaaccccccaattcattccagattcactcggtgcagctgtcgtcagcgcgcccatcttgatacacttaggattgcttggtaactgcagtgagcccgtgtgtctggctgctttcacccactgggcagtgtgccctggggcgctgggcagggggacaagaaggagtttgtccctggggaaccctattcccaccccgtctcagctccccacaacttctgggggtttgtcactttgtttccccttgtaaaaccactatttaatctaaactggaggcctgagaacgcaacctcttcttggcaaaaggctccattctcttagtcctggagacaatatgcaggaagaatgtacagtcagggactcaggaaacatacaaatgaaaagtctgggttacctcaaaaagcgggagcttcgctacccagggagaaattcgttgatgagttcatttacttgctcactcaacaatggttggccgggtgcagtggctcacgcccataatcccagcactctggggggcctagttgggcaaatggatggcttgaggccaggagtttgagaccagccatggcaacatggtgaaaccccatctctactaaaaatacaaaaagtagctggtgtggtggtgcgtgcctgtagtcccagctactcggggagttgaggtgggagaatcacctgagtttgggaagttgaggctgcagtgagtggtgatggcaccactgtacaccagcctaggcaaaagattgagatgctgtctcaaaaaacaaaaagacaaaaaaacaaaaaaaccccaccaaacacacacaaaaagcaatgtttaattgaatcacctcctaagtgtaagatgtggaacaaagctgatataagagaggacaaagccactggagatacagattcattcattcgttcatggatgtttgctgagtgcctcctatgtgttaggtcctgtcctcttagtgctggggacttagcagtgaaccacgcagacaaaaactctgcctcctgggagcttgcagtgagccgagattgcgccactgcactccagcctgggtgacagagcaagcctccatctcaaaaaaaaaaaaaaaaaaaaaaaaaactctgcctcctgggagagtcatgaggtcaggagttcgagaccagcctggccaacggagtgaaaccccatctctactaaaaatacaaaaattagttgggcatgatggcaggcacctgtagtgccaactacttgggaggctgaggcaggagaatcacttgaacccgggaggtggaggttgcagtgaaccgatattgcgccactgtactccagcctgggagacaagagagaaatttcatctcaaaaaaaaaggaaagaaaaagaaaaaaccctgcttcctagtacttgccccctagcacttctagttggggtgacaaacaccagacaaggacaaggtaatgtttggaatgtcagatggtattaaatgctaaagagaaaaataaagcaggaagagggaattgggagacggggtcccggtggtcacacttacagataaggggccaggaaaggtctcatgagagggtatattgaagtcacaacctgcaggagatgaggagagcgcattaaataacagtgacctctggatcatgcaagccccttttcaatgatctttcagcactgattatgccagtgagaaatatccgaggcggatggattgtttgactccaggagtttgagaccagcctgggcaacatggcaaaaccctgtctctacaaaaaaattcaaaaagtagccaagtgggtggtgcatgcctgtagtcccacctacttgggaggctgaggtgggagaattgctcaaacccgggaggcagaggtttcagtgagccaagatggcaccactgcactctagcatggacaacagagggagaccctgtctcgaaaaaaaaaaaaaattagccaagtgtggtggcatacgcctgtaatctcaggaggctgaggcaggaaaatcgcttgaacccaggaggcagaggttgcagtgagccaagattgtgccactgcactccagcctgggtaatagagggaggctgtctcaaaaaaaaaaaaaagtatacaatttagtgtttttttcttttttttggcatattcacaaagctgtgcaaccatcaccactatctaaatccagagcagttttaccccagaaagaaaccccatacctattagtaatgactcccattctcccctccctcaacttctggcaatgactgatccactttctgtctctctggatttgcctgctctggacttgcttgtccgtggagccataccttctgtggcctgctggttctggcttctttcacttagcataccgttttcaaggttcatctgtctcacagcatgcatcagggcttggtcccttttatatggccctatagtgtccctttgtatggctgtcccacattttgtttacccactcatcagctgataaatatttgagctgtttttacttcttggctactatgagtaatgctgctctgaatgtctgtgtatgggttttgcgtggacatatgttaacattcctcttggatgtatacttaggagtggaactgctgggtcgtatttacatttaaccatttgcttaatttcatacttaaccatttgaggaactgccaagctgttttccaaagcagctgcgccctcttacatgtcaccagtagcgtaccagggtttcagttgccccacatcctctccagcgcttgctgtggtctgtcttttggatgacgaccgccctcgtgtatgtgcagtggtatctccccagggatttgagctgcatgctcagccgtcaggacttcggtcaaggctgtgcttatgggtatagagagggcttggtgatttcttttttcttttcttttctttctttcttttcttttcttttctttttttttttttttttttttttgagacagaatctctctctgtcgcccaggctggagtgccgtgttgcaatctcggctcactgcaacctccacctcccaggctcaagcgattctattgtctcagcctcccaagtagctgggattacaggcgcccgccaccacgcctggctaatttgtgtattttcagtagagatggggtttcaccatgttggccaggctggtcttgaattcctgacctcaagtgattcacctgccccagcctcccaaagtgctgggattataggcatgaaccaccatgcccagcctcggtgatttcttgagtgacagtcggtggggcctcagggtttggagcctgggaggacttgggggtgggataggcctggggagagtacatgccagggacagaactgggagactggacccacccttttcctgggcccagggccacctcctcccttacaggtgtaaggccttggcctcaggcttcatgtagatcaagagaaagaggttccacagcagaaccctaaatgcaaatgcttcctcagggaagccagtgcaaaggaagtcttgaggagggagctccactcaggcctgtgccagactccgagggggagttcaaagacctaaggtcttgtctttgccccgccatgtccacaataacataacacatgtaccatctactttccctgaagttgtggttttctgttcaggttcctgattccctaattggcctgtagctcccagagcagcagatctgggctcctccccctcttctctggtgtgtaggcagtgcattgaagaacacaggtgcattggtgttagttctcagctcgtttctaatgtttaacatatacagtgtttcttgagctattactatgtgtccttacgatgcataccctgctctgatgatttccatgcattttatttccactgctatttcacagatgaggaaaccgaggatataagaggtgaggaagggagtgtggacaacgttccacagccagtggatggaattgccaagattcgaacaccgttccatctgactccagagcccttgtctctaaccaccagactatagtgggagggtagattgagtaggggccttccattctcaggcttccttgacagagtatgtattggttttctattgctgtgtaacaaatgatcccagacccagcagcttaaaacaatatccatgtatgagctcacagctgtgttggtccggagtctggcatggctgagttctctgctcatcgcaaggctgaaatgcaagatgttggtccggctgagttcttgtctggaggatctggggacaaatccacttccaaggtcattcagttccgtgtggccataggactgaggtccccatttccttcctagctgtcactggggggctgctttcagcttctagaggcctcctgtattggccaccttcacctccaaagcctgcaatggaaaatctctctcacgctgaatccctctcatactttgaatctccttggccagtaagagccaacaggaggctgaggcaggagaactgcttgaacccgggaggcagaggttgcagtgagctgagatcatgccactgcactccagtctaggtgacagagcgagactcggtctcaaaaaaaaaacaaaaaacaaaaagccagtcctgtttgagggctctctgattaggtcaggcccacccaggctaatctcccttttgtcatataaggtaaccatggcagtcagatcataatattcacaggttctgcccacaatcaaaggggtggaacctgtgagtattacrggttagmgaagtcgagcgtctttgggatcatcttaatattccactcactgrgactggggaaggtcttgggtgctgataataacaatagcaatagtgatattggtacttcttttcctttgcttagaactttgtggattacagactgattatacatctgtaatcctgcaggagactgtgatggactgaatgtttgggtcactctaaaattcatatgttgaggttggatgtggtgtctcacatctgtaatcccaacactttgggaggccaacgtgggcaaatcacttaagctcaggagtttgagaccaatctgagcaacacggtgaaatctcgtctctactaaaagtacaaaaagttagccaggtgtggtggtgcacacctgtggtcccagctactcaggaggctgaggtgggaggattgtttgagcccgggaggtggaggttgcagtgagcagagattgcgccactgcactacagcctggcaacactgtgtgagatgccatctcaaaaaaaaattcctatgttgaacccaaacccccgtgctgtgattaggaggtggggcctttgggaggtgaatagatctcgagggtggaggcctggtgaatgggattaatgggattagtgctcttataacttccagagtgttctcttgcctcttccctccacgtggggatgaaatgagaggaccatagtctgcaacctggaagagggccctcaccagaaccttaccatgcagtcaccctgatctccaactcctcgcttccagaaccatgagaaataacccccagccccactccccgacccaccagcttatggttctctgttacacacagactgcaggctataaagtatgtgcctgtatccccatttcacccatgaggggagtacagctcagacaggagactgcctagttagcccggctggggctggagcccagatcttttgaccccaggccagggcttttggcgcccagatcatcccctgcccccattggaagcctcaaacctcattaccgtccttggaagggggcaaagtatctgcttccagccagcctagccctcagggagcgcttccctgtaaactcaccccattgggtcatccaaatggcttttacaggaattgccactgggctgagsgaacctcacctcattaagcaggaaaagcaataaagcctgagggctgcagaatcagaatagttcctgggcaggaagggcccagtccctgtgggtgggggtgggggacaggcaggctgggccaggcctggctgcatggccaagaccaggggtccatgctctccagagggaaagtgtcaggactgtcaccattgtcccacctctgagtgtgccaggcatccttcccaggggcctacatcttttcttttttttgagatggcttgctctgtagccaggttggagtgcaatggcatgatctcagcccactacaaactctgcctcctgggtttgagcgattctcctgcctcagcctcccgagtagctgggattacaggtacccaccaccacccctggctaatgtttgtatttttagtagagacggggtttcgccatgttggccaggctggtctccaactcctaacctcaggtgatctgtccatcttggcctcccaaagtgttgggattacaggtgtgagccattgtgccctgcccctaattcaataccgtcatatccttataagaagaggaagagctgtgaagacagagacactgggaagcaccatgggacaacagaagcagagattggcgtcatgcagctacaagaccagaaatgccaaggattggtagccatcaccagaagctaggaagaggcaaggaaggattctttcctagatcctttagagcaagggtycccaacccctgggccatggacttgtacttgtccatggtctgttaggaactgggccacatagcaggaggttagcagcaggcaggtaagcgaagcttcatctgtatttagaaccactccccattgcttgtgttacctcctgtctgatcagtggaggcgttcaattctcacaggagcacgaaccctattgtgaactacgcatgcgagggatctcggctgcatgctccttatgagaatctaatgcctgatgatctgtcactgtytccatcacccccagatgggaccatctagttgcaggaaaacaagctcagggctcccactgattccacattatggaatgtgagttgtataattatttcattatatattacaatgtagtagtagaaataaagtgcacaatgaatgtaatgcacttgaatcaccccaaaaccacccacccaacccccaccctggtcagtggaaaaattgtcttccacaaaacttgtccctggtgccaaaaaggttggggaccgctgctttagagggagcatggccctgccgacaccttgatttggacttctaacctccagaactgcaagacaataagtttcccttstttgaagccacccagtttgtagtatttttttttttttttacagcagccccaggaaaccatagagtaccctggatttttttctttcttttttttagagatggagtgttgctattgtcacccaggctggagtgcagtggcatgatctcagctcactgcaacctctgcctcccaggttcaggcaattctcctgcctcagtctcccgagtagctgggattacaggtgcccaccaacacacccagctaatttttatatttttagtagagatggggtttctccatgttggtgaggctggtctaaaactcctgacctcaggtgatccacccgtcttggcctcccaaaatgctaggattgtaggcatgagccaccgcgcctggccactaccctggattttaaccttagcagcacaaagtggtaggataagctataaattatattttgtgttttccttttaatgaagagaaaaagagcaagtcctcgcaactgaaagtaactgtaagataatttcagtggcttccaatgtatagatgaggaactggaggctcaaagaggataagtgacttgtccaaggtcacatagtgagaatgaggtggccgggtgcggtggctcatgcctgtaatcccagcactttgggaggccgaggcgggtggatcacgaggtcaggagatcgagaccatcctggctaacacggtgaaaccctgtctctactaaaaatacaaaaaattagccgggcatggtagcgggcgcctgtagtcccagctacttgggaggctgaggcaggagaatggcgtgaacccgggaggcggagcttgcagtgagccgagattgcgccactgcactccagcctgggtgacagagcaagactccatctcaaaaaaaaaaaaaaaaaaaaaagagaatgaggcaaaggctagacttgaacttctgttgactccaaggcctctgctcacctctgtgtcagtctgtgggtgtgtatctcacaggttattggcatgtctgcaaagagtcccaaaatcctggtccccagacgtcacttttcttttttttcttttgagatggagtttcgctcttgtcgcctaggctggagtacagtgatgcgatcctggctcactacaacctccgcctcccgggttcaagtgattctcctgcctcagcctcccaagtagctgggattacaggcgtccgccaccacgcctggctaatttttgtatttttaatagagacagggttttgccatgttggccaagctggtcttgaactcctgacctcaagtgatccgtccgcctcggcctccgaaagtgcggattacaggtgtgagccaccacgcccggcccccttttctttttcacatgagctcaaaacttagtactgtcctttttcttatgggaactacctatgctagccacatttcctgtaatatgagcccctatgaagcaagccttctttccctggtgatctttattacaaaattggagatgcattcccaacgaaatcatctcccagtagacccaagcaagaatgtttggcaaataagaaattaattaataaacagcttgtagtacacaaactttagtgtctgcctggaatattttgcaacacttttggaaactctagaattacaatcccagcacaagctgtttatttcaggctgttaggccacatacatatctcatatgcttgagaatctagtgactccactctgagcatcaggaatggagcccctgttccttttgtgtgggcatttatagtggctggtagagcagggttgcaatacctggggagaccaggagggggtctgcttccaacaggaaatggatttaaggctaaaggttcttgaaattcaaggctttgggttctagaaaataagtctgttcctttgggaggaaatccactttcctcatgatgtaggttaaccatctgacttaaagttgctcagtcctgggccacgcacagtggctcccacctgtaatcccagcactttgggaggcccaggagggtgaatcgcttgagctcaggagtttgagaccagactgggcaacatcacagcaaaaccctttctctaaccaaagatacaaaaattcccctggcatggtggtacacacctatggtcccggctactcaggaggctgaggcaggaggatcactggagcctaggacattgaggttgcagtgagctgtgaccgcaccactgcactccagcctgggcgacatagtgagaacctgtctataaataaataaataaatacataaatacatgaagttgctcagtcctgggaatggaacaaagaagatgtgaaaaaaaatctgacttttctgcctccctgcatagatcctgccccagggaggcgctttagctggggtcagagtgcctggaacagtctccctctccaataggcaccaggatgaaaaagaaactgcatatttcactgtcaaaagaaaaaccagaacagcaggcmggcttgatgtgtctcttgtaaattgtttacctctggaggaccagatggctcatctcttgttgaacccttgaccacttcccgtgctgttaacagcctccactagcaaacagacccggctccaccggctcacgtggctgtgcgggagtcccaaggccggctggcctgtggggagttgtgggcattccagagggttgactsagcagtcctgggctccggatgcttgaggaaatgcaagacaggaaggatctaggttaggcaaatggtcaggtgtggcagggatggacagcagctggarggrgcggggatgggcttgaactgcgcatgcccacagggttcccagtgcccttaggctatggccctagcgcctcacccttctaacgtagggtccttctaacgtagtccccattcacctcactcgctcacctcttaccactcagatgcctttgaatgtcagcctctcccccggccccacctcgccctggctacgtgttgggtggagtgggagaggccgcatctccctgctgccttacagacctgggagaatccgcagacacaggatggattgcgaacaggstctgtcctatgacatgagctggctgtgatttatttttgagggataggaacgggacacaacggtgctcctgccttcctgggcaggggtagcgagcttttggccgtccctgcctgggctccatccttagacaccacagaacaaggcctctctggagctggctgctgggatttttttgtaaactactgtataataagaaatgggggccaggcgcagtggctcatgcctgtaatcccagcactttggaaggctgaggcaggcggattgcctgaggtcaggagtttgagaccaggctggtcaacatgatgaaaccctgtctctactaaaaatacaaaaaaattagctgggcttggtggcgtgtgcttgtaatctcagctactcgggaggctgaggccggggaactgcttgaaccacggaggtggaggttgcaatgagccaagattgcgcccctgcactccagtctgggtgacaagagcgaaactccgtctcaaaaaaaaaaaataaaaaataaaaaataaataaaagggctgggtgcagtggctcacacctggaatcccaacacttcgggaggttgaggttgaggatcgcttgagcccaggagtttgagaatagtctgggcaacatggtgaaactccgtctctacaaaaaaaaaaaaaaaaaaaaaaaaaagcaaacaaaaaaaaacaaaacagaaattagccggtcatggtggcacatgcctgtagtcccagctactcaggagactgaggtgggaggattgcttgagcccgggaggcagaggtagcagtgagccaagattgcaccactgcactccagcctggtgatagggccagatcttgcctcaaagaaaaaaaagaaaagaaaagaaatatgtaccaatccaggttataaaaagtatttcatgtttatattaaacaaattaatgcatttaacatgtatacatgtgctccttgagaaactaaagtggtaatttgtttctgtgcacaagaaaagactagaattaacatatctattttagcagttataaaatactgtttttagtgtcaaaaatgtgccttaagaattttcggttggggtcaggtgcagtggcttatgcctgtaatcccggcgctttgggaggctgagctgggaggattacatgaggccaggagttccaaaccagcctgggcaatatagtgacaaactaagggacatttttattttttatttatttttaaatttttttagagatgtggtctcattctgttgcccaggctggagtgcagtggcacaatcctggctcactgcagccttgaactcctgggctcaagaaatcctcctgccttagcctcccagctgggtgcggtggctcacgcctgtaatcccagcaccttgggaggctgaggtgggcggatcacgaggtcaggagatcgagaccatcctggctaacacggtgaaaccccatctctactaaaaatacaaaaaattagccgggcacagtggcgggcgcctgtagtcccagctacttgggaggctgaggcaggagaatggcagaatggcgtgaacccgggaggcggagcttgcagtgagccgagattgcaccactgcactccagcctgggcgacagagtgaggctccatctcaaaaaaaaaaagaaagaaagaaagaaagaaatcctcctgccttagctgggactacaagtacataccaccatgctcagctaatttttcaacatttatttttaattaaaacaatttatttatgagtgaccatgacccaagacatagcctcagggggtcctgagaacatgtgcccaactttttttttcacttcttgtagagatgggtctctctgtgttgcccaggctggtctcaaactcctggctttaagcggtcttcccacctcggcctcccaaagtggtgggatttggccagacatggtggctcacagctgtaatccccacactttgggaggccaaggcgggaggatcacttgaggtcaggagtttgagaccagcctggccaagatggtgaaaccccaactctactaaaaaaaaaaaaaaaacacacacaaaaattagcctggcctagtggtgcacacttgtagtcctagctacttgggaggctgaggcgggagaatcactggagcctggaggcaaaggttgcagtgagccaagatccagccactgcacttccgcctgggcgacagagcgagactccatctcaaaaaaaaaaaaaaaagtgctgagattacaggcttgagccactgcatccagccctgatggacatttttctattctttttgggttttttttttgagatggagtttcggtcttgttgcccagtctggagtgcaatggtgcaatctcggctcaccgcaacctctgcctcccgggttcaagcaattctcctgcctcagcctcctgagtagctgggattacaggcatgtgccactacgcccggctaattttgtatttttagtagagacagggtttctccatgttggtcaggctggtctcgaactcctgacctcaggtgatctgcccgctttgacctcccaaagtgctggggttacaggcgtgagccacagcacctggcctctgatggattttttttttttaaatcactgtggtaatcatgtggggcagagggtgagagggaggcagagattggtcctggcgagcaggggtggaggcaggaaggaggggacaaattcasggtatttctgaggagcagtggaatctcttgactaaggcctcatggggggaggggggagatggagacataccctgggggactttgcagcctggctgggaagacaagcttctcccccagggaattaaacaccagtggttaacagattagcaacttaatcttagagaccagaaagcagtttccaaattgtaaaacacagaaggaaaacctgtgacggatttggccacataagtatttgaagcttgtatctctctccctgtttctctctctctcacacacacacacacacacacacacacacacacccacagagaacaatttaagattaaaaggtgaggggctgggagaaaactgagaaaggatggtcatctaggatttatcagccgctcccagcaatcaagaagaagaaggcagataactggacaaaggaataggcactgaaaattcccagaagaggagattgggaagccggtaaacctaaggaaatgtgcttaatctcattaggaatcaggaaaatgcaaagtaaacaaagccccacccctaagagtagtagccaaatgtaaaggagggaagtgggagcaggaggagcctctccccctgggatggggaggagccggccaggttctgcggaagcagaagggggtgggtgtactactgccatggcgcaaacacacatccaagggctctgcagggggccccacccttaccccccagaccatttctaggagtaggggctgaacaggacccagtggaggctaccgccctgcattgsgagggttaagtaagaggctgaaggtcaagtgmgaggtcctgccgggcacttccagcggctctgtctcagccaggccagtggccatgcggaactgggagcaaggagagtgggagataaaaccctcagtttcagtggtttagcgtgggaaacgctaaagtgatctgtgtaacacagctcctgggtggggaagagatggggaaggagcctgtggcctggaggtggctggggacagattcccaggatggctggaaggggtcaagggcagggccgtgctatgacttccctgggcaccgagcatcttggcctgcagtggcccttccaataagaaataggaccaggtgtggggctcacacctgtagtcccagctactcatgaggctgaggtgggaggactgcttcagtccaggagttggaggctgcagtgagctatgatcacaccactgcaccctggcctgggccacatagagagaccctgtctctaaagaaattttaaaaaaattagccgggtgcagtggcacatacctgtagtcccagctactcaggaggcggagatgggaggatcgcttgaacccaggaggtcaaggctgcagtgagctgtgatcccaccactgcactccagcctgggtgatagagtgagccctgtctctctctcagaaaaaaaaagaagtgagccggacgtggtggctcacgcctgtaatcccagcactttgggaggccgaggcaggcggatcacctgaggtcaggagtttgagaccagcctgaccaacatggagaaaatctgtctctactaaaaatacaaaaaattacccaggcgtggtggtgcatgcctgtaatcccagctactcaggaggctgaggcaggagaattgcttgaacccaggaggcagatgttgcggtgagccgagattgcgccattgcactccagcctgggcaaaaagagcaaagctccgtctcaaaaaaaaaaaaaaaaaagaagtgcatattacaacttgctataacaatgaatacattactattatataataacacattttctttgacctaaagaacatttttttgccttctgatcctagaagtaattcacatgtgttcgtgggcgcatgcgtgggcctgtgcgtctaatggagaggtcactgcagaaaggaagctcagggttctcccaggcagcggcagggtgtggaagtctttctttgcctttttgaccrttttgtagagggaagctgctctgctgtccagccytgcggaggggggcagggtctgtgtccccragatgacagagggttggggrsagttcaytccagtgaccagtggttggccgaagagtgctttggagttcagcccacctgggtttgaatytacatcctccccgcatggagctragcctgaccagtgcgtgtgttcaccaagctcaggcgtcttttgtttgtgtgtttttggatggaaaggggaagcagcccttcacccgstctctcctcccttgcagccgtgccacagggccagggttgcaatgaaggcaggtctcaggcaggtctcggctctgctctggcaaacgggccccagaggtctgaggaatccagccagctcctccaagctcatgtccttggtctcagacctacaggctttgtgcacatcctaggctggtgacagcatgtgtgtgtgtcacggctggagtggcagaggccctgtgggagccgcagacccagggccgctccrtaggtgtcaggctgtgtggtctgccagagtcccacacctgttcgtgtgaggggaaggtgcccgagcaatactgtagccaaccaaataccatagtgtctycaatactactcatttcgcccatggaaaattatgcctaagccaccatacgggttaatgaacsctccagcccaggtccgaagagatgcctttagcacagggacgtgtggcagtgtctggagatgtgccaggctgtcacaggctgtgctcctggtgtggggacactgctgaacacacaggacagcctccacagcaaagcattacatgctgaggtccagggaccctcccataaccaattccagagtgagggcttctgattggagagccccactctgcgtgtcccttagtcactcctgggacctaggtcaggcgtacacacacctgcaccacactgcctatayacaagcactttacctgtattgtatttatttatttttggctcayggtgttgcccaagctggcctcaaacttcctgggctcaagtgctcctcctgcctcagcctcccaggtagctgggactacaggtgagtgccactgcacctggatttttatgcaggcgttttggtgagtcattggaggtacaatgctaccaacttgccacttcaggtggctccatctcgagcctcagcctcctggtctgtacaatggtaacagtgccctgcccccggggagctgtgggggtgagtgagaggctgtgtgtccagcccagtgtccggggtttagaaagaggggttctgctcagcgggggcagagctcaggcttgaggccagacttcctgggtaccaggaattcaatgagtgaattctttgagcaatgcctggcactgcacaagtcctgtagccgtgttgggtaccactggcattattgctgttttcaggttttttttttttgagttggagtctcgctctgtcacccaggctagagtgcagtggcataatcttggctcactgcaacctctgccacctgggttcaagcaattctcctgcctcagcttcccgagtagctgggattacaggcatgcaccacgacacctggctaatttctgtgtttttagtagagatggggtttcaccatgttgaccaggctggtttcaaactcctgacctcaagttatccacccaccttggcctcccaaagtgctgggattataggcatgagccactgcgcccggcctgtttctagtttttgacagttgaacaaaggtgcttggcctggaatagccaccaccaggtcacctcactccctcagtgtcaggggtctctctccaggctccaaatgctctcatctcatctcagtccctcctgcctgtcctcatccttatcactgctcctacagctggagaccagggtgaggcacgtttgagatgggattcccaagtcagcctgtgcttcttggaggcccagcttcccccgctccctcccgctaccccatctttatcttccttcatcccccacacccccacgctctcttccctagcctgggcaggccccagctgccttcccacctggcgccccgacacacagccaccccacagtggcctcaaaggcttctttcccaaagagaggctttgtcttcaaggtgacccctggctgacccctggcatggctggtgggagtggtgacgaggcagtgatggggccatttgaattaaaatgccctctggataattcaaagaaattcatgagtcatctttatctgggaaaaccccaatggagtgagctgggacccagggctgcagactgatagacagagggaagcggcctccctggatcccggtcctcactcccgtgcctgctgktgactattctgcggtcaggaggcgtccctttgcctgcagtcctgggacagtggagcgcaggggacactggggcttcccaaggagctgcttgttcttctcttaaatcacaaatcagggcactcattgtgtgtctatccgtcaggccgctgtcctctgcagagacaccttgggtgtcccctcctggctccaggtggttctggaggatggcagagccaggaccatgggctgccctgaagctggttccaacctgctctatttaaaccaagggtcctttaaatttgtctcttttcatttaaatatgctctttaaaaaccagcaggctgggcatggtggctcacaccatgtggatcgcttgaggccaggagtttgagaccagcctgggtgacataacaagacccatctctataaaaataataataataataatttatgtatttatttatttaaaaaaatttttttttgagacgaagtcttgctttatcacccaggctggagtgcaacggtgtgatctcagctaactgcaacctccgcttcctgggttcaagcaattctcccgcttcagcctcctgagtagctgggattacaggagcccgccactacgcctggctaatttttgtatttttagtacagatggggtttcaccatgttggccaggctgatcttgaactcctgacctcaggtgatccaccagactcagcctcccaaagtgctgggattacaggcgtgagcccataattataggagtgtgcctggccccaaaaayttttttttaaaaagacagaaaaaccccctgctccctggagcgaagattcttgagaagcatacttgattaactgatgaataagacaatcagaaccatgagttatttgaaggatacgggtgaggggcaagtccacgttagccaagggggtcagggaggacctctctgaggaggtggccttggttgtgaggcctgcaagctgggagagagtgatagggaagacctgggggaagggaggcgtgtgccaggcagaggacacagccagggcaaaggctggaggggggctccagctgaggcctgtgctttggcagggaggagtagtttgggttcttctggctcttccagtcgcctttgggtggtccaggcaagttgtgtgaccatcctgggcttagtcttgacatcggtaaaatgagcgagttggactgttggactccacactttctcgggccccctctggtacaggcgaactggttcccagagaagcctcctcgggcgcctgtctgtcttctgtgtaaactcacattcctcttcctgggctattttgccatttcctttcatgcgaaaccaaaggagctattttggaaactcctataaacaaactaagccctagctggcatttgagtggataaaaaggagycctaagtgagggactcaggcataaaagccacccagccccaaaagcccataacgttaaatttagatgttttacctctaaatgaggtgaaattgcaggttccctctggctggcggtggggaggagacgcagggcagctttggccagcagtgagcggacagacttagcgggagtagactctgcttcctccagccacaccttggggacggaggcccaggacagtccccagtgtctgggagcatctggcttcctctccctgcacacaccagccgggtctgaacggcatcagttctaagtgccaggccagagagaggcagcgagggacacggagtagaagaggctgtcctgtctgccaccaaaggtttgggaactgcatgactctgtgcctcccttctctgccctggggcccagcagggtctctgcactgtctctcatgcctgcagagtgctggttacccagggctgccctaagccacccgagcattcctcctctcttcctgatgcctccccagggacctcctagacctgcccacaatccagtagctaaagggttaatgccagccccagcaggggtggtgacacatggtgggaggggacagggtcttcaagaccctgctccagcacccagcctccatttgctgctgtgccattgcttaaacatcaggaatgtcacccttggtcgcaggtgacaaactggacttgtcaggagctgtccgctgaaggctcctgagattgtgggtctcagcctggccatcccatccccmatcatccagggggaggtctgtttcttttaccacaagaaacactgcttggctggactccaagtcaacgtcatggatcagccccaccaggcccagccgggagggggcgcagctgagctgcctgggaactgtcgcggtccgcaggccccaagggggcccacaggggctggggctgcaacaccctgaagccaaaagaggttgggcttgatttttctcggccaccacccagggctatctttctagcttggcaggtccccctcccaatcctatttccattctggggcctcttccccgctggaggaggtctggctcctgggaggggggcgtgtcctcagcagagctgcgggagcaagcacagcggagtcccgaagccaggctttggagtccagcgcgccccggtccagtttcagctctggcatttcctacctgtgtgacctcggaggactcatttccgtcctctctgagcctcggtttccttcttttcttcctttcctttttcctttccttctttccttcctttccttcttttgagacagggtctcactgtgttagccaggctggagtggtgcagtctcagctcactgcagcctcgacttgctgggaggtctctaatgatcctcccacctcagcctgccgcagtagctcgactacaggtgcacgccaccacatctgggtaatttttgtattttttgtggggaccgggtctcactatgagacccaggctggtctcgaactcctgggctcaagtgatccgcccatctcagcctctcaaagtgctggaattataggcgtgagtcgccacgcctggcatgagcctcggtttccttatctgcaaaatggggatagtaatagtacttgtctcatatggtgttgggagaatgaaatgagaattttaagtcctcagagcaggtagcaggcagtgctggctacccaagggtcagaggcagggccacccatcatcctcaacagctgctgcagcttttgtaaataaagttttactgaaacacagccatggcataattcctttacataatgtctgcagctggttttgctctaaaatgctagaactgagtagttgtgacaaaaactgtatggcctgaaaaaccaaaaatatctactatctggctttttgtttgtttgtttgtttttgagatggagtctagctctgttgtccaggctggagtttagtggcttgatctcggctcactgcaacctctgcctcccggattcaggtgattctcctgcctcagcctccagagtagctgggactacaggcatgcgccaccacgcccggctaatttttgtgtttttagtagagacagggtttcaccatgttgtccaggctgatcttgaattcttgacctcaggtgatccacccaccttggcctcccaaagtactgggattacaggtgtgagccactgcgctcagcctttctatctggctttttacagaaaacatttgtccatctttgccttagagtctagcacatagtggttattagtattagtattactgttattattccagcaccttcctcttgggctgcacagcctggtgaagtaggggaagcagcgtcaacctttccttcattgttttctggttcaataaagatgtgttatgaatcttccatgcacctggtccctgcctgcagggagctccctgtctaggatggagagatagacaagtcaccattcacagtccactataacagaggaggtcaggggcatccagaggaaacaccagacacagctaggagtggggaggtgtccaggaaggcttcctgggggaggggacatctgggctgaaagatgaggagggtttagccaggaagccaatccatgtggccatggcacgtggaagaaggaagagccagacttcagtttgaaaaatgagtgtcctggtcaggygcggtggctcacggctataatcctagcactttgggaagctgaggtgggtggatcgcttgagctcaggagttcgagaacagcctggacaacatggcgaaaccctatctctacaatgaatacaaaaattagctgggaatggtggtgtgtgcctgtagtcccagccacgtgaaaggctgatgtgggaggatggcttgagcccagcaggtggaggttgcagtgagctgagatcgtgtcactgcacgccagcctgggcaatagagtcagamcctgtctaaaaaaaaaaaaaaaaaaaagaaaagaaagaaagaaggaaaaggaaataaagaaagaaatatgtgtgtccctgagtcgcctctcacctctcagagcctttctttcctcatatgaaaaatggggccattgaacctcacagtgctatgagtgatgaatccgctgtcaggttctgcaggtctgctccgagmcttagtttccctccttcgtcgtcctctctctcacactgagcaggaggacctggggcttgttttgagctttgcatcgggaggaactgcttagcaattgtccttctctctgaccttgaagtggagtgactggggtgaagctccaggaacggcccagaaggcttctgatgggaaggtgcagagggaggggccggggaagccccttccrgctccagtgcccaggctggctccggagtacgtctcaactactcacctttgggaatccctccctactccgtccttattctcttgcctggcttggctggggggatcaagcagtttgagcagcttctcaggccctgcataggtgctgataggggtaacagcagtgaggagctcatacgtgtttaacaaccagcagacagaaaccctaacttgtagaacttgccgctttctgtggtgtaaatacgtttactgtggctgatttcaaaccaccaacgtgatgtcaacaggctcacaaaattcctgaacatttaacaattgactattttttgttttttgttttttgttttttttagtcagagtcttgctctgttgcccaggctggagtgcagtggcatgatctcagctcactgcaacctccacctcccaggttcaagtgattctcctgcctcagcctcccgagtagctgggattacaggcgcctgccaccaagcctggctaattttttgtattttagtagacggggcttcaccatgtagcccaggctggtcttgaactcctgagctcaggcaatctgcctgcttcggcctcccaaagtgctaggattacaggtgtgagccactgtgcctggcccagttgactgttgggagctggtacaagctggctcagcacagcacaggaggggactgtaggggacctctttatgggggcaggggcaaggccccagtgcaaggctctcctgaccgcaggtaagacaagctctgacatcgggcatcctcgggttctaaacccagtgctcaggtgccctgctggggctcctgggctagtctcatcacctctctgagcctcagtttcctcatctatggaattagrtcatcaaaagctcctgctcttaagagggttgtatggatttcataatttacataaagcatttagtgcagggccagcttagtaatgagcacttgatgaatgatgcctcaacttccccatctgtacacagcactgctgggcatgggttcatagctgttcatggattcgtagccactcatgggrcaccaggcttgccacacagcgagtggtcagcaaatgcttgccaccttcctccatccgggctagaagccgctcacttctcacttggctctccctgggtcacctggcttatctgggtcacctggctcacctgcagagctggggtcttagccaattgcacagagacagccagctcttccgacatgtctcttgcacactgtgggctctcgggacatgctttccttgrtccttccagcagtctccgtgggaggttctttctgaattccccttttactcttgtgatcactgaggcccagagcctgagtggcasagttgggatttgagcccaggtccaccttctttgttgccaagctttcctatgtacggcacatgtggggctgtggggtgggggatatatgggaggaggaggcttgtggaggctgcacagatctgccaggaggtgcagtagtagatgctgggcagatgtggctcgatacaggaagtttttccaggcagagacccccaagtgagcagaggtgtagtggggtggacktggcycctgggggaaagagatgttggaacatgggggtctcatcgtgcaggaagatgaggtggactggagctttttcgtaggttttgtctgggcaatggggtccctggaatccttggattgacaccaccctggcaaaggagcaaagtatgaaactgtagcagcagagatttaggttagatatgaagcagaactttccagctgcccgtgctggaagatgctgacctatattcccaagggatagggtggcattttctcaatctagagatggtttggaaaaaagagaagacggccagggctcggggttggccccattgcagggygggtcggagactgggcaatggatcggggtggaagcagcccttgacaccagcagtctggcttcatgtgaattggacttttccaccccctgctgaaagccctcccatggctcccagtcacccttgccccattgtaaggccaagcccctgcttggggctaccaatgcctcttgggacctgagccctgccggcctctctgacctcgtctttagcccactgagcttcttgctgtttctggatgacaccaagtcccctcatgcatcctggcctttgcccaggctgttccctcggccttagacacccttccccttcaccccacgtcagccttcctactcagctcttgggcgcctcttcatggctgggtcagattccccctgggacccccataactccagcatggactctgtatcgtaactgttcggcagtaggtgggcctccctgctgggctggagcccttgaggatggggggacttggcctgccttgcagagytcacctgtgttaggtgctcagggagggctggaggaggggagaggagaagctcggggggtgagagggctgtgttcaggaggtgctgtccccttgctctgggaggcagcattgcccggcactaaggacctgagcacagagtgcagagtacagacacctgggttcgaattccattcccatcactgtcccccatcaggtcccctaacctcatgggacctcagcttgctgacctgtgagctgggcacagtaccagcccccacaacactctggggccattgtgaggtctgtaggtgttggtggaaggtggctggcctgcggacggcactygctggatggtgatgccaggctgactctcctgtcctctccttgcaggtgaccaccatgtcggtgaggttgcggttcctgtcccctggggacacaggggccgtgggggtcgtgggccggagcgcctccttcgcaggcttcagcagtgcacagagccggaggatcgcgtaagttccccccgtgtcctgtttcggggtgyaggggtggggcttgttaatgggctggggaagggcagggtcatcctcctcctgctgccagagacccgaaggcccactctcaggcyggcttgcagcccgagagagacagagagagagagrgagagagagagagagattgagattgagagagagacagagagacagagtttcttagtgttgggataaacctatcatttccttgaaacctgaacagttatcatttcaaagtctccagaagttgatctgcctgagcttagcaggtccacttggcagataaaaaatctgaggctctggctgggcacagtgactcacgcctataatcccagcactttgggaggccgaggcaggaggatcacttgagcccaggaactcaagaccagcctgggcaacatagcacaacccaatctctacaaaaatttttttgaaaaaccagaaaattgggctgggcacggtggctcatgcctgtaatcctagcactttgggagtccaaggcgggcggatcacttgaggtcagaagttggagaccaccctggccaacayggtgaagccctgtctctactaaaaatgcaaaaattagttggatgtggtggcacatgcctgtaatcccagctacttggaaagctgaggtgggaggattatttgaacccaggaggtggaggttgcagtgtaccgagatcacaccactgcactccagcctgggtgacagagcaagatgccatctcaaaaaaacccacaaaaacaccaaaaaagaaaaaccaaaaaaccagaggctcagataggtggagccactggcccaaggtcacacagcaaaactggcccagggttgggtcttccacgggcggggttgggaaggaatgttcttcctgtctggaagactaggcaatggggccacctcttctggctctgtgacctggggcaagtgacctcacctcttcagccttgtcttcatctgaacaatgggaattgtgggtgcaccctgctcacggggctgtcgggaaggaaccacgagggaggcagggccagcagccggtgcagctggtgctgtggggggttaycggatgagggagcaggcttggcacagatgggcctggggggcagcattgaccctgtggctgagttccctgggggtgctggccgggccaggccctgcctgctgccccgtcctgtgtctcctccggctttaggtactaagtccctgggaggaaggttgtttctgcttctggaggccacagcccgatgagctcaggcctgctgccccctcgctccagggcctcatgccaggcactgtgcaagcccccagggaaccatttacgagcaggcaggcctggggactggggcagtttatcgacatcctgaaggggccaaacctctgtctgtctgagccaacggggtggacaggtcggggtccccagccagagcagagtgcagaactcagtaggtcagtgagtcagtcaacaataaaatcccaccatgctcttccccgacttgaaaccctgcaaagattcccaacctacttagaataaacccagcgccctcctggctagaggcccctgggacctggccccagcagcctacctccctcccctcccggcctcagggcctcagcacatgtgtgtcctcccgctggagctcctaccccactcctccacctccagttcccgttgaatcacctgcaggcattggcttcctgctaggtcctgggggaggacccctgagctccagaccaggccaggtccctcctgtgtgtgctccctgagctccttcccaggggcatttgctgcggggataggaccccacctccacccccctgaggtcagccctcccagctcactaacctttccctgggggctcccttcccatgggtggtggtgccgggaccccagggttaagatcctggagtgtcccagctggaagcaccttaggaatccctgttcacgcagcagatattcacggagcacctactctggccctgtcctgggctctggggacagacccaggccctrctgtcctgggagctgatggcagcaaacaataagccagtgataattgagacagatccagctggtggcagtgctgtgagggaactgaactgggggtgggggagggcacccatggtctcctgggagagcctgacgagacaggggcatggggagtggaggcaggaagggacagaagaagtggatctgcgcgtgtgcagatgggggtgggccgggaagccttcggcggcgggaggcagctgcgagtgcagatgtcctgggtgggaatgagctttaagggacagaaagcaggtgtgcggctggcatgcgtgacagcagtcagggagrgaggaggaccctgcggagcctcatgggctgcagtgaggccttgagacacattctcagtggaggggagcctgggaagggtttaagttgatgccccaagacgagaagaatttgacccaggctccagagcagttagtgctcagtgccccaactccaagcctcagagaacagaaagagtgggtgctgcctgagaaaggcacacagcaggcactccataagtgctgcaaagagggggttaagtataaaccggccaggaaatgatgctgtttctcaacttaaccatttctgagctgcctcttcctgggctttatcagagtcccccactttcttgcaggggtctgtaatcaaggctgggaaggtcagctgtgcgggttacctggccagggggccatccggcccaggtgaccctctcccagctgtgtgccctggagtggggctggtccactgaagcactgtagggacccttgtgtggtctggaaggaggggtagggtctgcagaccctgtacccaagggcggcttcatgagcgtgtagcctgtgctctgtactttgattgaacgctctgctgttgtgctctagaaatttttgtgggtgtcattctgtcgcccaggttgtagtgcagtggtgcgatctcgattcactgcagcattgacctccttggttcaaatgatcctcccaccccagcctcccaaaatttttttttttttgagacagtttctctctctcgcccgggctggagtgcaatggcgcgatcttggctcactgcaacctccgcctcccaggttcaagtgattctcctgcctcagcctcctgagtagctgggattacaggagcgtgccaccacgcccggctaatttttgtatttttttttttcttttgagacagagtctcgctctgttgcccaggctggagtgcagtggcatattctcggctcactgcaacctccgcctcctgagttcaagcaattctcctgtctcagcctcctgagtagctgggattacaggtgtgcctcaccatgccagttaatttttttttttttttgtatttttagtagagacagggtttcaccatattggtcaggctggtctcgaactcctgacctcaggtgatccacctgcctcggcctcccagaatgctgggattacaggtgtgagccactgtgcctggcaccaaatagaaattcttaatacaatttttttgtgtgtgttttgagacagagtcttgctctgtcacccaggtgtgcagtggtgcaatttaggctcactgcaagctccaccttccaggttcaagcaattcttctgcctcagcctcctgagtagctgggactacaggcatgggccaccacactggctatttttttttttttttttcttgagacggacttttgctcttgttgcccaggctggagtgcaatggcacaatctcagctcaccataacctccacttgccgggttcaagtgattctcctgcctcagcctcccgagtagctgggatcacaggcatgtgccaccatgcccagctaatttttagtagagacagggtttcaccatgttggccaggctggtctggaactcctgacttcaggtgatccacccacctcggcctcccaaactgctgggattacagacgtgagccaccgcgcctggcccaaaattcttgataaattttgaataaagagccttgcatttttatttcgcactagaccccacaaatttcacaactggccctgcctgcagctctcctcctgccaggcctgtgggggcctctgaatgtcctgcatccatgggacatgtcccctcaggccctagaggggagctctgcccagagagtgcccccacggtaggcctctgcctctcgttggccccttcctggattcctgggatcagctctttgggaggaaggaggacagaggtgatccatccccttgacaccagggctcgctggccgtcagcaagggtcccacagtgtccaagtcctagtctaggaaagacagccctgatggctctaatatctcagacccctcctgtcccccatctgattgtcaaggatgccagaggatgctgggcctgggctggttcggaggtccctgggcagcccccacctggccttggcctctgccgcccccttgtgtgagggcaaggaagaagctgcccacaccgacggggaagcggtgcatctatttttaacttcctgtctccgtcgagctccctggggtctgaacccttggagccagggctggagcctgattgggtttcaggccccaccttctggccttgttccctggtaacccgagcaggccgaagcgcagccgcactgtcaaggcaaacaacctggcaggagggcagggctctgcatggagagggtgggctgatgccccttctcttcccatcaccaccttgacccctactctggcaccttgaaacccctttcactatagacagggatttttactccacagtcagatggctcactyggggaagtaacctggtggggaaattttatactaaggtgtgaatgattgacataataaggccatttcccaagagctggacctggggggtgggaggatagagagatgagaggataaacagtgaggatgaaggaggagagggccaggccccgatactgtcctactctgccccagttgacaggcatggttgcccttccccctttcctgcccctcctcagccaggtctccctcccccaggcagtcaggcaggtactccccgagccaggagccactgggacatcctcctcagcttgggaattcctctgttgggatggctaagaagtgtgggtgtgaaaacgaaatagcagccattaagtttcaaggagaggaggctggagaaagaggcggctcatatccagccctgcctgtgaagctgtcaagcacacagactctggagccagaggcgagtgatgcaagttcagtttcctggacggtaccagggggcctgacctcaaagactgtgtcaggagraatgagtccatacatgtaaagcaccaagagcaggccaggcgggcgtggtggctcacgcctgcaatcccagcactttgggaggccaaggcaggcggatcacttgagctcaggaattcaagaccagcctgggcaacatggtgaaaccctgtctccaccaaaactacaaaaaattagccgagtgtaattgtgcactcctgtggtcccagctactcaggaggctgaggtgggaggatcacttgagcccaggaggcggaggctacagtgagctgagatcacgctactgcattccagcctgggagacagagcaagaccttgtctcaattaaaaaaaaaaaaaacaaaagcactgagagcagaatttgagcttggcaagtgccgagtgcatgcctgtcatcatcacccagtggccagcaccgccaggcacctgggtaaatggttggctcacgtccttgttgcatggagtcttcacctgaagcctgtgcagtcagtcctataattgtcccgcctggaggctgggggcaggtgcaggacttgagcccggccctgtctgcctccagagcctgcacttgcaacagccgagtaccaaggcctctgccaaccacaccaggcagaaggactgctgtagcaacctcacgtgagggctggggccggcaggttgcaygtgcccgtctggaagcttgtctggcatgccaggggctgtttaatatttactgagtcctcccagacctggtgaaacatccggccccagaggctcttcctgccccggcttctgtgacacctgggccagacatgctgcctgatttggccatctggaggctgcatgtgcatcaccttccccgggtgggcgggctctcagagtggccactgagcctgtcctgttaaacctcacacaaggagcactaggctcagagctttcccgggagcaggtgcatccaggtgtggctgcagcagcgagggtataaggtccccaggtggatggaagcggggctgggccaacggtgcacacctgttgggggctggaggcaggagctgggagtgagcgagctcctgccccactgcctgctgcccacctgccggggtccctaacctctcagaaacctgccttttcccgagtctgcagccctgaccgtctctgccagcctcaagatggcaaacttgcggagggcccggttcaagaggtgggtgatggggcctcagggagggcaaggggaagagggagcacagcccctgtgggctttggaaagcatcacttaacattaaatatatacaaatggctgggtgcagtggctcatgcctgcaatcccagtactttgggaggccaaggcgggcagatcacctgaggtcaggagttcaagaccagcctggccaacaaggtgaagccctgtctctactaaaaaaaacaaaaattactggacgtggtagcagatgcctgtaatcccagctactgggtaggctgaggcaggagaatcrcttgaacctgggaggcggaggttgcagtgagcagagatcgtgccactgcactccagcctgtcgacagagcgaaatttcatctcaaaataataataakaataatacctgtctcctagggtggttgtgaaagtcgagatatttctataaagcccttagcgagctcctggcggcagcaggtgcccccagttacttaggctcacgtgttctcaccaggctcctgaggcccttgggcttktgtcagctgttcagcagcccactagccctggcctgagcttagtttctctgctctacagagacattacttgtcattgtaaaggtgttggaagctggactttctctgggagctgcccttctcctcctctcacacatcctgggtccccaaaactagagaggccccaggtccaggcccctctgcagactcccacttctgcctgggtcaaaccttgctccttgcatccactcccagagcataccaggtcccattctccacctttgctccctctgtctccagctgggaacacccaggggtgcactcgctatcccgctctgcctgcaggggccaggttctctgttctctaatccccttgggatactgtattttcccccgttcagctgagcttaatatttaccaaactcctaatattttcttttttttctttttttttttttttttttaaggcagagttttgctcttgctgcccaggctggagtgaagtggcatgatctcggctcactgcaacctctgcctcccggttcaagtgattctcctgcctcagcctcccgagtagctgggattacaggtgtccaccaccacgcctggctaattttttgtttagtagagacggggtttcaccaggttggtcaggctggtcttgaactcctgacctcagttgatccacccaccttggcctcccgaagtgctgggattataggtgtgagccacagtgcctggcctgcacctaatgttttctaagctgtgagccaggggaaagatacagataggatgtgatgattctaacaacagcttgcatgtaaaaggtctcctttgtgccacattttgggcctggcatctaatagaattctcagcaccatcctctgatgtattacgtggtcccattttaccagtgaaaagacagagccttgggtagtgtgttgttaatgtagaggtgaagttgctttgataaaaggacccccaaaatgcaggtgcttacttgagattggttattcctctctctctctctctgcagtccagagccaaggggtggatgagggcatgtgtgtgtgttgggaggtctgcttcacgaggctattcagggcctgttccttctctcttgttgttcagccagcttttaggggtgggttgaagctgcttccagcataccgttattcccgcccctgggaagaggaggagttggaagagaagggccagtagtcccctataataactgatgctgagccaggcacggtggctcacacctgtaatcctagtactttgggaggctgaggcaggtggatcatttgaggtcaggagttcgagaccagcctggacaacatggtgaaaccctgtctctactaaaaatacaaaaattatccaggtatggtggtgcatgcctgtaatctcagctacttgggaggctgaggcaggagaatcgcttgaacccaggaggtggaggttgcagtgagccgagattgcaccattgcactccaggctgggtgacagtgagactccatctcaaaaaaaaaaaaaaaaagagaactgatgccaaagttagatctaagagtcatttccaccatgtctcttttgtgagaatgttgtcattaagtgatrcctggtgccagggcgcctggctgatggctttagagggctaagagcagaattcaacacatctgttggtgagcaaaggctgcatcagccagcctcatggataagttatgggatcctgagaagaggcttagatgccagggaaaccagctctgtgctgtgatgagggtgccctggcctcrtactcctataatcagtcttgagatgctgctacatctctaaakgttgagggacccagccatcaccactgaaaggcagtttttaggatcatccagtccacactcccaactccagctggcttaagctaaaaaagagagccagttggctcatgtaactgcaaagtccacgggcaggttcagctttagacatagctagatccaggaactcactgtcatggagatttggtctgactctgtttgttcctctctgtgttggccccagtttccctacatggtggcaaaaggaggaggctggaagtcccaggtatatgttccccaggttagcaatgccaggggaaaaaacacttctcccttctgtgaattctgaactcctggctggctactggccaggcttgatccccatacttcttggcccaggggagcagaatatgttractaacgcaggcctggaatgtggatttgccaaacaatcccgtgtgcatgtgtgcatgtgcaaatgtgtgtgtgcatgttgattagtcaggctacctttcccccaaaccacaagtataaaaagcagagctggggaggtgccccagaggaaaattgaggtgctactactagagggaggggatggatgctgggcaggtaaagccaacagatgctgccccaagggtaaagcacaggactmtgacttggcctcccacacggcattgcctgcacaggcagagcatgstgatcagagagcattggcatttgggctacttgactgtatttcttcctgtaagttcatttctgataccagatttttattactgttcttttttttttttgtcaagctgttctatatttccgggagagggcaggggagggggctcagtctttcctggcagtggctttcctcatggcggccaggacattggctcggctcctcctgcttcctcttggcgtggatgtgtgtccccaccctttccttgatgaacttgagggcctgtttgtccttggagaccttcagtaactccatagcatgctgcttgtacagggcaaagccacacacctcccggatcatgtaccgcacaaactcagtgtatttggtcagacacccactgcagcggctgtgcctgggcttgctcacgttcttggtcaccttgtggcccttgttgaggcccatggccatagggtagcgcagagccatggctgctgctctccagtggcagccatggtggaaaagctttattactcttcttttaatcctcaaatctaggctccttatttttatttatttatttatttatttatttttaagactgagtctcactctgtcacccaggttggagtgcagtgatgcaatctcggctcactgaaacctccacctcccgggttcaagcgattcttgtgcctcagcctccggagtaagtgggattacaggcacgtaccaccacatccggctaatttttgtacttttagtagagacagggtttcgccatgttggccagactggtcttgaacccctgatctcaggtgatccacccacctcagcttcccgaagtgctgggattacaagtgtgagccaccgcacctggcccaggatcctaattttacagatgagaaagcagagacccagagaggctccataactttctggaaaccacactgcttggtggtgatgggggtgggactgagccgggtctcctgactccctgtggctctggtcactatttccaaagtgcctgcccctggggagggctttgtcagggcccttctctgacttctcttgccctccaacccttctcacagaaagtccatcaacaggaactccgtgagatcgcgaatgcctgcaaaatcctccaagatgtacggcacgctgcggaaggggtcggtctgtgcagacccgaagccccagcaggtgaagaagatcttcgaagcattgaaaagaggcctcaagtaaggctrggctgtgtgctgcctttaagaagtgcattcctctatctcgcctcctctctgtctcttcctggggaagcgtggatgggtcttgtctacaagaggtgacaggttaagttcctggtcattcgtttagtaagcaagtatgtcagggtgcagccgcgtgctcagcccggtccttgggcactggaaacctggcagtgactaaggcaggaggactctgatcttgtggagcacgcactgcagaggggcagattcaatgcaatcaatcaagaagcaatgcaatcaatcatagaacttccacctgtgctgagtgcaatgaagaaaggtaacagagagacagtgcgtcgagggcctcggcagacaggcaacagtgtgggcaaaggccccacagtaggagcctgcactgtgagcccacacacgcaagaggtcagggcggtgggtgtttgagtgaaggacagacttgctcagagaccaactgatgagctgggccgaggcctgcacaagaaggatgagtcactccacaaattttttttttttttttttttgagatggagtctcgctctgttgcccaggctcaagtgcagtggcacaatctcagctcactgcaacctctgcctcttgggttcaagcaattctcctgcctcagcctcccaactagctgggactgcaggtacgcaccatcacacctggctaatttttttttttctttttttgagacggagttttgctcttgttgcccaggctggagtgcaatggtgtgatctcagctcactgcaacctccgcctcctgggttcaagcgtgagccactgcacctggcatagcctccttattttacagatgagaaagcagaggctgagagtagctcttgcctcagcctaccgagtagctgggattacaggcacctgccaccacgcctggctaattttttgtatttttagtagagatagggtttcaccacgttggccaggctggtctcgaactcctgacctcaggtgatctgtccatctcggcctcccagagtgctgagattacaggtgtgagctaccgcgcccagccaatattttgtatttttagtagagactgggtttcgccatgttggccaggctggtcttgaactcctgactcaagtgatctgcctgccttggcctcccaaagtgctgggattacagacataagccactgtgcccagcccacaaatatttattgggcttacagagtgccaggccaggggacagaagtaaactaaacacacaaaatccctacctcctgtggagctgactcctagtgggggagagacagacaatacacaatacagaaaagaaaagtacagagaatatcagatggtagtaagggccacagaggaaaacaggccagggtaagcaggcagaggcagggagggttcattttaagttgggcagttggaaggaaggccttgctaagaaggtgacattggagcacactcctgaaggggaaaagaacattccaggccagggtagccacatacacaaaggccctggggcgcagcaaggaggccagcgtggctagagccaaaggaaagaggatgaggttatggggcaatggggaccagatgacagggggccctgtgggccaaagagtggtttctggagtgattttccccagatatagtggtacttagaccctaaattctctcctacttacgccttttttttttttttttttttttttttttttttgagacggagtctcactctgtcacccaggctggagtgcggtggtgtgatctcactcagctcaccgcaacctctgcctcctgggttcaagctattctcctgcctcagacttctgaggagctgggactacaggcatctgccaccacgcccggctaatttgtttttgtatttttaatagaacgtggtttcaccatattggtcaggatggtcttgaactcctgaccttgtgatccacctgctttggcttcccaaagtgctgggattacaggcataagccaccacgcccagcccctacatctcttatttatagatggggcaccccaaagaggaaccagagtcaagtaaaagttgaaaccaggccagacgcagtgggcctgtaatcttagcactttgggaggcggaggcaggcggatcacgaattcaggagtttgagaccagcgtggccaacatggtgaaaccccgtctctactaaaaatacaaaattagccggcgtggtggggcatgcctgcaatcccagctactcgggaggctgaggcaggagaatcacttgaacccgggaggtgggggttgtggtgagccaagatcgcgttattgcactccagcctaggagacagagcaagactcaaaaaaaaaaaaaaaaaaaaaagggaaaccaccttagaatgaaatggttttcaaaatagacatccttggctgggcacagcggtagctaccctgtaatcccagcactttggggggccgaggcaggcagattccttgagcctaggagttcaagaccagcatgggaatatggcaaaatcctgtagaggtggaggctgcagcaagctgggattgtgcagagtgggagctgggatgtgcatggacgatagagcatgtttctgaaggacagattctgtgtcctttaaggaccacatgtttgagacttgtctggggccaaggcagccccttcttcccagagagctcaatacctcagtgagtagcagtctggcagaagctatcttttccacatttgaggtggtgtcagtagagcccagagagtgtgagtgaccttcctgggatgactcagcaaatccagcaagatgggactccctgccttggcccccaaatctagacgccccccaccttctttgttttggaatgragtctcgctctgttgcccaggtggggtgcagtggtgcaatctcggctcactgcaacctctgcctcccaggttcaagcaattctcctgcttcagcctcccgagtagctgggactacaggtgtgtgccaccatgcccggctaagtttttgtatttttaggagagatggggtttcactgtgttagccaggatggtctcgattacctgaccttgtgatccgcccacctcggcctcccaaagtgttaggattacaggcgtcagccacggcgcccggcctagacccttgaccttgagggaggtgtgccatgatgacctccccatgagctgggccccagcttgggagggggtataacatggggatgaagattttgggctcagaaggccactgtgtggtttcagacgtgggttcagcctcttctctgctgtgtgaccggggctggggtacttgctgctttcaagggttggtttgtctatctttaaaatgcatatactaggttggatgcggtagctcacccctgtaatcccagcactttcggaggccaaggcagacagatcacctgaggtcaaggagttcgagaccagcctggccaacatagtgaaaccccatctctactaaaaatacaaaaatcagccaggtgtggtggcacacacctgtagtcccagctgctcaagaggctgagatataagaatcatttgaacccaggaagtagaggttgcagtgagctgtgatcacaccactgcactccagcctgggcgagagaggggggaccttgtctcaaacaataaataagtaaagaaagaaagaaaatgcatataataacagtagaagctacttgtgggcctggtgggggaattaactaggaacttccctgtaaccaattttgtgtggtgctgggcacacagcccccagtgtgagggagcctggcttcctacctgcctctgagccccgctgagccccgtgtctgctctccacgtggggacattgtccatttggcctacttcctttccctttcttcttcctcttccatttgaaactcttccttgctttccttgcagggagtatctgtgtgtgcagcaggctgagctggaccacctgtctggacgccacaaagacaccaggaggaattccaggctggtgagacccctccctgcctgcttcccacccagatagccttggccaggagtaaaagatgaaccctgcgttccttctagcctatgtcacggtgtgactctttctcagaactagaggtttatggaatagcctcttcacgttgcactgagttaacttcactttggcacgtacagcagttcacaygttttaggcccatgtcacactgtctctcggttctagaagtaatgctaaggtgggcagtgtatggaggtgcatttcttttaggtggtcctattttatagaccttggccatcaggtgacctggacttgggatggcttctgtaatgccaggaaagtgggtcaggtgtcacatcttgggtatgtcacagtggcctctgccgctgtccttgatgaagcctgcgtgttccttcaatgcccagctgacaggcagcgtttcctgccatcatcagggcagtgtcttttttttttttttttttttttgagacaggatttccctttgttgtccaggctggagtgcagtggcacaatcccggctcactgcaacctccacctcctgggctcaaacgatccttttacctcagcctcccaagtaactgagactataggcatgcaccaccatgcccagctaattttttaaattttttgtagatacagggtctcatcatgttgcctaggctggtcttgaactcctgggctccagcaatcctcctgtgtcggcctcccaaagtgctgggattacaggtgtgaggcactgtgccagccaaggcagtgtctttcaggctggccctgggccctgtgttgcccaaggctcacctgctctggttttttgcctctcccttagcagagaccgacttagcaacacacacacacacacacacacacacacacacacacactcacaaatagcatgccccattaaatttgtttgttttgttttgttttgtttttgagatggagtctcactctgttgcccaggctggagtgcaatggtgtgatatcggctccctgcaacctctgcctcccagattcaagcgattgtcctgcctcagcctcctgagtagctgggataacaggcacccgccaccacgcccagctgttttttcacatttttagtagagacaaggtttcacgttggccaagctggtctcaaactcctgacctcaagtgattcgcttgcctctgcctcccaaagttctgggattacaggcatgagccactgtgcccggcctcccattaaattggtttttcagacaaatcacaaatttgtttaggtataagtatatcccatgtaatctttgggacatacttatgctaaaataattgttccttgttgattggaaattttaattttaattaggtgtcctgtattttatctggtgacactgctaggatcccattgctcagggacttcatcctttcagcaggaggatcttcctttcatctgggaagtctctccgctgctgccttgagaaaaccccacatgtccttaatgaattagatttggagacaaaagcaaggaggccttgctactgtgggattctcctcccagccagtgtttcccagaatccctcctccaaagcaccaatgtgcagaacaggccaccagcttgactgagggactgggaaagcgaggaggggagatgagtttttctaccaaaatagcatccagtggctcagcacagtggctcacgcttgtagtctcagcactttgggaggccaaggcgggtggatcactcgagatcaggagtttgagaccagcctggccaacatggtgaaaccccatctgtactaaaaatacaaaaattagccaggcgtggtggcgggtgcctgtagtcccagctactcgggaggctgaggcaggagaatagcttgaacccaggaggcggaggatgcagtgaggtgagatcgtaccactgcacaccagcctggacgatagagccagactctgtttcaatgaatgaatgaatgaatgaatgaatgaaataagcaagcaaacaagcggccgtctctgtatcctggctccagcagagagggcctcggggtgggcagggtaggagaggcaaggacccagcctcatgtgtgtgccagggacttggggagggaaaggcctgccaagctcagcatgcctcacccttagtggacagttgggcgggtgaccagcagcagatggtgggagaaggtgctgccaagatatcacccagctccagcacctgcccctcttctcacatgggtacagtgagtctcaccccgtggacttcgtttcccattctttccattctagaagtaactctaaagcaggcaagagtataaatacttgtatgttttagctgctcccatgtcatagatgggcacactgaggccagggcacagtgaccgcactggagccacacagcaagatgcccatgtcgagtcctgctcccatgacactgctggttctcattgaaacaagatgttggtttttgagacgttgctgggtagtcactcttcttttcaaaggcttgggatctttcctctttctttatttatttcttttcttttcttttcttttttttcgggatggattctcgctctgtcacccaggctggagtccagtgtcacgatctccattcactgcaaactctgcctcccaggttcaagtgattctcctgcctcagcctcctgagtagctaggattacaggcgcgcacaatcatgccaggataatttttgtattttttatttagtagagagggggtttcaccatgttggccaggctggtctccaactcctgacctcaggtgatccactcacctcggcctcccaaaaggctaggattataggcatgagccaccacacccatcctgtttctttatttcttaaatggagttttaattgtttcttaattttaaaaagattttatttatttattcttaaagtgacaaggtcttactctgtcacccagggtgaagtgcagtggtacgatcatagctctccgtaacctcaaactcctgggctcaagcaatcctcttacctcagcctctcaagtagctgggactacaggtgtgtgccaccatgcccagttaatttttaaattttttgtagagatggggtcttgctgtgttgcccagactggtcttgaatgcctgggctcaggtgatcctcctgccttggcctcccaaagtgctaggattacaggtgtgagccacttcacctggcttaaatggaatttttatttcattatcgcatatgtacaattccacataaatacatacatgggactttttggggttgaatccttctttctttctcgattgacgccctcctctattcaatcttccgtgtcccatcccgtttaacccttgagaacaatcttttattgatctttccatatttttctctctggtcacataatcatgtaaatgtgtttagcaattgtgagttaaaattgtcttacaaaaatgaaatgtcaatttacatactctcctacagcttacttttcctccctggtggatctacaaccccatggtaacccctccagactcagacatagtgactctaatctccactggaaattaacagccagtgaaaattagagtcactatattttaaaattagagtcacttaaaaaacaagagtttttttaaacacttgtttaaaaaaatgtttcttgaccacacttgttcatgtacatattgtctgtggctgctttcccactatgatggcagagttgcttagttaggacaaaactttkaccctgatgaatttaaccccacaggcaggtacagcacttcccatgtcttaggtccacttcacactctttcttggttctagaagtaactctaaggtaggcaaaggtgtgtatgttttagatggtcctactttttttcttttttttttttttttgagatggagtctcgctctgtcacccaggctggagtacagtggcacggtcttagatcactgcaacctccacctctgaggttcaagtgattctcctgcctcaagtctggcaagtagctgggattacaggcatgcaccaccacacccagctactttttatatttttagtagagatggggtttcgccacgttggccaggctggacttaaactcctgacctcaagtgatctgaccacctcagcctcccaaagtgctgggattacaggcgtgagccactgcgcctggccaggatggtcctactttatagatcttggcatggggcgccgtggcctgccaagcctgaaatatttactctctggccctttacaaacctatagaaaggtttgcctgccctgatgatatattatttgtgttggtcgcaccctggcccctggaatggatagacttaggaattcaccattaaggcctgaactgctgtgccatgtgcccctcccgcttccatccccctcatgttcttttgtcatggccgaggccattccttcaatctcaatggttcccattttgtcaagggcctactgtgtccttttttctccctgtgaggtaggcgcttctcctaccctgctttacataggaggaaacggaggcccagaaaggctgaatgacttgcctgggacacacagctgggaaatagaagagccagacctagaactgcctcatcccacgtgcatgtgtttaatcagtgctgtccttggcgtggacagcagtctgccgttggcagaggaaggagtgggtrggggtggctgtagacatggctttctgtcctctgactctgagctcaggcgccgccagcatagagcctcataggccttggaggaacatgtgggactctgacagcttcttccgccctcctttcctccctcacaggctttctattatgacctggacaaggtgagtctgcatacggtgagtgaggtgggctgggcctggctggatgagaatgactgtgcctcattgcatcttcctggctgcctgatgggcagaaaacctgggtctcctccccattttaggaatggraaggctgagtctctgcgatgagccttmctcagggatggtgagggcctagccccattctctgagttaggacctgtaggagggtggcaggggcaagcrgggcaggtgggtggcccaggcaactttgcaaacatcttccctttttccgggagaagcaaacgcgctgtgtggaaaggcacattcggaagatggagttycacatcagcaaggtcagctggctcgtggatgttgcagggtggggtggggcagtgccagcttgctgggcctcagctaggttagcaggagctggggaggtgccytcgaarcagggatcagggcctctgggtatggggcagctgcaggaggctaaggatgagcaggggcctcgggccagttgaaggacagcaggggctcagccctgaggtgggagtcaggggsctcagccctgaggtgggactccctgaggactgtgtgggctctttcttcagtttatgcagaaagacctcatgctcagtcttagatggctgggaaggttgagccctcccagcccattgtacagttggaaaagcagaggtccagagatgaacatgggttggcccaaggtcgcatagcagatctgtaagctttagagtctgcaaacggtttcatgatcttgctttactccccacactgcccagtgggtggcaggttatcacaaastcatctcccrtttcattgttgaaaaaccaggcagaggaggtgaagggacagattcccttgtccctttcactcatttttgctgtgcacactgtgtgccagtcgctgccaggagctgggtatgcagcaggtgaggcaggggtggcaggagaggcaggagaggcaggtgagacagggttggcaggggtggcaggagaggcaggagaggcaggtgagacagggttggcaggggtggcaggtgaggcmggggtggcaggtgaggccggggtggcaggtgaggcaggggtggcaggtgaggcaggggtggcaggkgaggcaggggtggyaggggwggcaggkgaggcaggggtggcaggtgaggcaggggtggcaggtgaggcaggggtggcaggtgaggcaggggtggtaggggtggcaggtgaggcagtggtggcaggtgaggcaggtgaggcagatgtggtccctgcctatgggggttcatgttctactggggccaggggtgactgctttgaatgggactggacaggtagtgactgtcaccatgggctgggctagcggggtgcttagctcagggagggcctctcccagagaggagaagtcgacaggcaggtgtggggccgcccctccgcgtgggcagsgccaccagcccgtgtgcccaccacaggtggatgagctgtacgaggactactgcatccagtgccgcctgcgcgacrgcgcctccagcatgcagcgggccttcgcccggtgccccccgagccgcgcagcccgagagagcctgcaggagctgggccgcagcctgcacgagtgcgccgaggtgggccgggccaagctgggctgggcagcaggggcagcaagagctgggccgggcagtggggacatcgagagctgggccagtgggggctggaggaggtgttctgggccccaaggaggcgtctctctgcctgtggcctctgtctggctgcagggatggttagaggccctcgtggcctagccccaggcagccagctgagycacctccggggctttgcaggacatgtggctcatcgagggggccctggaggttcacctgggcgagttccacatcaggatgaaaggtaacagggctgagagggggtgggcggaggcctttctggaggccctgagacttctgctgaggggcacgggaattggccagaatcccaggggtctgagcccagccctggcttttgcatccatrtgacatgtgacttctggcaagtcccacccctctctgagcctggtgtgagggcccagcaccctctgtccattttccatcatgatggtgtacctcccccsyatcctcaccccactgaaactgaaaatctrtactcgggggaaccccagagaggacctgtggtcccaggtcagggagagtggaaggcggaggggagaccggccatgtctgtgttccaggcttggtgggctacgcacgcctctgtcccggagaccactatgaggtacggccactctctggggtcaatcctcagggctccccgccaggtctttgggggacgggagctgctgggaaccagggttgcagctggggctctgcctggcagggagggccctgggcggacagcaaggggacacccacctgggctgacgcggcccctctcgggctggttcacaggtgctcatgcgtctgggccgccagcgttggaagctcaagggtcggatcgagtcagatgacagccagacctgggacgaagaggagaaggccttcatccccacgctgcatgagaacctggacatcaaggtggggatggggcccgggggcagggctggggtgcctgggtgttckgctcagacaccaccctccagcccccacccccaggtgacggagttgcggggcctgggctcgctggctgtgggtgcagtgacgtgtgacatcgccgacttcttcacgacgcggccgcaggtcatcgtggtggacatcacggagttgggtaccatcaagctgcagctggaggtgcagtggaagtgagtcccgtccagcctggggagagcggaggcctggctggctgcccctggtggcctggccacactctggccctgggttcctgcaccagcctctgccaagggtgtccctgccctcacgggtcctcatctgtccctcactcccacccctcagtcaggtcgaggcctagaacttctctgyagcccctgcctgcctttctggttttgcttcccttcttgcttctgaacccctgactattaaagccacagggaaggttggggggacactttccggggcctcccgggcttggctccttggaggaggctcacctctccaggaaggccctccttgctgctcccaccccctcattcctggccgaccctggctgcccccttggcctggggctgagcggtcacctgcgtccccctctcggctgcagacccatgaagcccatgtccatgagatcactccctggactgcatgcccatgagcgtggagggctccagagctctctgttctaaggaagccttgcatttccagggtgttcctttcctcctcctcagcgcagaggcagcagaagggagggctgaggacactcctctgctctgtgcttgctctggccagtcggggctggtctctctcctctctccctagggtgggtgtccgagctgggggtcacaaagctgctgccctctccctcgtgagctgggtgaattctgttgagcgaccacctgcaccctcggggtcctcacctgtctggtagggctgagaatacccctcgcccaggggcccctgaagtgtacagggtggcgggcagctcagtgccatccaagcctaggacccagggtgcctgcgggtctgcagacaccctgggcagagaagtgggcacttgcagagcctctgagctctaggccttctggtcaggccaggcccaggtgccacgagccaggcctttgtgcaaataattataagcaagtttcttcgaggcaaatggatctatggggacctacctactccgagtgcaaggctggacacaggccaggctgagcatcacgggccaggctgagcatcacttgcctcggtgctcccatgcgctygcctggattcccacccttccctgtgcatgttccacatgggggttcttctgtaagcgcaccccttttacagacaaggggtctgaaccgagtgtcccctgctcatcggctgagcttctcaaaggggcctctaactgggggtgtccagttgttactggtggagggtcttgacaatgagttgtccaagtccctggcattttgaacaaagacttgaacaaaatgcagaaaaggagcaggggaatgaaacgcaggaatgaagcagcaggrctttattaaagcaagaaagcaggttgggcgcggtggctcacacctataatcccagcactttgagaggcgtaggtgggcagatcacccgaggtcaggagttcgagaccagcctggccaacaaggcgaaaccccatctctactaaaaacacaaaaattagccaggcgtggtggcacgggcctatagtttcagctacttgggaggctgaggcaggagaatcgcttgaaccggggaggcggaggctgcagtgagccaagatggcgccaccgcactccagcctgggtgacagagcaagacagtctcagagaaaaagaaaaaaaaaaaggcaagaaagcactccacagggtgggagtgggcccgagcatgtggctcaagggcatggtttcaaagtttctgggctttaagtaccctgtttgaggttcctatgggctgccccttttctggataaaggatttggtctgtggttagaggctgaggtggatggcgccctatgcagatagagggatggtccctgtttcgccagcggcccatccatacaccctccctttccatctgagccatggttggaggcaggagggctgtagggagcgttgcctttgatcctttactactcagtgtggggagacggggtttttccttttgggttagctttaggaagattgcgttaattggccttagattccctgtcccttcagaccttggtgtctttccttgatttagcatgaattgacctgaggtttcctgcctccagatcctgctctcctgctcacagtcactgtccctcaccatctggctaagggccctcagggcggtcagagtctgagaaaggtttctttttttctttttgagacagagtctcgctctgtcgcccaggctggagtgcaatggcgcaatctcggctcactgcaacatctgcctcccagatttaagcgattccccagcctcagcctctcaagtagctgggatcacaggtgcctgccaccatgcccagctaatttttttatgtttttaggagagatggggtttcgccatgttggccaggctggtctcgaactcctgacctcaggcgatccacccaccttggcctcccaaagtgctgggattacaggcatgagccaccacgcccagccttgagaaaggtttctaaaggggtagaggtcatgtaacctggagttcctaggctgcacctgtgaccatgggcaaggccctggacttggaggcccaagcctccatttcctgttttattttgctttttttttttttctttttttttgagatagagtcttgctctgttgccccagactggagagcagtggcatgatctcggctcactgcagcctccacctcccaggctcaggtgctccttccacctctgcctcctgagtagctgggactacaagtgtctgttggtcaccacattagcccagctaatgtattcattttttgtagagacgggggttttgccaggttatggaggctggtctcgaactcctgagctcaagtcatctgcctgccttggcttcccgaagtgttgggattacaggtgtgagccacagcacccagcccatttcctcttaaatccattaagtacagtgatgtctgaagagtaagcatcactcttagtgatctttaaggctttggggtcagagaaaatctgtgtgtgaattcagttccgtctcgcgtggttggttgtgacactgccctaagcaagtcactcatctctcagagccttcctttcctcccctgtaaataattctccaggccacagagggttgtcttgggggtggaaataaggatttgtgtaaagagtttagtagaggctgggctcagtggctcatggcctgtaatcccagcactttgggaggctgaggcaggaggattgcttgagcccagaagttcgagaccagcctgggcaacatggcaagacgctgtctttacaaaaaataaaaataaatttaaaaattagtccagcatggtggtacatgcctgtggtcatagctacacaggaggctgaggcaggaggatcgcttgaacccaggagttcaaggatgcagtgagctgtggtggcaccactgcattccaacctgggcatcacagcaagaccctgtctcaaaaacaagcaacagtttagagcagagctcctcacacaccatccatgctattgtattgtaagatgaagaccrtctacctgcataacctaagagccctgtgggccgtctgggcctgaaatggcctctgggtgccgatggcatcctgaccttctgttctctcctccagcccgtttgatactgagagcttcctggtgtcacccagccccacgggcaagttttctatgggcagcaggaagggctccttgtacaactggacacccccgagcacccccagcttccgggagagatactacctggtgagtgagccttcccggggcagggccgctgtggtcaccctgggatgggggcagcacgcaggagctgggctgagcagtctggccctcccagacatggcaagcctcgggctcagcttccgtttgaggcgatcctgggtgttttcctgtgcactttcttcctctgctgccagcctccaacctagcctgggttctgggcttggctggttcttcaggacatctgcagtgggctctctggatggttctagcaccccagtcatggccttggccttaatatatacgtttctagtagtagtacttgacagagtgcccagtaaaacatctttcctgttgatctccatggatcagggtcccctccttaataccaactcctgtcatcagtttcttccatattcttccagagacagcaatccatctaccagcaagtgtatacgcctttttttttctttgttttttttttttgagacggagtttcgctcttgtctcccaggctggagtgcagtcacgcaatgtcagctcactgcaacctccacctcctcccaggttcaagcgattctcctgcctcagcctcccgagtagctgggattacaggcacacgccaccacatctggctaattttcgtatttttagtagagacggggtttcaccatgttagccaggctggtcttgaactcctgacgtcaggtgatccacccgcctcggcctcccaaagtgctgggattacaggcatgagccaccgtgcccagccctctctggacttcaatttctgtatcagagaagtgagaataacagcactgcccttatgggattactgtgagagttaactgagttaatgaacatcaaccattatcattggttcagctgatgagaggtaagggttcgtgtccgtgtacccagattcacactgtggcactgtactcaccacccgtgtggcctaaggacctctccgaggttagggcagtgccacccccatggggtgtggtgagggtaatgggaaggccctggaatagggccggcaacctcagaatacttaatgacagctgctgctgtttctatggtgtgtttgtcaggcccttcattcattcattcacttcattcatycaaaactaggctgggtgcagtggctcatgcctgtaatcccagtactttgagaggccgaggcgggtggatcacctgaggtcaggagtttgagaccagcctggccaacatggtgaaaccccgtctctactaaaaatacaaaaattagccaggcgtcatggagtgccactgtaatcccagctactcaggaggctgaggcaggagaattgcttgagcccaggagatgaaggttgtagtgagccaagatagtgccactgcactccagcctgggcaacagagcgagactatttcaaaacaaaacaaaacaaaaaccgaaactatatgccagcctctgctccaggccaggcaaagactgtgccctcagggagctgaaattctacaggggaaacagatgatatcaaaatccgagaagtgcacagccagccccaggggcataaggactgtgggagacagcaggaagggaaggggcccactggggccaggtagaaattgccacttaaaaaaggctgtccaggacagggttctcaggagaggtgacacctatgtaaggtcctgaggaggcgagggcacaagccatgaaggcacatggggaagagtgttctgacgagagcacagtcagtgcaaaggccctgaggcaggaacgtggggcccagcccacagggcatgagcaatagccaggaggctgttgaggttggggggagtgagttggaggcgggatgggggataagtgcagagaggggacagggttttttctgcacctctgggatgctggtcacctcggcaggcctcagtcatcctgagaacatgggcatgcacagcgggtgtctgtcaggggaagcccctctgggggacttgctgtggtccctggggtggctggtgaggccgctcccgtgtcccctctccagtctgtcctacagcagccaacacagcaggccttgctgctgggtggcccaagggccacctccatcctcagctacctgtctgacagcgacctccggggtcccagcctaagaagccagagtcaggagctgcctgagatggactccttcagctctgaggacccccgagacacggagaccagcacgtcggcgtccacctcagatgtgggcttcctgcccttgaccttcggtccccacgcctccattgaagaggaggctcgggaggaccccctgcccccaggtctcctgccagagatggcccacctctctggaggcccgtttgcagagcagcctggctggaggaacttaggaggggagagccccagcctgccacagggctccctgttccacagcggcacagcctcgagtagccagaayggccacgaggaaggggcaaccggggacagagaggacgggcctggcgtggccctcgaggggcctctgcaggaggtcctggagttgctgaggcccacggactccacccagccccagctccgggagctggagtaccaggtcctcggcttccgggaccggctgaaggtatggccaccccgccccgggcggtggccctgctttgctgatggcatgatgactgggagtcgggggctctggggccacgcagcctgggccgacatcctggcctcacctctgcgtgacctgggtgggccgtgtctctctgggccttggtttcctcatctggcaagcggggataacaacagccctcatggggctcaggaagattttaagagttcacagtagataggctcatgcacatccagccagaaactggccccatctcgcaccttctgacctgggtgggcggggctgtggcttgtggctacaaacccaaacttggagtgttgtcagggtcgcagctggctccatggaaggccccacacagttccctgtttgcctcatccacgcaccccgcactgaaccttctccacagggctcataccccggggctgttctcagttcacaggagggcttakgtggcaggtggctttcagaggtgctgacctaggcaaattattacattctcctctcgtgtttacacaaatttgaatgtacatcaaaaaaatgtataccactagtacctactaatacatcaattaacttaagggtgtccttccctgaacacgctcttttattttttatgtatttattttttgagatgaagtctcgctctgttgcccaggctggcaacagagttgtagcggcgccatctcggctcactgcaacctcctcctcccaggttcaagcatttctcctgcctcagcgtcccgagtagctgggattacaggtgcacaccaccacgcctggctaatttttgtatttttagtagagatggggtttcgccatgttggccaggctggtctcaaactcctgacctcaagtgatccgcctgcctcagcctcccaaagtgccgggattacaggcgtgagccactgcacctggcctggacaccctcttttaaatggcaactcccacctggccccggcaggcccatcccttcctgctctgtgttccctcggtccttatgccctcagactggctgtgcacttctctgattttgctgttttctgttttcccctcttttgtgtaagatacactttggcactgaaatagttaacagctctcttcaaacacattttatcgccaaccacacctccaacaggacaaatcaacataggggaaaaaaagtttaatttctcattttacatccataactttaaaatatgttccgtttaccactactatggttgttaaaaaggacctgcctgaaaatttccagaaaaaaatttaagaaataatgtcaactttttggtacttcatgtttttcatttttctggagacagggtctcactctgttgcccaggctggagttcagtggtgcaatcttggctcactgcaacctctgcctcctgggatcacacgatcctcccccctcagcctcctgactagttgaggctacaggcacacatcaccatgcctggctaattttgtttattttttatagagacgagttctcactttgttgcccaggctggtctcaaactcctggactcatgcaatcctcgtgcctcagcctcccgaagcgttgggattacaggcgtgagccatcgtgcctgtaccttttttgtactttttaacagcctttttttgtagactaatttgagtcrgcatgcacatttgtcacatacttgtattttgaaaaattacacccaatttacataaaaatgttaatgccgcaataatgtaatcattttaaacgtctttaaggaacttttctttttttggcaaacgaagtcagaacaatgcaaattgattacagaccgtggtttttggtttgactttctggagagaaattacacacacacacatttatgcaaatctatgtgtatatgatggtgggcgcagtggctcacatctgtaatcccagcactttgggaggccaaggcaggtggattgcttgaggctacgagttcaacagcagcctggccaacatggcaaaaccccgtttctactaaaaagacaaaagaattagctgagcatggtagcgtgcacctgtagtcccagctacttgggaggctgaggcaggagaatcacttgaacccgggaggcggaggttacagtgagccaagatcgcaccaatgcactccagcctgggcaacagagcgagactctctctctcaaaagaaaaaaaagtgtgtgtgtgagcgcatacatacacacatacatatacatgatttatcctcattatttgtggattctgcattttggaatttacttacttgctaaaatttatttctaacccccaaatcaatactcgaggcgattccaaagtgggttttggggccgggcagagtgatagaaaatctgagctgctcaaagcacacattcccagctgaggtcaagcgaggcaatgctttgccttcctgtttcaatgcccaaatggtaaacaagtgtcctcatggtctatttaatgccatgtttttcaagtttttgtgctttttgttgacagtttcactgtttaaatgcctcccaagcccagagcttcagtgccggctggtgttcctcagtccaggaagcctgtgaaataccttacagagaaaatgtgtgttagatgagcttccttcaggcatgagttgtagcgatgctggctgttgagttcaatgttaatgaatcaaaaatagcttttttttttcctttttttttggagacggagtctcactctgttgtccaggctggagtgcagtggcacgatctcagcttactgcaacctccacctcctgggttcaagtgattctcttgcctcagcctccctagtacctggggttacaggcacgtaccatcatgcccggctaatttttgtatttttagtagagacagggtttcactatgttggctaggctggtcttgaactcckgacatcaggtgatccacctgcctcggcctcccagagtgctgggattacaggtgtgagccaccacacccagccaacaatagctattaaataaggtgtctttaaaccaaaagacacatacaaagttctgcattgctgagttgataaaactgctgtgaccagaggttcacaggaacctaacccagtaactcccttaggagcaatggttcagcttttgctgattcagtttttttgctgtgattttatagaacataaccccctcctttttttttttttttctgagatggagtcttgctctgtcgctcaggctggagcgcagtggtgcaatcttggctcactgcaacctccgcctccccgggtcaagcaattctcctgcctcagcctcctgagtagctgaggctacaggtctgtgccaccacacccggctaatttttgtatttttagtagagatgcagtttcatcatgttggccaggctggtcttgaactcctgacctcaagtgatctgcccgccttggcctctagaacataactaccttgactattgagaatcagcagtctacatgcatgtgtgtattgatacacacttacatacacatgtatgcctatatttttgtattggaaaatgtgatctctgcaactagccttgttattcccttcgtcctcaagattttctctttggctccgcagttaggatcctggtttggttttatggcttctgcttgggctgygccttggctgcagtttgtgttggacacaaggcctgggtggggtgtgctgggaacgggggcaggaaccagccccagagccagccacgagttggggacaagacagaaatctccagggagggagctggcactggaggctctggtgacttgaccagtggcgggttggtggccccaacactctcccttaatctgttggggagagaaacccaacagggaggaggaacctggagcccacaggcctctgagcctcgtgaagaagcgtttgcctgacctacaccatgtatttaaaatactttgaaatttgttgttggtatttcaaagctgggcagtttcccataaatatccatgttttagggttttcttagaactgggcgatctatgagcgtggccccctcttaggggaggcacctgcgctcctgcctccctggtccccgctggggcagctcactcactcctgccattggccttgtccccgtgggtgtctgagatacaggggagggttttcagatctgtccccctcaagattctgctcctaccttgtcacaggccattcaggagggactttggggggtgacacgcccagtgccacgccttgggccagcggctgggcttstgctgggggacggtgtgtgggattggggcttgggaccgggacattgcccaagtctgccgtgaggcccctggccagtgtcccagtcgggtgggtggggcccggtgttgccctcaggtctggccacttcrtccacagccctgcagagcacggcaggagcacacctcggccgagagcctgatggagtscatcctggaragcttcgccttcctcaatgccgacttcgcccyggatgagctgtccctgtttgggggctcccagggtctccggtgagtgcacctccttccagcagtgacccagtggccaccactcccaccgggtgacccgagctccacgtttcctgccagcctccccgtctgtttctcccactgtccttggctcagctcttgtcactctatcgtgcacccttccccatgccatccccgcacatcccccacttgcctcagagccggtcctcagagaccacgaagtgggtgagatcaccccagcctgcccctgagccttctgctccaaggaaccagcttttagtattattttttaaaccttaaaaataatcaccaagtatatagtagaagttctttgaggccaggcacagtggctcacgcctgtaatcccaacactttgggaggccgaggcaggcggattacctgaggtcaggagttcaagaccagcctggccaacatgatgaaaccccgtctctactaaaaatayaaaaattagctgggcatggtggcaagagcctgtaatctcagctactcaggaggctgaggcaggagaatcactcggacccgggaggcggaggttgcagtgagccaagatggcaccactacatttcagcctgggcgaaagtaagactctgtctcaaaaaaagaaaaagaaaaagaaaaaaaaagctcttagcccctaaccaaggtgcagcagtatccagtgctgttccctctgtcccaccacagggcccacacctctcatgacagcttccctcgaggctacgcagcctcacctgccccagcccccgagggcttctgcatccgcatctcaccacatggaagagcagaggctcaattccttctcctcgcctctcacaatcccacggacgagtgcggtgtttcgtgccacacttgcttccacccttcctgagtggctgagtgggtcgggcagcaggtctagcctctaccacagagtggacttggtgtgaggcgctcttgcccaccgtatttcatgcacccctcacggccttgagtgtggggctcctgcctcccttgatagatgagtcacctgagccttggggaggcagacttgtccagcgtcacagagctgggatgagttggaattctcttctacctccacgagacatcctggaagacgactgcccgccctgccttccccaggcccttggccacacctcccagctctgtttcgagttgctgccaccctttgttcctttccccttcctcttcagttgaacttcctgggacctggagtgggcctcctgacctggggctcgctgggaagggagggttcccccaccctcagagggagctgaactgctaactggaatggtcacccagttctcaattcaactcagaaaggaccggcccctgcccccaccgtcatcactgaaagcgtcatccagggaactcacagccggtgccccagagctggacgtgctgctgatggtacacctccaagtctgcaaagctctgctgcaggtggctgggctaggggacttgtcagggaggggcagacaggggtttggagtcctctttgcaaaggctcatcttgaaggtggtgggaagcatgaaggggtgacagacctgcatcctggaagcccgtgagactgaagctattccccagtggaagagaggcagaccagggtctgggtgaatactcgtgtggctcttacacaggccaagccctaaaccaaaggctttggtggtgactctcatttataggtgccagaaccctaatgcaaactggctcagccaacaggaaaatttatcggctcatggtactgaaagcctcagaggtaggcttcaggctcggctggatgcacgggttcaaatgctatcaggactaggtctctctcagttctgctttgcaatgtgggttggcttcactttcaggcaggttggtcctccttctgggggcaaaggtggtccctggcagcccagcctgcatcccattagctcagccaccttggtgaaaggggaatccccaaatgacagtcagggagctgcccccgggacagaagagatgggcacaagcaggtgggagccacagccgtaacagctgacctcggtgggcatgttccatgctaatctggagcatctgggctgcttcccagaaactggcctcccctaatttrtcaaggctggtccaggaatgcctcctggaagaagtggcacagcaaaagcacgttctggagacactttctgtccttgactttgagaaggtcggcaaggcaacatccattgaagagagtaagtagctgcctgccacccaggggctgcctatgtgagcggcacggggacgggatcaaagctcggggagcctcttctgccttcctaatagccagagttaatcggggcccagagtggaggctgtggctgggctgggctcagagatacacactctttgtsgggaggtaagggagacaagtcctggagttgcagcacactcttcagtcagctgtgtgactctaggcaaatgattcacatctctgagcctctgcttccctatctgyataggaggagggcactgcacggggtwcagtgaggtaaccccaggccacattcaaggtgcagaatgtgccgtcaaacagtagctgtgatcccagctgtgcctctgccccgtgggacctcccctcagaaggccaggttccttgtctgtaaggagaggctggtgacagcagcccctcccaggttgttgtggggactgcaggtggtggccctggtaagatgcttagagccaaagttgctcacgtgtcacatgggaatgcagggaagggacctcgcatcaagccacaccgtcccctcctccctaccccctcaggtcctagtggagggaaacctttcrggtccttgtcatgtgctctccccgagtcaccattcaggtttctgaactggggctttcagtcatcccacaggcctcgcggacgaaggggtgcctgaagctgtggagagggtgcacagggcctggcagggtcctgtcctgccctgccacgacgctgctgaaccagctcaagaaaaccttccagcacagagtcagagggaagtacccaggacagctggaaataggtgggttcccttctgtcctgtcgtcccctcccacagaaaggctgtattgagtctccagggccttcagggtggccacagctggcctcatttcagccctgtcttcacctctgtgtcttcatgccatcggacggaggagstttctcagcttcagtgcgagtcaccgccctttcaccgggcgagaaggggcctccacgtggggccttctgagcagtctgtggagccctgaagctgcgtgcaaacttggtgggccggtgcatttttttttttttttttttttgagatggagtctcactctgtcgcccaggctatagtgctgtggcacaatcatggctcactgcaacctctacctcccgggttcaagcgattcttctgcctcagcctcccgagtagctgggattacaggtgtgcaccaccacgcttggctaattttctttttttgtatttttagtagagayggggtttcgccatattggccaggctggtctcgaactcctgaccttgtgattcgcccgcctcggcctcccaaagtgctgggattacaggcatgagccactgcgcccggccgccagagcatttttctggggacagattccatgcctcccaccagagcctgacgggtaaagaatgaaccttatgggaagggaggcaggcaggggcccacgagggtatctagaaatgctggctggactgcgttcttccccagaatttgcctttctctgtggagcaagtgaaaggtgacagtcatgttccaagcaccacctggactgcttgttgacatgcatattcccaggccctgcctccgggattttgatccaggtgtggtgtggggcccagggcatggggatgaacccaacacggtctgactcagggtgagttggagtcacagtcctgactctagctgggcacactcctcccctacagcacagggaatgcagtgagggacacctgccctcgtgccatcagaaaccctttttttttttgagatggggtttcactcatggttgcccagactggaatgcagtggcgcaatcttggctcactacarcctccacctcccgggttcaagcgattctcctgcctcagcctccagagttgctgggaaacaggcaggcaccaccacacccagctaattttgtatttttagtagagatggggtttcaccatgttggtcaggctggtctcgaactcctgacctcaggtgatctgcccaccttggcctcccaaagtgctggggttacaggtgcgagccactgcgcccggcccagaaagccttttagctgaccaggctactcccagctgagaagcgtggagggtcgaggtctcagtttctcctgatgtactctcccctttggccagcgtgccgcaggctcctggagcaggtggtcagctgtggtgggctgctccccggagctgggctcccagaagaacagatcattacctggttccagtttcacagctacctgcagaggcagagcgtctctgacctggagaagcacttcacccagctcaccaaggaaggtaagactggggtgggtggctgtcatagcagaggaatatccacggagccctgtcacatgcagtttctcaggttataattcagaaccactacatccatccccgccaactgttcttttgggaaccccgatttaatgagattctgcgttcagcygatgggggctgatattagctccaagggaagtcagctttaaaaagcacggaacagaggtcagagctgggtaggagggtgatcttggctggccagagtccctggaagtgtgggctgtggttttattaatttatggagcatatttgaccccttgttaaaaggccttcctggagattccaggagctccctgtgaaattagtccaggctgggccttggtgatcatcccggtgggtctgggatttgttcctctgtggctactggcagcagccaagcaaacttgcagctgtcctgccaaactcccattcaggggacctgggcccacctctttcctgtcttctagtgacactcatcgaggagcttcactgtgcgggacaggccaaggtggtccggaagctgcaggggaagcggctgggccagctccagcctctgccccagaccttaagagcctgggcgctgctccagctggacggcactccgagggtgtgcagggcggccagcgctcgcctggctggtgcagtcaggaacagaagcttccgggaaaaggtacgttgtccagggcaggtggcagaccctggccacagatgtgtgggcataggtaagctggtgttctcatggaaaagtacaaagaagtgagtgccaggggctgcagtagctgtgagctattttgatggagggacctgggctacgatctaacacacatgaatgcaccttgctgcttccaaagcaacacatctgttaggcctctgagatgtcacttgcacgctgaatgtttttcttagtgcgttttttgtctgtctgtttagacagagttctgctctgttgcccaggctggagtccagtgccacgatcttgcaacctccacctcctgggttcaagcaattctcctgcctcagcctcctgagtagctgggattacaggcgcccaccaccatacccagctaatttttgtaattttagtagatacagggtttcaccatgttggccaggctggtctcaaactcctgaccctgcgatccgcctgccttggcttcccaaagtgctgggattacaggcgtgagccactgcgcccagcctttcttagtgttttgatagtcatccttatttactttcaattaatattcatggctacctggtaatgggtcactgtgttcagtccatttgaaaaccaagagagtggacctctctgctttttcactctttgcctgtaactactgtacgtttaaggcgccacaccctgaggggttcaggaagggtgacatcaagggcatagtctacactgatggtctcagctccagactagagaggaaatctccagttccattgccaatagcccttcttggagcccatccgcctactttgtggttgtttttaactctttatttggagacttttgaacttgcaaaagtagacagagcaatataatgaatccacctgcacccataacccaagcccaaccaccatcaacccatggccaatcctgcccctttcccctccactcccctgtatcactttgaagcaacctgaggcatcctatttgaccttaaatagttaactatatgtgtcaaaaggttaagaattctttcaaaaatcacaactctaacaccattatcttatctaaaaaattaactatcaattcctttatatcatatatcttatgttcaaatttccaagcctcaagcatcctgttttattttttgttaaaatagtatctacataaggacacacattgtgattggctgatggcttccaatcaatctaaaggtttttttccccgtttctttctctgcttgcaattaatttgatcgatcccaggttgacctagactatctagactttgctgcttgcaggaagtttaacggtagtttaatgtatttctctgtcttctgtagttcctgaaaactagtagttggcttcaaggatccactgaagtcaggtgtattttgttttttgggtatgggggtatataaacaaggcctccatgggaagcagaggctgcagggagccgagattgtgctactgcaccccaggctgggcaacgaagtgagactctgtctcaaaaaaaaaaaaaaaaaagggccttcatcttcatgtgacagactttagagagtaggaaacactgaggtgggggccaacccagtgacagattgcttggcctcagatgagggtgctgaggaaggagtaggctgccatgacctgggaccctggggttagaggcagtgggcagtgtgacatttccacaccgatgtggcctcacagccttcaccagagccctgtgtaggaggagcgggaggacccgatcctactcccagtctgtcttcccaaagcagcagacactttggagagccacctgcagatggaaaggcggccattctcttttggctctgggcccaggtccctggagccaactctacacctgggcccctccatcgccccacccgtgcagttgaaggtgcagccactcgactgagtgagggcaaacccactcctgggtttccctttgcagccgcagacgctggactccactgcgggccgggcataaccctgtgtgctttctgacaaaccctacaataacacatgaagcaagtgccagctttgttttcagctgagtcaagttaggcccaaagacatgaactgatgtggccatggtcgtgagaccgaagagggcagggtcaccgctgggattggacaggagggctgaggggaataggcaggtttccctctggcccaaggcagcagccttgcccgttttcagctgaagagggcaacgcacatgggatgatcagttcttctgttgttctgagctgggcatctgatttctctgattcagcattttatagacagcagtttcagaatgcacttccggaatattattagacaaaaatagctttcttcattgtattagccctggcatctgtttttagggataaattaaacaccacagtayagatcttgtgactgtgtacacagggcccaaagatggaccgatcrtgtcctgaacgttgtttagagaaagatgggcacagcgtgccttactgtcggcacctggtggctgatggacccggaaccatggactccacttctgcttacccctccattcacagcctccttactctccccaggctttgctgttctacaccaacgccctggcagagaacgacgcaaggctccagcaggccgcatgcctagcgctcaaacacctcaaggtgagcctgacgtttccccattagtggctgatagaaaagcctgcttgtggttagggttaaggttagttaacttcaaaatgattccactggggctgggcgtgatggctcackcctgtaatctcagcactttgggaggccaaggcaggcagatcacctgaggtcaggagtttgaaaccagcctggccaacatggcgaaactccatctctactaataatacacacacacaaaattagctaggcgtggtggcacatgcctgtagtcccagctactcgggacttgaacccgggaggtggaggttgcagtgagccgagatcgtgccactgcactgcagcctgggtgacagagcaagactccatcttaaaaaaaaaaaaaaaaaagttacaaaatacagagatagaaaagaaagttatccatcatcctagaatgtagcagaaacaatggttgacattctggtatgcttcttttaaaagtttgtgggtgtgtgtgagcatttaaaattgttgatccaaacatagtttaaaaacagtcaacaaaataagaacattttgtgttagactggcagcactttagcttttttttttttttttttttttttttttcttgagatggagtcttgttctgtcacccaggctggagtgcagtggcgcgatctcggctcactgcaagctctgccttctgggttcacaccattctcctgcctcagcctccccagcaactgggactacaggygcccaccaccacgcccggctaatttttttgtatttttagtagagatggggttttacctgtgttagccaggatggtctcgatctcctgacctcgtgatctgcccgcctcggcctcccaaagtgctgggattacaggcatgagccaccgcgcccggcctagaattctttatttrkggkgttttttttctttttttttttttttttttcacttgagaattctttatgaaggggctatcaagtgtataccttaatttaacctactcagctgctttcataggaaagtttacttcatccaatttttatcataaatcatgtcttatgatcatgtttgtgcataaagctttaaaaaaacatggagttctgaattatttccttaggctagacccaattctaggacyggagaatatgagcatttttgagactcttgatacaacccacacatagatcccatggatgtgaggggatgcccgctttccctcaacctcacctgcatttggaattgcacaattgctagatgaaagataattcagtacagattgaactcccattcattctgggatggatcagcaggaaattctaagaggagaagctggttaggatcagaaaaccagcgagggccaggtgcccagtagagggcgctgcagcgcatgccggtccttggcctgcaggagcagccagggggcatgtgcctgagttgggcgaagtactggcacaggctgtcctggagagtagggcaaggagagcgtgagggaggcaggaaggtccagaaagcagcaggtctccttttcaattctagcctttcagcaggcatccaggatgacgagttctgctaacagcctggctccctagcgggtgtaagggctgaagaggcgagacgcttccagagtccagaggtgcctctcatgaacctgaggccacctaaaaaacctggaagcctggagaaaaggaaggggctgaggccccagagaccatgctaggactggccctgcagggccactaagtggactctacctgctgttgagaaggccccctaaagggttctttttctcctaatctcgaacagggcattgaaagcatcgaccagactgccagcctgtgccagtctgacctggaggccgtgcgggcggcagcccgggaaaccacactgtcgttcggtaaaaagtggcacaaactgtgcagcgcagcggggtgcctggggcccttagaatctgcgagaggccacacccagctctcccagcaggcagaacaactctggggcacctgggatgggcaccgttagcagccctggcacagagccgacctccaccctttgtagcatcctgccaaggcaggcctcctccatggctggggtggcagggagtgttcsctgtcttcttagacctttgggatagaagccagaggcaaggcagggttcccattcagcggaacatcctagaggtaaagacaaggcccccaggccatgtgagtcaccaggtgggggctcccgcacatactccctcccctgccgctttgcagagaccactgagacccacagtcactaagcactagggccaccctggcccaggagagttggaagtgccaaggcaggatccaacccgctgacaggtccctttgctatttcaggtgaaaaaggacggttagcttttgagaagatggacaagctctgctcagaacaaagagaagtcttttgccaggaggcagatgttgaaatcacaatattttaaaaaatcctggctgatgagcacaaatctcacatcgttttttttgctgctgcccagcctggacatagcctgcactctgggtaatgrtgctgtgcactcctccaggagtgtgagctgcccagagctctacctgagactccggccattgacccagccccagggcatgggctggtcttttgtacagaggcagaaaaaagcaaggcaaaggtacagcattccaggggctgcacggcctcaacagagcgctcaacttctggctgagggtctgtgtgaccttccccgagatgcagagctgagccaaactaggtggccacctacaaaagggccaaggccaggcaagttgaggccctaaataaaaggctccaaggcaagtgtgtagaactccaggcctygctgccggtcagctgctcggcacttctgcgtcaagaggcactggggatgcagcaggctggcaggtggctggccctgctaatgcaagactgctcaggccatttcagcagcagccaggtgtcaccttggtgagctggggaaggtgggaaggcacaaagccagggtttctacaaccacactctcagcccgactgacttgctgcgagtgctggtggagctcacagacggcggctggtggatggtggactgtgaacctcactttccctatgttcagcagcacaaagggaagaagccaccacatcagcccaggagccctgagcagcacaggcagtagggccactcactttggccatccgcacccaaatgcaatcaatcaacccagcttcggaagctaccctaggatctcgtcaataaactgctaagaagccatcaactggcctaaagaaagagttcactgaagaacgcaattgctttaaagaaagaaaaattagtttcctatttaagtcttaaaaaaaagcaaaccatgtcctgagatgtctgtgttaatagtgcagagagaacctagggtttgaggttgctgtagcaatggcattggagaactttaacttgaacattctcatcgatacttcctggacatattttgtgtttttaacttacttagtatttatttgccttgttcatatgttcaattttctgaaatttcaattaaactattggtgtttcactttttacccaaaagagtagacagcagttgtttccccaaatacctgccagtgaggaggtcactcctgtggtcttgtggtgcgctgtggggacacttggagggtggcctcaggcagcagctccggtaaatgcagtctccaggcttctctgcatgctctcgaaggctccaggcgtgctctcccctatatgggcactctgtggcacggcctttgcccttttgtcccatctgatttctggcaaaccctctctttttaagcatcagcagtaccagcctagagcaggggtcctcaacccccaggccacagaccggtactggtctgaggcctgttaggaactggactgcatggcaggaggtgagtggcgagcgactgagcatgaccacctgagctccatctcctgttagatcagctgcagcatcaggttctcttaggagcgtgaaccctattgtgaactgaatgtgtgcaagagatcaggttgcaagctccttatgagaatctgatgcctgatgatctgaggtggaagtttctatcccaaaaccatccctcaccacccccaggcctgtgaaaaaattgtcttccatggaaccggttcctggtgccagaaaaggttggggaccgctgccctagagcatcctccctcttcttgaaagcttagatgcccttttttatacctgaaatggtggaagccacactgacttctgcagccccaggcccctgtgggtccacatgaccacagcctgtcctcttcccagtctcatgagcctgggcctgcagccagctttgaaacagtcgaggaaacttcgagggtactggggaactcttcgtactattttggcaacattttgcaagtccaaaattacttcaaaaagtcaaaaaaatcactttggggggaatttacattgtttaattttgtacacaaatgaaaaactatactaatctgtcttatttctaagtcaattctatatcaagtggactttacgtactgagatgtggtaaccattgtgtcttacaggtaattgggtaagggatatggttttgagattacaactcaaaacactgttcttcaaacaacactggtaagtttgttaagttatctgagggccctacacaggcaaagcgtcaatttgggaaggaaatgggctgaggcctaaggtgttcaacaagctcacagtcaaggaaagcgctccagcctgagggtgctggcaatgcagggatgctgaggttaattcttagaagtggaaaactctaaccccagctgattgacaacatctgtttcacatcagcagggatagaaagaaacaggagttactcatcctggtttagctctattaagcaaagaaaaaaatgggaagcaccccaaattcatgttctttagaaaaaaattttattgttgcagctaaaatgcaaacccatcatgaatatggcaagttggaaaactgtacagtctgacagttctgtgaggtcacagaagaccctgagacactcccccccacccacccggtcatgcagccacgtatccacacacacctgaaaaggtattataccaaaacaccttgctttttttgtttttatttttgtaaaaatggtttattccatggccattgtaaaaaataatgacctgatgagtaaatattggcttaaggcatatagcagagcagctcgctacctctctaacataatgtgtaacaaggtggagagccagctgctctccaaggataggaggttaaaccagtacgtccattttgaaatgctactatatatacacacccaaactactacatacatatacaggacttaaaaacaacaagcccagctcagaatgcttacagcctggcacctaagccttatccacacctcaccatagctctgcagggtgacacctcgaatgttcccaccacagaatttctctgtactggcttctaccacgagaaaggcaaaatgtgaaaatgctggcaagagagtagctcgggagctacagctgccgtgtttttcatgttaaaaagccacttaatgtggaggtcttcagttccctttgcaggaagagtcgtgagcaccatcaggccccacagggtttgagggtggggcagacgcgcctctctcggcaaggtgaaccgggacagagacggcggcaggctgcctaaaggaccgtcacccaggctgtttcaagaagtgtggtttccagcaggtgcctctcttccaaatcacggtctgctcaagaagagtgttgacttggaatggcggaggctgatcccaaaggtggggggcggggggtgtccctgcttccctaaatcatgtccagagcgtgaggtgtgaatatggcttcccatacccttggaatgtctgagttacagcaagaccctgctgtaccaggacaggctgggcctcaccaggaagtcactagagtgtcatgccaggaattaggcaaatgcctattcctggaaaactgcaccctattgctgagcgacaatgacttcagcaacaggcttaggaaccacagccatgtaatgatcaggtcatgcacaggcaggttggacttggacatggggcacattagtaagcagagatcaaagtttctcatttcaagcacatatttttcatcaggacacaagaagaccttacatgcattctaatacacacgggggagcagtgattgagaactagatctagcagataacagggaggagaataagcgggacaaagtaatctcacatcatgtttcttattaaatacccacgtgttcattatatattatagcattgttctatcttctcacgttacccacaatatcactaaataacaactgcttacaaccgtcctccttcccagtactggtctgacgcagcaggcccatggcaaagccttccattcccagtactacctgaggatttattattgtactttttgataaagcccttgatgcaaggctgacatcaaaaaattttaatacattattggttcaagaaaatgctagtgcactatggatgcctttggggaaaaaattgtttaaataaatatggagtggagagttgctccctgcagattcaaggggggggctgttggcgtgccgcccgcctgggatgctccaggagggagccctgggtggggcgagccccaagacgggtgtaggccccttccctctgcgccgccagcatggtactctctttcactctcctcaaaaaatggcttgtggatttggtactcaaagtggaaggggcaaaaagtaaaaggatgaggggtgagacacacatccggggaagatgggttttagtgcagaaccaacgtccgtccggggcccggctctctacgcggtccggcggcccttacctaccgcggcatgcctgctagtcgggcgtgggctctgcgggcagaggcggacagtgggtggaggtggagtggaggagggtcaggctatgtgttgctgttgaacaggaactggaatgaaaccaaacagttcagatgagcccagacccgcacctgcagagctgtcgcctcatgcatgaccccggccacaccccccggcaacttcaacctccgagggagcaaagggggttttggttttattttttacagtagccccctctccccaaaaatcatccccaaggaaaaaattgtttgcattttgcaaaaccatctgatgtactcagatgccacctggaaagaggtaaaatatttaaaaccacgaaaaagtcttaggaggtcatttccatggccagagctctgaggctagtcctctctcttccccttacttaacagcaacacacgtctaacgtgtgaatttctgctgaaatggcacttctcccaatgaggtggagcccacttctctgaattaacagcgggttgacatgccaatggccaccctgtggtgacctctgacccccaggcagaggcctcgaggacacccatttatggggatggggtgatgagggctggtacatgagcaagatggctgtcacaggagggagcaatggagaaaggacaatggaaacccagcggggacaccctgagcagaagcagaggcaggttctgtttttctagacggccttttgttgctgttcttcttatagtgggaaagctcaaagaccctgtcctggctcagtgtgcacacagctgaggggggcttgagcgcaacagcgtcctaaccctcttctccaagggagtttacattcgtaaaagtttgggattccttccctgggaaatcaaatataaattatatggctgattacatcacctaagggtatgagaaagtttcataagtgcctactttgtttttttttgttccagaaataacaaaaagctgctttttataaaggttaaaaacaacaatgtgttgtaactctatttttttccaaaaacaaaggaataaaaaaaaaaagagagagagaaacagacgtatttggcattttctctacttactcctgaataggttaaggccctgagattagactcttatattcttgggaccagagggctccttaaaaccccagtgcatcgatccttaattctcttgttagcccttccacagttccagactttaaaaacctttgatctgtttcttctgagactggctcagatgcaccacagaactgaatcctaccatcgggctagcggccagtgctctctgcacacgagcatctcgccagcgcgtctgtcagtggaaacataccctgtagcagaggtaagcgccggccgtgaggaccgtagccacgcacatgttgaccaggaagggcttccagtaactcagtgcatggtcctcgtccttctcgggcagtgacggctcccctttggctggggaggcagcctgggcacctcgaagacttccccccacgacccgacttctaacttcagtgtcttgactcatgctgaggaatcagagggcagagatgggttactcactttggagaaaatgaatggcaaggatgctgctattgtggcaggaattctaggaaaaaacaagccacgtgtagacagagttggatgatgttaaccttccagcgagccagccccctctgcttggagggagggccaggccagggcccacatcagcctgaagtccacttgtcaccccctcccccaggtacttcagatagcacccacacccagggtagggttcacaaggtgcctgggcgactggtcactgtgaggatttatctggctggaggactcactggtgtacacactactgtatgatttgccttctcatgtactgcaattgcaatgtctggccacatcagtacacccagatctcattctttaagagctacagaatatcccaacaccgggagagaacataattgatcaggtccctggttatatcattggcctgtctctaatttttcactactacaaacaatgccacaacaaacacaactacctatacacatctttacacgcttgttttgagagttgctgcaaagtaaatttctccatgtatacaactgctgggtcaagtatgcacacgtcttaaaacttccctccagaaagcaggtaccaagggcacagccggcagtcatctccagctggaactaacacctgctcattctgcaaactttccgtgcacggccacctactgcaagcagccttccctgaccacctcagcggacacctctatcacatcactgtccatgggcccccaccaaaatatgctttgggtctgcctttttcccagcaagatggtctagaacacagaccaggggacatgttctagttaactcagtacaccacacatatcaataggtactcaataatggttgttaacctgcaaggaagtaaaatgggatttaatcaagaccacataaaaaaggttacattccccaaaggaccactgtggggactgagggcactcaagcctggacatcacatttcaggactgtccggaaacctgg

SEQ ID NO: 98037 - DNA, 42300 bp, Homo sapiens
  misc_feature (1)...(42300): n = A,T,C or G
ggatagaaagagatagcatgatatctattttcagagagtatatactataaatggaaaccctaagataatcattctaaaaataatatcaaaattaagaaaaatgacccaagtagcaataaagaaaagcgattgtctttatatattcaaagaaaaataagctagaagatataaaggaagaggaaatccagcttacagttgcagtaaatattgttaaactcaagaataaacttaaaatctttaattttcaaagatgcaaaagtggactagaacaaatgtaaacaaatgtaaatatgctttgttcgtggataggacaacggcacctcatacacatattaattctttccaagttaataaatttaatgtgattctaatgaaaatgccaagcttttttccccaaagtagactattgattcaaagtttctgtggaaaatgagcaagcagggaaagctaagaaaactctggaaaagaagaatgagagaaactagtccaataagctattaaaacatttcataaagtccttataatttaaaaagcatctattcattaatacataagtagaccgatacaatgatagaagagaatagaaaaattcaggagaaataggacaattatatacgaaaagttaagtggcaccaaaaattaccactaaacatatgcttttaaagaataatgtcgaaataactggatagtcatttgggtaaaagtaaaaattgggtccacatttcacactgaatatcagaaagaaatccaaataatccagatatctaaatgtgaaaggtgaaaccacagaagaaaacaggaattcacttcattataaacttggagtgagaaacgcctttctagagatgattataaatcccaaagcactgaaaaaaataataaaagactgacaaatttgactacataaaaataaaaagaacttgctcaaagcaaaaaaaggaaaagtcataaaacaaatttaaaacctgaaagaaatatttgcaatttataccacaaaatatatcataatctcctaattaacaaacagttcttaaaaactgggaagaaaggcaccaaataccagttgggaaaagatgtaaagagacagttaaaaaaaaaaaaagcaagcaattgtccttaaacttatgaaaaaggctgaccttcctcataataacataaaggcatacagacatccctcagaaacattgcaggaaatattacacacaaatttaaggtttccaagtgcatataaaagttatgtttacactatactgcagtctattaagtgtgtaataacattgcatctaaaaaagcaatgtacataccttaattttaaaatactttattgctaaaaatgctaacaatcatctgagccttcagtgaattataatattttttgctgatggtcttgcctctatgttgatggtggctgctgaagactggggaggctgtggcaatttcgtaaaataagacaacggaagtttgccacctcaattgattcttcctttcacaaaagatttctctgtagcattctatgctttttgatagcattttactcatagtgaaacttctttcaaaattaaagatggaagaacggtcaactggtggagtagtcagaatacacaaaacatttattaagttcggcatgcctcatggtgtcccaaaacaattaaaatggtaacatcaaacatcattggtcacagatcaccataataggaaacaagtttgaaatatcgtgagcatatttcgagaaataccgtcacattaccaaaatgtgacacatagacgtagtgagcaaatgctgttggaaaaatggcaccaatagatttgcttgacacaggattaccacaaaccgtcaatctgtaaaaaatgcagtgcctgcaaagcacaataaagtggagcacaataaaaacaggtatgcccatattaaacttactgagagatacgatttttcatctctttagattttcaaaaatccaacaacttaaatactaagatctcaagcaataaagaagcaagcaccctcacacattgttagtggcagtgcaatatggtacaactcctatggagaggaatttagcaatatctaactaggttgcatttgcatttaacctttgacctagctattctactgaagataatcactttcccaaatatgaaatacttatgaatcattacttgcagcaacaaaagtttagaaatcacctaaatatctattggcagatgactggctgaataaaataacggaggattatgcatttaatttttaaaatttaagaaaatttctgtgaactgacatgaagcaagttccagtatatattgttaagcaaaaatttcaaggtgcagtatatattgttaagcaaaaatttcaagagtataatacatgtgttatcagttgaattgtgtcctcgaaagagatatgctgaagtcctaatccctggtacctgtgaatgtgacctgatttggaaatggggtctttccaaatgtaatcaagttaaaatggggtcatactgcattagaatgggccctaaaccagtgactggtattcttataagaggaaagtttggacacagagacacagatatgtgttgtgcaacgatggaggtagaaattggagtaatgcttctacaagccaaggagtctcaagattgctggcaatcatcagaagctgggagaggggcatggaacagattttcccattaagcccccatgaagaaaccagacctgcccacaccttggttttgaacttctggcctactacactatgagagaataaatttctgttgttacaaactacccagtttatggcactttgttatgcagccctagaacactaatataatatgctagatgtttttgtaagaaaaaaagaaaaataaaaatgtatttgtctatttacctttttttcttttgcaaatgaaacataaaagaaccagaaattaacacaattatttaccatagaggattagttgaaaggccatggagaggatatgttggggagtaagccttctttaaacataccttgtcatagagttttgactttatacatgttatacataacttacttattttttaaaaaaagtaaattgaaagaaaacaaaacaaaaaaggaaacattgaaattgaacacaaatgtaatcaaaagaactgaaatatatatcaaattgattccatagcacatagagaaaagggtgatttcagaaaacttctgaacacagtactctagatatccagtgcaggatatactctaaaaacaataggaagtgcaaaatgatcttaggcttctctttatttttagtggcagtattaaaattgtaaaagaccactcaactcaaatcgttggttgacttgctttttttccgaggctgcaagataattctggactaataattacaggaattcagacagtgctatagtaacagggctcatttggataaaaggtaatacaaaaattaaagaagttttaccttctcaatacacccaagtgacttacttcctcctacttcacacaggggtggggaggtggggccaaccatctcctccctccaaatcttccaactaccttgtgctgcaacccatgtatgcaggactctctggcctccccatagtccccacccactacctccctgtgtcagaagagtctgtgcgtctatcaaagaccaaacctcccacttatgctctggactccatcagccttactttcaagagggtctgactgcctctgtcctgcagcatcaaacttctgtctccactaaataattcccagcagcatgaactccttctactagtccctaccttgaaacacaacacaacaacaaagaccctctttgatcacacatcttcccccagctaccacttcatttctctgatcacctgcaccataaaatcgatcaaaatcatagcgaaaaacagtttctacctcgtcacctccattatctcctcaatgcagtcagccaggctttggtctacctaccccataaacccacggcctccctgttgccaaatgcaaccatcatttctttgttaccccttcactcagcctctaggcagtgaaccacacagctgaccattttctcctcctcctccttctttctttttcttcttatttcttctccttcttcttctcttcctcctcctccttctcctcctcctccttctcctcctcctcctccttctcctcctcctcctgctcctccttctcctcctcctcctgctcctccttctcctcctccttctcccttctcccttctccttcttctctcttctccttctccttcttcttctttgccttcttcttctcctccattcttcttccttcttcttcttctcccctcttcttcttctctttttttttttttttttttttttttttttttttttttttttttttttgttgagacgaagtctcactctgtcaccaggctggagtgcaatgacacgatcttggctcactgcaacctccgactccctggttcaagcaattctcctgcctcagcctcccgagtagctgggactacagacaggcgccaccacgcccagctaatttttgtatttttagtagagatggggtttcaccatgttggccaggatggtctccatctcctgacctcgtgatccgcccacctcggcctcccaaagtgctgggattacaggcgtaagccaccacgtccggcctcttctgcaaaaacttccctccacagacttccggttttcctcccttctcacagatctctccatattggtccccttctcctcttgtccgtggtcaccttctcggagtggcctaggcttagttctcagacttcaatttatactcaccctgggtgagctcattcagtcttatttcaaatattttctataggaagatcaaattcgtatctttagctctctctctcctgggctccagaggcgtttatcccgctgcctgtttaatacctctaccaggatggtctctggagtcaggctgtctagataggtatcctaccctctacctgtgtggccatgtgatccttaactttatcactgaaatggagatgataatagtacctacttcatgaagttatttgtgaagattaaatgcaaaagtgcatataaagcacttataacagccctggcataaaggaattgctcaataaatacctatttgtttacttgttaaaggtgaaggaaccttacctatgtgtctaattcaacaatgaattcccaaggcctagaacagtgcctgacatatgctaggagctccatattgactgactgaatgaatcgatttctataaagggggaaaaggtagtacctacagaaatcagctcagttgccacaggttgtcttgactggaagcgtcatctgtggcttttttccaacttcccagcactgtatttttggaatctgtcttctcattgaccaagtcctaggaatgtaactgtggcattcctgcctctgatatctggttctgtggagcaagctgggtttttttctttaaaaatctaaaatatgatttattgttagaatccattgataatgttttttcatttagactcagtctcagcagcgctaagtagaaacctagaaagcggatgtatattaggtaaaaatatgtatatattgactataacacgaataaaatttaaggacgatgtaagacaatgaattttcttgacaggtatgggactgggctggcacagtcggttaagtgcccaaagggtatataaacccgcgacagggcagagcgcagcccccgccccgccccgccccgcccccacacccgcccgccccagaaccccagacccgcccctcccctgcatcccggctccgcccggcaccttgcccctccctcgccccgcccctccccgcctgaatcccggcccccgcctcgcatttcggccccgccctgcaccccagtcccgcccctcccgcacccccacacccctgcacccccgcatctcagccccgccctgcatcccgaccccgccctacatctcggccccgccctgcatcccggccaagcccgcagcgcagggagctgtctgcagaggccagggtgcgcctgccacgaatccccaggcaccggtggccgccgcggcccgagtagctcggcgggtaaacatggccgcactgacgacggttgtggtagcggctgcggccaccgcggtagccggggctgtggcaggggcgggcgcggccaccgggaccggcgtgggagcgacgccagcgcctcaacaggtaaatccgggagaaccgagagctgctctggcggcaggcgaggggctgcaggccctggctgaacaggtgccctctgcagcgccggcgggaggcgcggcgttcgcctcccctsctcggggcctggcacgcgctgggcgttgctctttgttggcttgtgcgtttaacagcttttgcagagccgcctccatgtggtttcggagtcgaggaagacctgggtgggaacccggctctgccgcttcctagccgcgtgataagaacatatgctgtcggcgactcactttcttctctaaaaattgggaatagtaacatgcacctcccgagctttggactaacgttatgtctggggagcccctggcacagtgcttgattggagggggactctgtgctcagtaattggtggcagctctgttactgtaccggcgctgggaacacaaggagaaagacaatatgggatggtcggaggcagaggtgtttccagtgatcggcttaggaccgctttctaggtggtgaggacaaggtatctttgttcagatgttatcagctcagcgagactttccatgatctccctaaaatgaatcgccttacgcggcacacccagtccctgtttctggttttatttttccccatagcacttagtaccatatattatattacatactttatttctattgtttatgtttctcctcacacccctcaccctccctcgcacccccatgagaatgtaagctccatgagggcagaaagtattggaaattttattctttattgtattcccagcaccaagaactatgcctgttgtgtagtgcctggaacgtagtatgcacttactaaataatttgtggatcaatataaacctgaaggaaggctgtcatgagctgaggagaggttccatctttttcctcctttaaggaaatacagtgtctttactcgtagaccttcaggaaattccacctacggcaaattttctcacacatcctctataattctctttattattctaactctgtcccaagtatctcaggaaaaaatgtaaaatatataaatatacataatacgtaaagtatttttaagtactatgctcaaaaaaatgtgtgacaccatgttgctggctttctccatcatttctctaaattcttgtagcaatgttctgtcttctgatctgcatttcttgcgagttgcctaatgttgttattgatgcacacttttgtgatgtttgccttctcaggggttggatcagatcacctgtggagctctttcagatattttatcaatcccctagaggatatctagcaatgtttggagacatttttggctgtcagagtggggagcaggggggtgttgaggggctgctagcatctaatggatacaggccagagaacagccacccataacaaaaatcatctggtccaaaagttagtagtgctgagattgagaaccatggtgtatactgtcttaccactttagtagggaaagcagagcctcattgttgagaatctacctcagcatagttaggtagaattcttcacgtgtgtttgggcttttttaaaaaaacaaaacaaaacaatgcagcattactgcatgctatattgtgataatgtttaggagtttacatgttatccatttttgtacttcccccagcataccacacgcacatacctatacacacaaattctacagcctaacaccgaacttgaatatttgtcatatgattaaatgaacgaatattcctactgactttaacactgaaaccaactagtattttcttgagaagagagaattttcctggtggcaatctcatgatactagagatgtctaccaaaatatctaaagttcctgtcagctagggcttctataacaaaatgctacagacttggtggctaaaacaacaaaagtttattttctcacagttctagaagctagaagttcaagatcaagttgcccttaggrttggtttctggtgaggcctcttttcctggcctgtaggcagccaccttctcactgtgtcctcacatagtcttttctctgttacaagaggagagaaagagatctctggcatctcttcttataggaacactagttctatcaaattaggtccccaccttaatgacctcatttaacataaagaccccatctccagatagagttatttggggatcaggccttctacataggaattttgagggaacacaattcagtccatcacagtgtctttaaattactttggagtaaatatctctgaagttttaaaactattttatattgtattttattttacaatatcctcagggcgtggaatctcataaattcctcactcattatgaaaagttaacacattttccatactttttaatatttgtatattatttgttcataacccctcttagctattgcctttcaaaactgaagaccgcaaatctctatcctcctctccaatgtcatttccttcttgttaccakctgttctcttgatcattgtagttgctgaattatgacttttttgaagtatctttaacagtatcacattagtgtgatgctggttttgtaccagcataaggctctgtcttctgttttgtttctaaggaccttccctctgatgacctgaattttatgttccttggctgcctgaaataacccttcaataataactattttcacctgtgactgtgtaatcttgcatcgtaaaagggactttgcaggtgtgattaagataaattaaataccttaattatctgagtggacctggtgtaatcacaaaggtccttataagasagtcgcaggaagatcagagtcagaagtaggagatgtgatgatggaaggaagaggatggagtgatgtgaggaaggggccattagccaaggaattaaggtggttctagatgctggaaaaaaaggtaagggggtggattcttccctgaagcttccagaatgaatgtagccctactaacacctttgttttaattaacattatttttaattgacaaatcttaattatatacatttatggggtacagtgtgatgttctgatatatgtatacaatgtggaatgattaaacctggctaataattaacatatctatcacctcacttatttttttctggtgaaacatttgaaatttactcttattttgagatacacaatacattattactgagtatagttaacctactgtgcagtagatctcaaaacattcctcctgtctatctgaaactttgcaccgtttgaccaactacctatttccttccttgccctccccaccagcctctggcaactattgttctactctgtgttagattccacgtgcagtttaagtgagattatacaggatttgcatctctgtttcacttagcgtaatgtcctccaggttcacactttgattttagagtagacctccagaactataagtcaataaatgtgtgttgtttaagccactgcacttatggtgagtttgttacagcagcaataggagacaccaggaaagacctaagaagctctcagtcctcatccttgtttgtctttgaaacactgtgctggcagaaagtaaatactaagatagggttgtaaactgcctgcctgcatgtaggaggtatgcttcagcatgcatacagaccccctttcccaaaggtagcaaaggctaggacacatagtggttcaatgcatctaaggaaatctctgaccaattattggctgacaactgagctaaccaatcagagatttcactgccacacctgaccaagactacagattttacagaattagtttaaagtgaccaaacaaacagcaacaaaamaaaccctgctaaggggagagaatctcatttttggagttgtccattatattattttatatgtccagtctttaacaaagttatgagacacggcaagaaagtatggttcacacatggggaaaacagtaaaaaggaactgtctctgaggaatactggctattggacatactaggcaaagacttcaaaacagttatttaaatatgttcaaagaactaaaggaaaccatatctaaagaactaagagaaagtgtgggaatgaaatagaaatctttaaagaaattaaacatttaaaaaagaatcaagtagaaattctggagttaaaaaatgcaagaactcaaatgaaaacatcactagagagactcaacaccagatctgagctggcagaagaaagtatcaacaaacctgaagataggtcaattcacattatccagactgaagaacagaggcaagaaaagaatgaagaaaaatgaacagagtctgagatctgtgagataccgttaggcatactaccatgtgcataatgagagtcccagaaagaaaggaaaggagaaaaaaggaggaaaaccgatatttgaagaataatagaagacktcccaaatttgatgaaaaacattaacctacatatggatggagctcaatgaactctaagtagaataaactcacagaaattcatatctagacacatcgtaataaacctgccaataaatatggacaaaaagtcttgaaagcaccaagaaagaaacagttcattacatataaggaattcctcaataagattaacagctgttttcacatcagaaaccatggacaccaaaaggcagagggatgacataaaatagaaaaagactgccagccagttgttctttgtacagcaaaattattctgtaagattgaagaagaatttaagacatactgaggcaaacaaaagccaaaataacttagcataattgccctacattaaaaggagtccttcaagctaaaatagaaggacactagacagtaacttgaatccacatgaagaataatgtgaatagagtactgcaaatatataggtaaatatgaaagtcagcataaatgtatttttgtttttaacaaatgtttttcagaaaatagaggaggaaggaacatttttaatgaacatttctcattctgtaaggccattattaccctgataccaaaatcaaacaaaaaacatcacaagaaagaaaaatacagaatagtatctgttataaatacagatgtaaaaatactcaacaaaatactagcaaacatatctaaaaacatgaaaaggattatacaccatgatcaattgcagtttattccagacatgcagtgttggtttaatatatgaaaatcaattaatataatactacatattaatagaataaagggcaaaaccgcataatcatcccaatagaagcagaaaagcaattgacaaaatccaacaccctttcatgaagataggtcaattcagattatccagtcaacaaactgtcaatagaagagaactttctcaacctgatagaggcatcattaagtaacgtattacttaatgatcaaatatggaaagctgtttccgtatgatcrggaacaaggcaaaattgtccactcttaccactttactcactgaaagttctaactagggcaattaggcaagaagagcaaataaaaagcattcgtattggaaaggaagatgtaacatgatacttattcacagatgacctaatatatattaaaaattctaagggattcacacacacacaaaaaaaacttactagaaaactaataaacaagtacagcaaggttgcagaatacaagatcaatatacaaaagtcagttgtatttctatacactagcaatggacaattcaaaaatgaaattaagaaaaaataccattgataatagtatcacaaagattaaaatacatagggatgaatttaacaaaagaagcataaaacttattctctaaaacctataaaaattattcaaaaaattaaaggagacttatataaatgaatacttaatgtttatgattttgaagacttcattttgttaagatggcaataatccccaaattgatttacagattcagtgcaatctctgtaaagatcttagctgccttttaaaaattattttgcagaaatgtacaagctgatcttaaaattaatatggaaaatgcaaggcacccaaaatagccaaaacaatcttgaaaaagaagaacaaagttgaaggacttacacttgttaaattcagaatttaacttcaaagccacagtaatcaaactatggtactggcatagggatagacaatagacatatagatcaatgagagtcaagacatacacctacagttttatgggcagatgattttcaaaagggtgccaagacaattcaataagaaaagaatagtcttttcaacaaaagtttggacaattgaataaccacctacagaagctgaactacctcacaccatatttgaaaaatatctaatctgatcaaagatctaaatgcaggtctaaaaaacttagaataaaacacaggcatgagtcttcatgacctttggtcagtcagtagtttcccctgtatgacacctaaagcacaagtagccaaagactaaatagatactttggattccatcaaaattaaaaaacttttgtgctttaggccacgtgcagtggctcatgcctgtaatcccagcactttgggaggcccgggcaggaagatcgcttgaggccaggagtttgagaccagctggccaacatcgcgaaaccccatccttactaaaaatacaaaaattagccatgcttgatggtgtgtgcttgtggtcccagctacttaggaggctgaagcaggaggatcacttgaactggggaggtggaggtagaggttgcagtgagccgggattaagccgctgcaaaagaacattattaagaaagttaagagataagtcagagtatgggagaaaatacttgcaaattatatgttgataagggtcttacatctaaaatacatgttgaacaaagttacaacaaatttagttcaatttagatcgaattggcttttatttgcgattcatgaattggggcagcatcccattctataaaatagagtaagaatttccacagggcatgacagaacagtgggttctgtaaagtaggaacaaaaaacccagaaacaatagaaaaaagtggggatctcagccgctggggtggcgggaggagcggcaacagccaggtagcccagctccacagaggctcacacaccagggcttgcaagcactgagcaccaggcaggtgcctttcctgctgccaagaagcccaagtggaaagtcagctcagcagaaggggaagtgaaggaagagcccaagaggagattcttgcaattgtcatctaaacctgctcctacaaaagcagaaatgaagccaaaaaaggcagtcatgaaaggataaatcttcagacacaaagtgcaaaccgaagggaaaaggagaacaaaaggaaaactggccaaagtggctaaccaataaactaaagaagacttatctgcagaaaacaaagaaactaaaaccaaagagggtcctgcctttgatgaaggctgagggaaagaagccaagtctgtctggcaataaaatgaatttggttaaaaaaaaaaaaaaggaagccaatctgattaatatcatctactgtgtcttagtagtccctgtctccctccttgtacaatccagaggaatatttttatcaactatcttgtaaatgcaagttttttagtcactcagggaacatttttaagaaggagggaatcccacctcatcctattttttaagtgtaaatgctttaagaggtgaaatcatttgctggttgtttattttttggtacaaccagaaaatagtgtggaatattcaattatgggaggctttgactgtcttgggtgtcagcatagcattccatagatgggggttagttcttatatcttctaatactaagtgtactaaatggcratatggagtcacggtcctgcatttaatgtcttgaacattttaaattacttccattcccatgttattttttagtagaattgtttccttataaaaaccactctttgatcatggctttccctgtcagaattgtrtgcactctgtgacatctttggttatggtagtcctatattttcctaataacattgttagtgtgttgtgaaagactgaaaattagagtttgtagtgtatatggtattaaattgtgagttgctgggatgtatttaacagcttatcaacatgtgaagatactggtacttgatcacctcttaaggaaaatttccctccaaatttaagctggaaagtcactggagtaacttttaaaagtacatggtggctgggtgcggtggctaacacctgtaatcccagcactttgggaggccaaggcaggcggatcacctgaggtcaggagttcgagaccagcctggccagcatggcaaaaccctgtgtctactaaaaatacaaaaattagctgggcrtggtggtgggtgcctgtaatcccagctactcgggaggctgaggcaggagaattgcttgaactcgggaggcagaggttgcagcgagccartatggtaccaatgtactccagcctggatgacaagagcaaaactccgtctcggggggaaaaaaaaaggcattttagatttttggtacctgtgttaaaaattgtgtgcaaattgaaatgtgtgtgtactgattttcaacacaaccaataaaatctcaattattaaataatattttgaagcaaaaagaaaaataaaagaaaaaagcagattggagttgagcacagtagcatgtgcctgtagtctcagctactcaggaggctgagatgagaggatcatttgagcccaggagtccaacctgggcaacataagaagaccctcaccactttaattaaaaaaaaaaaaaaaaaaaaaaaaggaaaggggattggttaacatctgtttacttcgggtaacttatgaaggtaaaagcagagaggcttttcttattactcgggctcaggttgactggaccctttctgattggttgccgtgcatctcttgttttcaggaaaaattggtcagttggggaaatctacctctttcctcaaagtttcattttgatcatgtggcacttagcatgagtaactccatttttattttgtctggtcttttggggcctactgcaggagctctgttcaaaacaatagcctcccataaaagttgagtagcataaataactgttacaattcaacaataaatagacagccaaatttttaaaaagggaaaggatttaagtagacattccttaaaagaagtggccaataagcaagcacatgaaaaaaatgctcaacatcattagtcattatggactaatcagaaccactgtgagaaatcacttcatacccattaagatgactgtaataaaaaagacagacgataacagttattggtgagcytgtggagaaattgaaacccctatacattgctggtgggaatgtaaaatggtgctgccactgtggaaaacagtctggcaattctttaaaaagtttaaaattttggggcttcgaaggcattatcaagaaagtgaaaagacaactcagagaatggggggatatatttacaartcgtatgtctaataagggacttttacatccagtatataaagaatgcttccagctcaacaataaaagggcaatcctttgttgttgttgttgttgagacagtgtgttgctctgtcccccaaggctggagtgcagttgtgtggttatggcttactgcagccttaatctcctggactcaagtgatcctcccacctcagcctcctgaggtggcctcctggtggcctcacaccaccatgcctggctaatttttttttaagtttttatacagacaggatcttgctatgtttcccaggctggtctcaaactcctgagctcaagctattctcccaccttggcctcccaaagtgctagaattagaggcatgagccaccaggccccactatgccacccaatttttcaaaatgggaaagtaaaaaaaaatagttactttatgatccagaaattctgctgctaggtatataatgaagagaattgaaaacatgcattcacattaaaacatgtacacaaatgttcagattaatttggccaaataatggaaacaccccaattgtccatcagctaatgactgatgagtagataaagaaaatgtggtagacccatataatggagtattattcagctgtaagaaggaatggagtattgattcatggtayaacacggatgaatcttgaaaacatcatgtgaagtgaaagaagtcagacaaggctacacattgtatgagcccatttatataaattctccagaatatgcaaatccatagagtcagaaagtagattaatggttgccaggagctgggaggaaggggaatggggagtgacctctaataggtatgaggtttctttttggtatgatgaaaatattctgaaactgggtagtcatgatggttacaaaactttgtgaatacactaaaaaccactgaattgtacacttcaaacagacatattttatggtctgtgaattacattttgacttaaaatatatttcctagatttagatttaatactttgttcttttttgctcctggaaatttgaagccttgtttccttttcccctcatcccccacaacccatttttattgctcagcaatccctctgggtgatacctccaaaatacattgagtcttcttttattttctgtcagcccagtagtcctggacactgtcattccttgtctctatagctgtactaagtacctcattgatctcctgcttccagtcttgcctcactccacccccacacctcccatcaatttcctctccaaaaaaatagccagaaaattgttcttaaagagttaaatgtatcatggcatttccctgctcaaaactcttcaataaaatccagaccccctaagtgacctaaaatatctgtatgatctggcacatacctgcctctctactttcattttcctaccaagatccacaccgttactaatctcatgacacaattggcctttctctgcttgaactcagcaaagtctttcatgctctagggcttttgcacatgtggatccctttgcttagaacacactttcctactgctcctgtcatggctggcttcaatcttccttaaagtcatcccttcaaatagaccttctgtgaccactgtaactgaaaccctttctccgctttctccatctgagccctaatatttattttcttaatagcatttattgcagctggtggagttttcattttattgcttgtttactcttatctctttaaatctgtttttcctcactagaccttcagacagggaccatattattatagatcatcattgttttcctagtgtctaatgtagcccgtgtcacttcatagtgttcaatacatatttgttaaatgaccgactgaatgaattagatcattttgcaaataatccctggatatttaacatttcttactcagtttagcattttaagatagatattccttcatttgatagatactccttcttccacaaatgtacttttaagagttaagtgagattggccccaaaattatccttcaagaaactcaactattgacattttatctctctgaaaaaattccacatttatgtcttactattttcattactgttaagtttttcttgttctcaatgcagagtgatggctgttttagtacttcaggtggaattcgtccttttcatcttcagaactggaagcagaaagttaatcagacwaagaaagcagaatttgtacgcacagcagaaaaatttaaaaatcagtaagtataagaatataatcttcaaataacattactagccattttataatggacaataaaaaattaattctactctaccctacctaggctsacattaagttataaaattgtaatcactagcctgtcaaatataacaagagaaagatgggaggtatgaaataataggctgttcaatataaagttaattgtaaatagagttatttcaattttctttatttttacaattttgaatctgtgtatttcaagggaaaaaaaatagctgtttctttagattttatataacgaataacagacttaatctattttcactttataactaaatgcctggtaaatgtttttgaggaagtgaatcgtttttgtgtttttttattatgtgtatatgaaagtgttttataatgttttataaatgacgaacatcatatatttaaattgctcttcttcctgttttacaaatgaggatgttgaggatcatagaggataaacatctttccataggttacatggttaataaatggtgtttgagggactcttaggctggytccagccactctgaaagccattgttcttcttactaaccagtgatgttcaccaccaagcctatttgaatatgtgggtgtgatctcactaaggaagacagtgaatcaatttaatgaaaagtctgtgctcttacttttttttttttgagtggctttttaattgatctcaattccttggtttctgctcctttcagatccattttgcccattatgaccaagctatttgagaagcttccatttattttaaattttcaatatatatgaactttttctttaaacaaccattgatatttattgaatgttcaatgttgtcagcagtaccagcatataaatatgaagaatgttaaaaagaattagaactcaaggcaccccactctaccctacagttgagagctttatcaaaacgttgctttgaacctacatagtatcaatttgccaaaggacatgagaaaaggagcctattataaggaatggtctctgggwcagaattggtggcaggtctmtatttagaaattctaccaatgaaaaagtgtactgttagaattttgaaaagctataccatatcgtwgcttttggagactaaattctccttgcatttacataatacttttgtcttttcccccacttttattgaggtataactgacaaataaaaattatatatatttaatgtctacagtgtgatgtatggatgtacacaaacattgcagaatgattaccacaatcaagctaattaacatatccatcacttcacatagttaccttgtgtgtgcgtgaagggttgagaatatttaagatcaactttcttagaaaagtgagctgagattttcattatgttaagtgaaataagccatacacagaaagacagacaatgcatgatctcatttatatgtggaatcttaaaaaagtcaaactcagaaacagagaatagaatggtgattaccaggagtctgggggtgatgaggtgggagtggggataatggggagatgttggtcaaagggtacaagttataaaatagaaaagatctagagacctaatgtacagcatggtgagtatagttaataataacgtattgtatgcttgaagttgctaatacatatatctttagtattcagaatttgaaaaaatacagttctttaaaatatccaaaatgcattactctagatagaattagattctaggttagaggttctgttttatgtttctttctagatagggtaatgtccaccaaatggttaatatccatagatgcagcaaccagtgtgttttacagttctgagaaggcttcttcatctgttttagggcattggaaaaactcactgaaagaatattagaaaaactcattgtaagagtgtttctatctaacaattcacataaacacaaacgaaaaaccacaatctataatatctttttttaaatttttaaaataggtaatatatttacatggttcaagaatcaaaacaaatcaaagggtacccagtggaaagtctcagttttactcttcatccaagccacccagttcctttccactcagataacccactagttttggtttcttatgtatccttccccagatattttatgtgtttataaagaaatatatattcagatttttccttttttgtataaatggtagcataccgtccacattgctctgcrtttttttttaaagtgtatgtcttagataacaaggaattgtagattttgctaggcacaataatggcaytatagttaggtaagtcaaatatcagtactctctagaggcacacacaaaagtttgttggggtgaaattgcataatgtgatggatttacttgaaaatacttaagctaagctaagcaaagcaaaggtagatgtaatggatctacttgaaaatacttaaactgagcaaagcaaagatagatggatagatgaaatgagaggtaaaactgctgaatcagggtgagataaaattcatatcatatgatgggtgtcaatttaccattctgtacttttgaatatgtctaacattttcctacaaaaactttgtttaaaaaagaggttatcttggagatcttttcctgtcagtacgtagaacagagtaccactgtatcatattccagtgtatgaatgtaatatgatttatttaacctgcccatatttatggacatttaggttatattcaatctttttttaataacaaacagtgctgcaattaattaccatacccacataggtcaacattatttgtttgtaagtatatcttcaggataaattcctaaaaggaaatactgggtcagagataaatgaatttacaaatgtgataaatattgctaaattgccctccgtagacaacagttccaccaacaatgtatgagaagacatgytttcctcacagttttgtcaacaaaatatattaaatttgtgatttttttgccaatatgataggtgtgcagtgttactgtgatatagttttaatttgcatttcttctattgaggaggttgttttcatttttgtcgacttgtctccattaattagcatattttgaatatccttataggttaatatttctaatccaggaaaaacagaaagtaagttgagtttgtgatgaactaaaaactgttgagtgatataaagttgtagcatatcctgtgtccatggcagacgtttctttttatcatagtrattttccccatctgcaaccagagcctagatgaacttcccagtcctcaacacaggactcagtccattagagttgccaggtgggactgaaatctatttgatatctttatctacccattatttcttctcacaaacaatagaagctacctaaacacacatgctaagacatgatcccctcagcctctggagaagtgtggtgggctctggggcagtctcatctgtctacccccatgtgtcttatgaatattaaatttttctctatgggcggtcagatgcggtggctcatgcctgtaatcccagcattttgggaggccaaggagggaagattacttgaggtcaggagtttgagactagcctggccaacatggcgaaattctgtctctatgaaaaatacaaaaattagccagtcatggtggcaggcgcttgtagtcccagttactcgggaggctgaggcaggggaattgcttgaaccagggaggcggaggttacagtgagctgaaatcgcaccactgcactccagcctgggtgacagagcgagagtctgtctcaaaaaaaaaaaaaaaattctctatgtatggcaaagtggaaaagattgggaaactctacggtatagatagttgcctctcaggttgtgtgaattaagtaaatggccagtgatgctccaccacttattaaatccaagattagtggagaaatattcatattaatttccacctgggagaaagaaacacattaagaaaattaattttggctgggcatgatggctcacgcactttgggaggccgaggtgggcagatcacttgagctcaggagttcaagaccagcctgggcaacatggcaaaaccctatatctatcaaaaaaaaaaattagctgggcatggtggttgtgtgyccctgtagtcccagctactcaggagactgaggttggaggattgcttgagccagggaggtcaaggctgcagtgagctgagatggcaccatggcactccagcctgggtgacagagccagaccctgtctcaaaaaaaaaaaggtaatttgagaattgatttctttgcccaatcaaaaaagtttctcagtagtgttttattttatttttgttttctcttagggtgcaaactaacaatgagaactccttactgttagactaaattcaaggggcaaagatgtgctgaaagaagcctgaagtaaatgtagacaatagtcattaaatacccgaaatttcctgtctttgtagatggttagtctctcgaagttttagttttattaataatattaataactggcatttccatagtatacttgtactgtacagagatctcccacatatattatctcatttgatgtgaataatagccctattagatagtggagagctgttattattcacattttagtgatgaggaggttcatacctggagaggttaaccatcttggctaaggttacaaaattaatagtatctactattgaaagcagtcatcagcagtgatggccattttcaggctccagtgagattgagttggaatcaatagtcaaaagcttatgcattttcaaagcaaatgtmtatccacattttcttaaattatcattttatgatttacatagcagttcaaattatagttgtgtttgattgaaattaactcttctagctattattttgactaatgttttgattccttagccttattaaccaaagtaattatttttattccatagatgaattaatccaaatataaaatacggattattgagtgtcttcatattttaaactaytaaaaatatatttagatcatatttatactatttgtttcttttcctraagagtaattaacatggaaaaagataaacacagtcatttctacaaccaaaaaagtgacttcagaattgagcatagtatgctagaagaattggaaaataaattgattcwcagcaggaaaacagaaagtaagttgagtttgtgatgaactaaaaactgttgagcgatataaagttgtagttttaccctgtgctttgtctttgtgcattgactgtattgtgttctctatcaatagagtcagttctctattgactgtgttatattctctgtattttagttggtaaaatttgtcttttagggacatgtttattctttcgggtcactatttagtcatactaactggattgttttctgttgtatattttttccaatataacaagaaagagaggatttgggggatttttttggttgacacaccaccaaatkctattaaaatttcttaaaagcagagtgatttctgggctgtctgatgttagctcattaccctggcattgttgactgagccctggactcagtaagcatcaacagattcaaagctataattagcagttgtgtgaagtgatcaagtcagataattgcataaacctgagtttccttgtctacattctaaaacttgtcatttctacctcaggagagccgtactatgcatctgatgagataatatataaaaatgtaccttatagatagattgtacatgactatgttcttttgtttgttatgaatattaatcattgtcaatagtgtactgaatgttacccttaaagaatttgagaatatttstttcattgtagcgttagattctgtatgttgtaaaatctttataataaaaaagctgcttagcatttcttaaaggaaaaataatggttatcaaataactaagctttataaaatattaagacttactatgtagagatgagactgctcatgatactcccttgtcatcaattaaagtaaattcttagtgatttttttctttcaaaatacaaggttgcactattttttaaaagaaaagattacactactttaaaaagtgattctttgtcaagcagtggcaggaatcattttccttctttgatacattgaaaaaccgagacacccctgattcaatatttctttatttccctcagttcttttgtagacaactgggaggctgatttttctatgtctcagtaatgccaataagtaaaattttgtgcaaattttaggtcacttgattttccctttattatggcaactttatttgtaccaatctatttcactttgttctatagttttgcttatttttttaagttatttttataagttttgctcttataaagtgtagtgttactacactttatgtttttcctgtctaggagagtaaagaatgcttgccttagtgtagagaagttttcccttcatatattacagctgagcagtagaaayacctattccttacctccaatagcatacctcaattttagtctgcatttatgtcatattgtacttaaatgatttgtctatctatccaaatgaataaataaaataaaaagattatcagccttgtagtgatattttggtagctgatcaaactaaggctaaaatgaagcaacaaaaaacactttcctaattactttactagagaggtttcatgacctaaagttcaacagtaagaccctacaaagtaaattacaaaaagtttctgcctttatggaattcttgaattttaatgaaaaacacagaacaagccaaagttgtcatatacgtattaagaggtttattttggatgttcacactgactgcaaacctataggtaaactttttcttaaaaaaataattacttttaaggacttttgtacagagcctttggtgctttgtgcttatttgtggaaaagttgcaaaaacaaaaaagaggagggtgcataaaataccccaagatgataaaataatagtattactattataagaatgcgaatattttgacattagcctagtaatttaagtaaatattaaagtaagattattccttcagaaaaaaatatgaaagaagaatcctttatgctgataaagacaatttgaaagaatcgttgagactctcatttacttttcaggctttattgtgggcctaatattttactccaggctggtcctttgattgagcttggcgacctgtggcatagtataccactgaatgatacctgaggcacctcctcagggccgtgccagtgataacaatgagtatcacctgcccctttcctagaagatttggttggatgaaattaattctcaatgggaagtttctcagtattcacagaattaactaaatagttttaatattcccacaatagagttaagaccaaattctatttccataagttataacaaattaaaaagaaatgaaacactattaaagaacaaaaactatgctgaaactgctaatatttacatgtaaaacaatgtccaataactcaatctacacagaaggggaaaaaaagacatttccttagcacgggttatagtaagacttaacccattatgcttttaaatattgaaagatattgaaggatgctttatttagaacaaaggtacttaaagtattaatgttttgacataaatatcttttgttctttatttaattgctcttggcttttactaacagtgatcagtcttacatgtagattcctgaattgtaaccacatttgtcacagaattattttaaagtgcatacttctttcttataggagcaaaaatccagcaacaattggccaaaatacataataatgtaaagaaacttcagcatcaattaaaagatgtgaagcctacacctgattgtaagtaaatttagatattataatctttcttatgtgttagtattttctgtttggcattaatggagctaaactctactttattggttaggacttaagtttattaatggagctaaactctactttattggttaggacttaataagtttattaatggagctaaactctatcagttaggatttagtaagtttacaccggagaactataatcgggcatttctgtgtgtatccgttaaagtattatcaaatccttagaaattataannnnnnnnnnnnnnnnnnnnnnnnnnnnnnnnnnnnnnnnnnnnnnnnnnnnnnnnnnnnnnnnnnnnnnnnnnnnnnnnnnnnnnnnnnnnnnnnnnnnnnnnnnnnnnnnnnnnnnnnnnnnnnnnnnnnnnnnnnnnnnnnnnnnnnnnnnnnnnnnnnnnnnnnnnnnnnnnnnnnnnnnnnnnnnnnnnnnnnnnnnnnnnnnnnnnnnnnnnnnnnnnnnnnnnnnnnnnnnnnnnnnnnnnnnnnnnnnnnnnnnnnnnnnnnnnnnnnnnnnnnnnnnnnnnnnnnnnnnnnnnnnnnnnnnnnnnnnnnnnnnnnnnnnnnnnnnnnnnnnnnnnnnnnnnnnnnnnnnnnnnnnnnnnnnnnnnnnnnnnnnnnnnnnnnnnnnnnnnnnnnnnnnnnnnnnnnnnnnnnnnnnnnnnnnnnnnnnnnnnnnnnnnnnnnnnnnnnnnnnnnnnnnnnnnnnnnnnnnnnnnnnnnnnnnnnnnnnnnnnnnnnnnnnnnnnnnnnnnnnnnnnnnnnnnnnnnnnnnnnnnnnnnnnnnnnnnnnnnnnnnnnnnnnnnnnnnnnnnnnnnnnnnnnnnnnnnnnnnnnnnnnnnnnnnnnnnnnnnnnnnnnnnnnnnnnnnnnnnnnnnnnnnnnnnnnnnnnnnnnnnnnnnnnnnnnnnnnnnnnnnnnnnnnnnnnnnnnnnnnnnnnnnnnnnnnnnnnnnnnnnnnnnnnnnnnnnnnnnnnnnnnnnnnnnnnnnnnnnnnnnnnnnnnnnnnnnnnnnnnnnnnnnnnnnnnnnnnnnnnnnnnnnnnnnnnnnnnnnnnnnnnnnnnnnnnnnnnnnnnnnnnnnnnnnnnnnnnnnnnnnnnnnnnnnnnnnnnnnnnnnnnnnnnnnnnnnnnnnnnnnnnnnnnnnnnnnnnnnnnnnnnnnnnnnnnnnnnnnnnnnnnnnnnnnnnnnnnnnnnnnnnnnnnnnnnnnnnnnnnnnnnnnnnnnnnnnnnnnnnnnnnnnnnnnnnnnnnnnnnnnnnnnnnnnnnnnnnnnnnnnnnnnnnnnnnnnnnnnnnnnnnnnnnnnnnnnnnnnnnnnnnnnnnnnnnnnnnnnnnnnnnnnnnnnnnnnnnnnnnnnngaaaggttaaactgatttaggacaaatgctagtttttggaaaaaaatcccacaaattatatccctacctccttgcttactgtaatattcattcctgagaatcaaagcaacaaattaaaggtctcagggtgtatggacttaggaatcagacaggtgttgggtcaaacctttgatctttcacttgttggctrtgtaattttaggcaagttacttgatatatctgagctttcatttcctcagctctaaaatggagataattatgatatgagtatatagggaaaatgtctgtaatcagaaaaaatagcaatcataaaaattcacttttgagcacaactttcttatgccttaggctaagaaatattttaaaattaggagaacattccactttttcttcctaatatttaacttttagccatatgggaaaatggcacaaaataattttccgtgtttcttttacagttgttgagaagctcagagaaatgatggaagaaattgaaaatgcaattaacacttttaaagaagagcagaggttgatgtatgttttaaactcattttaatataaaattattgacctttattttttaataactggccccagtacatttttgtatataatgcattctgttattatgtatttgagtcttatacaaaagcaatataatatcttttttgttttcagttttaggtggcttttcatatttaaagcgaaattttattcatatttagttactataaaatcccaaataagaatttgaaagattgtttttatctctgaggagactcttttaaggcttaaatttataaatgttaataatgttaagtggagaagatgatataaagagtcaggtatcttaaatttgatggaaaatkaagggttaatatggattgtcttcttattcaaactttatttttaaaattttagatatgaagagctaattaaagaagagaagacaactaataatgagttgagtgccatatcaagaaaaattgacacatgggctttgggtaattcagaaacagagaargctttcagagcaatctcaagcaaagttcctgtagacaaagtaacaccaartactcttccagaagaggtactagattttgaaaaattccttcagcaaacaggagggcgacaaggtgcctgggatgattatgatcaccagaactttgtaaaggtgagaaacaaacataaagggaagccaacatttatggaagaagttctagaacaccttcctggaaaaacacaagatgaagttcaacagcatgaaaaatggtatcaaaagtttctggctctagaagaaagaaaaaaagaggtaataattataatagctattattcattctgtgtttctatgttctaggcactgtactaaacacttaacatgtctcattaactttacagcaatcccatgaagtgtgtttatagttccccgcccccgacaatctaatagaagatgaaactgaggcattgaaagttaagtaattttagccaggcacagtggcttacacctgtaatcccagcactctgggaggttaaggcggatggatcacttgagctcaggagtttgagaccagcctgggcaacatggcaaaaccctgtctctacaaaaaatacagaaaaattagctgggcatggtgccacgcacctgtggtcccagctacttgggaagctgaggtgggaggattgcttgagcctagaaggttgaggctacagtgatctgtgattgcaccactgcactstagcctgagcgagacctagtctcaagaaaaaataaaaataaaaaaaggaagttaagtaattttacccaattaatagaacaacatttggacttcctcatagccaaacatgtctctgtcacaaataacataatgggacaaaaagcctctgattatgggtccagtcctccgtatccacttctcagaaatgtgagcaatccagatccactgagacttttgaaaaaagtcatcttacgagcaaaggccacattgttttgaatagaaaaatcaagaggcagtagaaaaaatgctttgactagtaaacatttctttgagatttttaaacttcaaccatattgcttattttaaagactcaaaatgttagctaccccagaaaaaaaaataacgcctgattgtggcagatacctaaaaaggtccatttttacaaaaatattactctggctttgcattagatcaggatttcttaaccttgatactattgacatttggagctagataattctttgttgtgggggcctgttctgtgcattataggatggcatccctggtttccagcgggtagatgcttataatgtctccttaattatgattatcaaaaatgcctctagccagttgtccactggaggggaaaaatagcccctagttgagaaccacagtaagtcagagtcttttttttcttttgtagagttcagtgatgacgaagtttgacttacctggtttaacaaaaaggttgtgtttattccatagatggtatacccaaggaatattaaagaaataattgagtccatgtttagtctaaagttttagagggaatagctgcatttttgttgttcttgtcattctcctccctccccccagcaataaattgaatgtagggaaattgacttctcgggttttaagaaaaatgtttgaaacataagtcatttgggcttttttccccagaatgctgaaaacatgggattctcaaagtggtccctagaccagcaaaatcagcatcacctgggaccttattagaacttagcgggctccaactccagacctaattagcactgtgagggtaaggcccaacaatctgtgctttaccaagtcctctagtttattctgctaatgaaaaccacctctttaggaaaaagaaacagacacactgcttcttgtgataaaagtaaaccattcagattctagcttattttccttgttcccatctgctctatttcctgatatttgatgactgatatatcatcagtttgatacgatatgagcaggacataggggtgagatagaagggtttgtgaaagtggaggtgccatttactgaagtagggcatgttggaggaggaaagggaagtttggaggaaaatatcaggagttcagttttaaatctacggagttttaagatgttgagtagtaaatttaccatttttatctcccacttcctttaatatgtcttgtgtttttaataagtgaagatattattctgacattttcagacatgctctgaactttctggcctgaatgcctttgcttatcttgttctcactttctggaacctccattctttctttccccctccaatcccagcttatcaaaattggcccagatcagatgttgcctcctccttgcccacccaaacataagtagcttccctcaggatttcactgacacttaacaccttttatatgatgtgttgtggtatgcccatgttgaatttcacctagaacagtgctgctcagacttggtccatggactaaatatgggtttgcaaactgttactggtttacagtgggataaaatagttgcaccagaattaactatgcagtgagcactgtttagttcaattgacttttttttttccatagaaaattttcacattgaaagaagcagtgcattgatttgcgttttaacacaaattcccaatatttttgcagactggtattttgagtagcactgtactaggtggcatttggtatagttttaatattgtttcattgttcctatcacattgccttgtttatagtatatatacataccataaagatttattgagtggaatgaatgatacaccataaagaaagatgaggaaatagtttcttgacttggagggaaggtaattcagtgaatatgccctaaatggcatggagaagcctgctagaatttgaaataatttttacatacccatatgtaaagacagctctgtagctattgagctgttttatttatttatttatacatacttcggaagcactatgtgccagacgctaactcatttaatcttcataacaacactgtgcaagaaatcctacctaccattttatagatgagcaaaatgaggacagagaagtttagtggctcatccaatgccacacctagtaaatggcactgccaggatttggtcccaaatagtctgacttcagtgctcatgttcttaaccaccctactcttaattcttcttctgatatttgaccagataaagatcactcagaaagtattctaagcctagaaagagaatttggaagcagaaatgagatgatcagaggaaagggatgttgcccatgaaaataaaaggagcagataggcctggcacggtggctcacacctgtaatctcagcactttgggaggccaaggtgggtggatcacctgaggtcaggagttcaagaccagcctggccaacatgatgaaaccctatactaaaaatacaaaaaaattagccagacatggtggctggtgcctataatcccagctttttgggaggctgaggcgggagaatcacttgaacctgggaggcagaggttgcagtgagctgagatcgtgccactgcactccagcctgggcaacaaragcgaaactccgtctcaaaaaaaaaaaaaaaaaaagaagcagtaaagaggagaaggatcattcatgagttgtagtccttttgaacttgattaagagagaaagaggaaggccaaaaggatgacccattattcagagttttaagagacagcaatttttaaaaaacagaagtagaaaaaaattgcaatggttaaaacaaagctgaaaaacctaagcatccagcattctgcaatcaatattctttctagaaagayggaattgatgtattttaaaatacttttggctattaaaaaacttttttctcttgctttctttttttaaaaaaatcatttagtcaattcagatttggaaaactaaaaagcagcaaaaaagggaggaaattttcaagttaaaggaaaaggcagacaacacacctgtgctttttcataataaacaagaggataatcaaaagcaaaaagaggaacaaagaaagaaacagaaattggcagttgaagcttggaagaaacagaaaagtatagaaatgtcartgaaatgtgcttcccagttaaaagaagaagaagagaaagagaaaaaacatcagaaagaacgccagcgccagtttaagttaaaattactactagaaagttatacccagcagaagaaagaacaggaagaatttttgaggcttgaaaaggagataagggaaaaggcagaaaaggcagaaaaaaggaaaaatgctgctgatgaaatttccagatttcaagaaagagtgagtaaatctatttcctaaataatttttaaatgctacacatggagktattacttccaaattcagttaagcaaaaattgagtatttgtatattggacctgtgtatagcattagtataccaaaatgagtaagccgtgctccctaacttctagtaggttatagtctagtgggaaagatatgtggaagtaggagattgcagtataatgtgttaaagagtgtggtgattgaggtatggacatagtacttaggagggagtacagggagggacgctaccacagctatgagtggcagagagaaggtaatacttaggttgagtcttgaagaagggaaggaaaaatgaggtccttcctagcagagacaacagcatgaatagcagcttgaaagagtgtaacagtatggtttgtgatggagactattaacacttcagtattcttagggcattaagcaggagaggggaaccaacagatgatgagactagaaaggtagccataggcaagactgaatgatttgtcttctctgccaaactggctggctttaccatattgatgacttgcctatttgttcatttccccaccataatgtaggctccatgagggcattagtggtgtgtktgcattartggtgtgtttttttgaacatccttgtaccctagagttaagtgcattgtagaaacttatcttcttaaaggaatcgagattattgctgggtggtcaaattaaaggtgattttaaacaaacatatataagaaaaatgctaataaagacatactggcagaattcattccaaaaagtattaagacaaggaaggggactttaaaatgaaaaagggtgcaaatgagatataatttatgaattgttatgtgcatcaaaatatatarcagcaatgtttgtaaagcaaaaaactaagggaggtacaaagaaaaataacggacaaaaacacagacaaagcacattaatactgaaaattttagttcatktcttttagttcatatataaaaatcttcctaagtaacaaaagttcccattcctcctcatacaccccaaaaataagcaggacacataataaaagaaaaaaataaaacccacaaaacagaaaatataaaataatgagagatctgaaatcagacatacctgcattgatgaatgaaaatgggattaactcacctattaaaagggagttttaggttgaaccttaaaggaaaacaagagatgcctaaaataaaataatacagaagggatgtgcatgtgttaacatttatattcagagaaaataaagctcttaggctttgttggaaagaattaatattgaaggaatattgataggtaaggtaatttaattttacttgtgaacaactaaattttgaacaaattctagttcacatgctttcttaatgctatgggtttttttttttaaggatttacataaacttgaactgaaaattctagatagacaggcaaaggaagatgaaaagtcacaaaaacaaagaagactggcaaaattaaaagaaaaggtactctgcaccgagattattttcattgttattatcctaattccttgatttgtaaggatactgacatcaaatctatttcctttatatctcaccttatttctataacatctactttaaatttcatacttatttacatattagcaagcataacttggtacaatttaagcaaccattatttgaattctgtcattttaccttatgagcaccgttttctttcactctgaattattgttccccctacttgtcatttaaaaatttgtttctatatgaacctttattttagatcaatggcagctatgagcattgcttaatctctcttgcagtactcagagctaaagatattggtgaccctcatggataaaacggaagacttattggtagttacttatcctaaatttgttgtctggctatatcactagcatacttagctgcattacatttctctcataatagaaatagaaaaataggaatagaataaaataatagaactaaaagaaataaactaacagtttatgaatagattgatgtagtctaaattttcttttagctatatgagcccaatgagaagtttactgaggttattaatggttttattagccaatatcaactatgtcttttaaaactgcactaaggcttttacttatttactagtacaaactgagtttgtataattaactggtactattttacttctgattacaggttgaaaacaatgttagtagagatccctctaggctttacaaacccaccaaaggttgggaagaacgaaccaaaaagataggaccaacaggctctgggccacttctacatatcccacataggtaagaaagagttagaattggtgttcatttagtaatttaattgctgcatgtttatattttatgcacttactatatgtaaattatatttttcatatatatatgaaaatataatatgtaagtgtgtataatatataaatgttttttacctaaatcttttttatataaatatataacatatttatataatatataaggatatataatatctataaatatacatattttttcatatatatatgaaaaatatatatatatatttgcctttcaggtcacttttatttaaaaataaacagtagataaaagtaaaagtaggtcgggtgcagtggcttacgcctgtaatcccagcactttgggaggccaaggaggacggatcacgaagtcaggagtttgagaccagcctcgccaacatagtgaaaccccatctctactaaaaatacaaaaaaaattagccaggcatggtggtgtgcacctgtagtcccaggtacttgggaggctgaggcaggtagaatcacttgaacttgggaggcagaggttatggtgagccgagatcgtgccacctgggtaacagtgagactccgtctcaaaaaaataaataaataaataaagtaaaagtagtacctgatgccctattagatattacattcatgttagtagatgccattttctgcctttttcacattaatatttatttttataaggagagtagtattgaaaaagaatgaatgaaagatcgatagattaataagtagattaactgattggtttgtctgtcaatcagtttgagagctagagctagaaataaaaccttaatgagggttgcaaacctacatgcccatatgaaccagccaaacaacatgcagggtaggttatatatatattttaaagttagcacttaatcagatagggtttttttctttttaatttcctacatatttacaattgcttttctctttttctccttagggctattccaacctggagacaaggaatacagagaagagtatgagataatcaaattgctactcagttgataagaatgttaacatactaagttataccagggagagagtgactaaccacattctttaaatatcaatagcttagtcagattgattattgtgctatattgtgaattgagaggtattaagtttcatgaggctttgtcattagtattcctgcttctaccaagaaggtatttaatatatgtgttggcctattattgatgtaaaagttatttaaataagttaatgttagaaacattattcaatttaaatactgaaaacatttcaaagagattttgtttttgttatagcatagcaaagtaaattggaacaatcatacaatgacattttttaaaccaaaattttgtaacttttataacttggagttaagttagcttgagtaacaaaaaggtaaagtggtttttgtttagagttacgaaatgttagtactttttctatgtttaacaaattggcagtttgtcagttatgacatttttgtgtaataaatattttgtatttgtttgaagcatgctttgttttatatagagaatatttattttaaaaatatgtctctcatataccctattaattgtattattratataatctttttggtttccttcagcaattccaaattttccttcagcctttctggatttcacagatttataaaatctttgtgtctttcacatcttcctggctaatgcagttttcttttctgcttctgtttgcctcaaaataggaaaattctttgttctgaaacatcatctgaaataagccagctttaaaatactgtgatttctcttgatggcacttaaaatgttttaggtggggcatggtggctcatgcttgtaatcccagcactttcagaggtcaaggtaggagaattgaggcctggagtttgacactagcctgggcaacacagggagaccctgtctctacagaaaaaaaaaaaaaaagtttaattaactgggtatggtggcacacacctgtagtcccagctacttgggaggataaggtgggaggatcacttgaacccaggagttccaggttgcagtgagctacgatggcaccactctactccagcctgggtgagagagagaccctgtctctaaaatgaatgaatgaaggaatgaatgaataagatcttttaaagctgttagattaacatatttgggcaagagttagttcttaaatttctaaacttttagacatgaaaacacaatgtaattgaatacagttcaacttttcatattataaaatattcctttctaacgttatttaatttgttctcataggaaagatactatatacataaaaacacaggaaatttatctcttataaatctttttttatcttaatctttcattgtttatctttatctttcattgttaatgggatgcatttaggttaaatgactcagttagaaaggtactatgagtagcggtgaaaatcttttcttattttacagttaatattcaaaatagatggcttccaaattttagaaactgaattctgatttgtacagttattggtgcagaatgagaaaattgacataaaagatccttaaacaggagtgctgattttgttatccaaaacttttttgtaatgatttgaagtagttcagagataaaatatagaggctgggtgcagtggctcaggcttgtaatcccagcactttgggaggccaaggtgggcgtatcacttgaggtcaggaattcaagaccagcctggccaacatggtaaaaccccatctctactaaaaatacaaaaattagcctggtgtggtagttcacgcctgtactcccagctacttgggaggctgaggcaggagaatcgcttgaacccgggaggcggaggttgcagtgagctgagattgtgccactgtactccagcctgggcaacagagtgagactccatctcaaaaaataaatacataaataaaacacagagcaagatgaggaaattaaaagcagaactgagaagctacaagatacagaaaatgtttcttacatattgcttttttacgtgttgctttttgttgcaccgaaatgcagctttcaaattcctgtatccaaggtaagcattctggatgatgtgattcttatggctttgtttttttattttttttttaaataaagaaaagtatggaagttcctctgaagaaatcagtttttctagctgaatctgaaataaatgatgaatttattatatagatcctttatataaaagatgtaagataaacaaatatcttcagttacagacttcatagaagttacaggttcataaacaagatgtcaaataaatatttcttatactggtttaaaaagtacattagctttttctctgagaaaacaccaaatcgcggatgatgccggtgcagcgggggacctgggaggcccggaggcccggggggctctgggatggggaactggggtctcagccggccctgggatggggaactcgtgtcgcggccatggacggggccggggccagctgcagagctcgtggaggcaagaccaaggacaaggagtagatggttgtcaccaagctgggctgcctggtcaaggacatgaagattaagtccctggagtagatctatctcttctctctgcccatcaaggagtctgtgatcattgactttttcctggggcctctctcaagaaggaggttttgaagacgtgccagtgcagaagcagacctgcaccggccagaacaccaggttcaaggcgtttgttgccatcagggacagtggccacactgatctgggtgttaagtgctccaaggaggtggccactgccatctgcggggccatcatcctggccaagctctccgttgtgcccatgcgcagaggctactgggggaacaagatcggcaagccccacaccatcccttgcaaggtgacaggctgccacggctctgtgctggcgcgggtcatccctgcgcccaggagcactggcatcgtctcggcccccatggccaagaagctgctgctgatggcagctatcaatgactgctacacctcagccaggggctgcactgccatcctgggcaacttcgtcatggtcattttttatgccatctctaaggtctacagcaggctgaaccctgacctctggaaggagactgtattcaccaagtctccctatcaggaattcactgaccacctcctcaagacccacaccagagtctccgtgcagaggacccaggctccagcggtggctacaacatcgggttgtacaagaaaaataaaatgaagtaagcctggaaacaaaaaaactacattaataagaaacatagaaaaaacactaaagaagaaatgttataaagtacccataattccagggtaactttttcaaaaaacatacctacatatttttaaattgttacagtcatacagtacatattaattactatgctataattgcattacacattttcgtacatttctacctaattcaaacattatcatgtaatggctaaataacactcaattatatagatgttctatcattcccattctgttatgcacatgccaaaaatcttgtagggataaaatcactcatggaaagccttttaccgacctaggaggcattctgtattatctctgaatgagtcccacattgcaaatttttcctctagatttggatcagattgctagtccttgagctgagaatcagatgaaacatttggcttccctaacttaagggccatgtttattagaattaattttctgagaatgtatagagtgtccatagctgattccagtaagttaaatgtgtataagactccactttaaaaatcttcaggcatttgggggtatgtgtgctaagtgagagatcttaattttaataacagtggaaactccagactgggcacacctgaagggcaaggactgtgagctccgtatttgtagggaagtaccgaggacagcctagaatccgtctgtggctgttaaatgcggcattttgtaaagacatgcaggaatacctgtgaataagtagttaatagtaccaaaaattattcagagcactttggattgttgaataagtgtaagattaccccagcccatagagtataagaattacattttctaagaaagctaacaaaattaaacccaaaattttattagctaagttgatcacagggaacctagtttagttatattattgggtggatccccccacccgctactcaggaatgcctcatgaaagtttaaagggcatagtataccggctaaacaacttaaatccctatttttggaaaaaagaactagaagcatgtttaaattttttagaatgcaggtaattggagaagatattgagcttattttgctgttgcagattgatgcaccattgattcttgataacacgtcgactcaagcaaagtaaaatctgtaagatttgtaaaagaatgacgcaagcagtcatatataggtatgaatatgcatgttgtatatgtttgggggcattatacacagatttttaagtgattcctggtatccagaaaggattaagattaggaaagtctctgagcttttgtagtgtcaataaacatttatctccactggtttgtttttctgtttccctaaccgttcggcttaaaactggccctccaaaaatgaatctgttagcaagtttatactgatccatcctcgttttcagatataccatcctcaggttctacagagccagaattgtctcaaagcgtacttgatgcttttgaccttgcgcttcccaagataaaaattctgacggagggatttgtggacttgattttcacaaggcctgcgaggtgtttacaagcctcgagggctttgagtagaaaaggtagggtcatgcgctagctagggagatatcggagagaggaagtgctgcacaggacccagatgatagcggtttcaaatactggcttagtctgcggcgggcgcaggtcccctcacccggcaccctgtggttcagcacaggagggttctttctctccgcgggcactgattccgggtcgcggcggacgtcgcttccggagcagcatggcggccactgaggatgagaggctagcagggagcggtgagggagagcggctggatttcttacgggatcggcacgtgcgatttttccagcgctgcctccaggttttgccggagcgctattcttcactcgagacaagcaggtaactcgtggcacagtcagccaggctggcacaaggcccgggctccagcggaaaggcgcggcggagtcggaccgcaaactgggcgccggaagggggctgcgcggccgcccagttggcactgactggtttcaagtgggcttgaggttacccccactctcccgccgtacggtgggaaggtctggaaggctgtaggtcgagggctgtagcatctccagtttccggctttttcacttcccttttcttctggcaactctgagctgcttttttacccgctcccatagcctgtcactttgcctcattacttccgagtgtaaaaggaaaaggacaaagtttgtcgtcgtatttttagatgaatacttctgtgcatccttgtcctctctaaagtcattaactcttaatagagtgtctgtatggtgttttatgtgtaggagcggcagagaacctctaaggtcttagaaactttgtgggaactataaatctaatggtaggcgaaagaggtgtggtgttgcgtgaagcagcctgttaaaagtatcgcaatagctgaagagtgtggtgcggcagagactaagcgacttcatttacagtaaaagctggggatgagaagaaagaaaggagaaggcaatctttgctccgcattgctgtgttttgaagtgaagctcaaaagctgcttgagactggatgggaggaaagagcggcttgtttttgctgtgttctttccccacgttttccaaattctgagttgctggtgtattttgaacactgcatgaccggatcagtttggggagctttgcagattacttctgcacacttggtcaagaaccacattatggtaggtgccagagtacagctgaacaagacaagcatttgtatagagttctgtgctatatgttagtgtagtgttcataggagtatatagacaggcatgtacataatccagatatctttagagaggccttccttaaacacccttcctaaagggaccacttccaatgaccacctcacattacgtatgtattggtttatttgtttaatgtctttctattacactggattataaacttcacaaaggtaacattttcgtctatcttgtttacctctatacttaggactgggctgccctgtccaatctggtagccactagccacatttggctattttgatttgaattaattaaatcaaattaaaaattaagtgattcttttggtagtagccaccacatttcaagtacccagttgccatattggccagtggcaattgtttctatttcaacatttgcaacagcttagtccttttggtcaacattgcactaggaccttaaatagtacctggtatctgagaagcactaagaaatatttgttgaataatgtgagctgagccctgaaggatgaacagattctcacaaaagaaagagtgaaacgtttatattccttcctcctctca

SEQ ID NO: 98038 - DNA, 21123 bp, Homo sapiens
cctaagcctcacaaagtgtcgttcttctgctgctgggacagcagctaccacagttccttgtggctaccaggacattctgttcttcatagctactcagggtatgtcaacaaatccagtccttgaccaaattcaaattttcaaaagaagctttgctaaaaataatatgcctgtaagtgtctgagcctaagagaactatggccacaaaactgattgaagccattagcaagcagaaaaatcccaacttgaggctgcctcgggtaggcaccgctcttgattgggttgggacactcctgcctagggtagcactaaaagtgaagagcttgacccaggtgtgagaatttattgttagagggggcagagctcccctagtggccaggaaggtgctagcagccctgttccagccaccctgcttatctggtgggtcagtggaaagaggcagtcagagaggtggatgctgtgtgcttccacgtccccatccagccactctgtccataatgcatggactctctgacagtcgtcttaggttggcaactattttcatgcgtgattctttagtcagccctaccgcccagtacattatttcctcaagtagaacacaaacgccacccatctgctactaacaccttctactcccaccacattagggaaagcttgaagtagatggaatgtagctggtaacggtggttcgagcctctaatcccagctacttaaaaggctgaggcaggaggactgcttgagaccaggagttcaaggctgcagtgagctatgatggtgccactgtgcaccagcctgggtgacggagtgagagcccttctctaagaaagtagatggaactctaggacagcccattagggatggtgccaacctcctaccatcactcctatcacctgtgattcattcattcaatatttactaagccatgcttgtgctaagcactggaaaattgagatgtattatcacttctctgacgcagaggactggcaactccagtacatactgtgggggctccctaatcccagattcaatgtcatagtatcagttgaggaccttggagatcaaatcccttctataacctccccgacaagtggcagtctagactttgaactccagctaggagcccaggacagctgcttactcctgttaccatttccttgtcatgtcctcaggaactgggaccaatcacatacttctcactagtgataccttgggagccatctggggagaggctttaaaacctattaaaccagcagctcttcaaatgtggtcctcagacccctagggttccctaagaccttttcaggggtccataggtcaaaattattttcataaaaataccaagacattattttccttagctggggatggtggtgcacacctgtaattcccagctacttgggaggctgaggcaccagaattgcttgaacctgtgatgcggaggttgcagtgagccaagatcacgccactgcactccagcctgggcaacagagcaagactcaaaaaaaatgtccttgatgaagtaaaaaaaaaaaatttttttttttttttgagacggagtctcggtctgtagcccaggctggagtgtagtggcgtgatctcggctcactgcaacctccacctcctgtgtcccggttcaagcaattctcctgcctcagcctcccgagaagctgggattacaggcacatgccatcatgcccagctaatttttgtatttttagtagagacagggtttcaccatgttggccagactggtcttgaactcctgacctcatgatctgcctgcctcaggctcccaaagtgctgggattacaggcgtgagccaccacgcccagcctaaatgtattaatttaattaaaccttaatccttaaggaaaaggcttttcaacattctgtctgataaagtgggaagtatgcataagacattttgcataccaaagtatgatggttttctggaggaaataacttaggccattctttgagttgtgagctgaactagctgctcttttatggaatgccacgtttactcaaaagaatggccgacaaactgtggttatcagatttaggtagctggcagaacttttctaaaaaggaacaaagtgagtctgtcacttcagggaaaaatctgacagtgtttgttgccaatgatataattcaagctttcaagtgaaaaatcgaattttggaacacttgtatttgctacatgagcttcacagcttcccaaaatttaaaacttaaagactttactgttctccagtataatactatgaagaaaaacaaagactttactgttgaaacctattgtgatttttttaaaatttatttatttatttatttatttatttttgagacagagtctcgctctgttccccaggctggaatgcagtggtgcaatctcagctcactgcaacttccacctcccaggttcaagcaattctcctgcctcagcctcctgagtagctgggactacaggcgcccgccaccacacccagctaactttttgtatttttagtagagacagggttttgccatgttgcccaggctggtctcgaactcctgagctcaggcaatccacccacctcggcctcccaaagtgctgggattacaggtatgagccaccgcacctggcctgaaacctattgtgatttttaaaataatgtataatgaaacattaatatttggaagatttgcatagctcagtgaatcaattattttccatatgacgaatgcacggtgttacaaaattatgcatgggtaaaagatccaatcaggtgcagttcagaaaaacggattttttttttttttttgagacagagtcttgctctgtcacccaagctggagtgcagtggtgcaatctcggctaactgcaaccttcgcctcgcaggttcaagtgattcccctgcctcagcctcccgagtggctgggattacaggcgtgtgccaccaccacacctgactaatttttgtagttttagtagagacgggagggtttcaccatgttggccaggctggtctcgaactcctgacctcaggtgatccacccaccttggcgtcacaaagtgctgggattacaggcgtgagccaccacacttggccaaaacaacggattttagtttaacagtacaaaaaggtcactgatatggtttcacattctacattgcaactgccccttaagaaactgccaattatcggccaggcacagtggctcaggcctgtaattccagcactttgggaggctgaggcaggagggtagcttgagcctaggagtttgagaccaacctaggcaacatagtggcacaccatctctatttaaaaaaaaaaaaaaaagggccgggtatgatggtgcacatgtgtagtcccagctactggaggagactgaggcggagagagcacttgagcccagaaggtcaaggctgcagtgagccaagccgtgattgtgtctctgcactacagcctgggtgacagagccagaccttgtctcaaaaaaacataaatatgccaggcccggcatggtggctcacgcctgtaatcccagcactttgggaggccaaggcaggcagattatctgagttcaggagttcaagaccagcctagctaacacagtgaaaccccgtctctactaaaaatataaaaagttatctgggcatggtggcgggcgcctatagttccagctacttgggaggctgaggcaggagaatggcgtgaacctgggaggcggaggttgcagtgagccgagattgtgccactgcactccagcctgggcaacagagcgagactccgtctcaaaaaaacaaaacaaacaaacaaaaaatacaacagttagctgggtgtgatggcttatgcctgtagtcccagctactcgggaggctgaggcaggagaatcacttgaacctgggaggcggaggttgcagttagctgagatcgccccactgcactccagcctgggtgacagcgcgagactctgtctcaaaaaaataaacaaataataataacaataaataggccaggcgtggtggttcacgcctgtaagcccagcactttgggaggccaaggcaggcggatcacttgaggtcaggagttcgagaccagcctggccaacatggtgaaaccctgtctctactgaaaatacaaaaattagtcaggcatggtggtgcatgcctgtagtcccagctactcaggaggctgagacaggagaattgcttgaacctgggaagcggaggttgcagtgagccaagatcgcaccaccgcactccagcctgggcaacagagcaagactgtttcaaaataaataaataaaataataaataaatctttccaactgcatatctgttgtgagacaggattttcttcatatgtctcagtaaccaacatatagcaacagatcaaatatggaaggagatattgataatacagctgtccccttggaagccagagagtaaagagattcgtaaaaatgtaaaataatttccatactctcattaattcggggaatgggaatatagttatctttcatttagaacattatgttaacatgattaatgtgtaatgagtttatttttgttatttttaacgaattgatacatatttaaaatttttctcaagtttcattttaatatggcaactattggtagatataacccacttcaacaaaaaagctgtttgggggtcttcaatactttttaagagtgtaatgggttctaagaccaaaagacccacaccgtattagtatatttgataagtacccagaaactggtacataaaaaactcatctggcaaatgttcatgaagtgccaactctatgcctggtgctgtgataggccttggggattcagaattgagaacagtcgtttctgttgaggactcacagaccggcggaggcgccaaaccggtataagaacagttataccatgggactaggatgagggtgagagcccgcaccaagaacacgcacctattaggtgaggcggtgggaagagaagtggccagggaaggcttcccagaaaagctgacacttactgagtcttaaaggccaccaggaatcagccaaggggatgggcattttagggagagagaacagaatgcataaactgtggaagctttaagaaaagtatggctatttccagctcctgcacgtagctcattatgaatgcagcatgaggtacaagtatgaatactgggggtgaggttgggcatggaaggagatgaggccagagaggcaggcaacagccaaaacaacgggccttctataccatattaagaaatgtggattttttttttctcctcaaaacaggcagggtgcccgcacgcctgtaatcccagctactcaggaggctgagtcgggaggatcacttaagcccataagttcaagaccagcctgggcaatctagcaagctcccgtctcaaaaaaggtggggggacagggattagggaggggttttggagaattttagataatattcgcattaacttttaaaaagatatttgacaacaatgtcatgggacagtcaaatgaatgaatgagttgaggaactagaagtaagactacaaaacagactgaagaaaacataaggcgcggccagaggccagcccagaccgacccgaggaggaacctccttggtagaaggcagcctctccaggattaggtggttgtgagacgcgaagggcaggggatacccagtggtctagcataggctactggtggatgaggcgtcttccacggagttagaggaacactgcgaggtcaggccagggttgctctccgtgtggctagcaggcagctaaacagatctgaatgcatttccacgccacctccccaccgccccggccagcggcctcgggttcccacggtccccagcccactgcaaaatccaggcctcccgcccctctatgactggagggtgggggcgaggctagcagctccctcccggcttcctccgcttgttctctcctccccttccccctcctcccggcggctctccacttcctttccccccaccccaccccagggaaaaacgaaaacaaacaccctcgcgcctcgcgcctccgactcccagaccccacgacccggctccggcgctggtttggcggcctgggtgggagaaggcacctcgccccggaccccctatgccccgcagctcagtgactcttcccctcgccctccgccttcccygccgcagcccggctccgcctcccaatggggaaacatcccaaaaaagggcagaaaagaaatttcagcataaagttggcccactgggaaagagaggagcgtccgcggggagcgggggagaagagggaaggcgcgcggaggggagtggggccaggcggagccaggggcggggagcggaggggctcgggacgcgtccgggtgggagcgggggcggggaacgcgcggtgaccagcctggccgcagccgcgtggaaaatatgcggggcacgtggggggcggggcgggragctgggtcctgagccgccgggtgctcgcaggaagggcctggctccaggggcaggggctgggaggggaggcgaggggatgagaggtcaggccggtcctgggggcagcaagcccggccacactccccaccgcgwccggggctctgggctcgcttcctgcttcagtttccccaagctcccgatgagactccgctactaccaccacgtcgataacgcaaacctagagggactcagggtaaactgaggcactcaaactgccgaggagctccgcctcccgagagacatttaatccggggggatttgcaggaaacttctaaattaagggtagcggctgctgcagctgagggggggcacrccggtccctgcgcccgggcagctgccgtgagctcacgccccgaaatagccccaggggccccagccgcagctgccactgggtccggctgtcactcagaggaagcacggagcccccagcccaagggtcccctccccttcgcatcgccggggtttttccagccgaccgtcggccactttttcctccgacggctggcagggaagagggggaygggggcgggaccccaagggaggcggtccccagtgggtgggcgaagggggcggccgcaccccccggccgggccgtgcttctgcccctacaaggtttgggccgaggtgggggagggtcctggttgccggccccgcccggtccctccccgcctwwwaggcgcccgcgtggccgggacgtcccagtcccgctccgtcctcctcgcctgccaccggtgcacccagtccgctcacccagcccagtccgtccggtcctcaccgcctgccggccggcccaccccccaccgcagccatggacgccatcaagaagaagatgcagatgctgaagctggacaaggagaacgccatcgaccgcgccgagcaggccgaagccgacaagaagcaagctgaggaccgctgcaagcaggttagggccgggcccagtgcagcctgctctccccgcgcctagggcaagggtgggccgctgccatgggtcccccagccccgggcctgcccgccaaggctctctctcacccagggtgggggctgggccttcgcagtaccctcagggccttcgccagagccgcttctctcccctacaatagcctggggaagccccaggcccctggtttccactctgcctttgcagagcgcggttggtcctgctccttggggcctgaagttttctctgtaccctcaacgggtcccaccagtacccttgactgtactgtcccttttatgttattccgcttccrtcccagtagcctccaaatcttagtagcgcccctacacacaccgcgtctccattctgggcctgggccccctcccagcctggctgaccaagtcccctctgtcccagctggaggaggagcagcaggccctccagaagaagctgaaggggacagaggatgaggtggaaaagtattctgaatccgtgaaggaggcccaggagaaactggagcaggccgagaagaaggccactgatgtgagtgtggacttgggggacaatgggaggagttagggctctgggaaggggccccccgggtatgggaataagaggattggggcaccttatccccttatgtccccagcgccaggagagaaatggtttcatctcagtaaccagggctagggtaaacttacacaagtaatccaagacagtggataaatcaaaaccacctaccacttcccccagaggacttagccctgtaattctgtttggttccagcttttagaatgtacagtgatcaagcaatgagtcattgtgggggtggaaggtataagaatttaccatctacctcaattaatcctccagctgaaattggagaggagactgcagccgtttggggatggggggatgtggatgtgaggtactagcctgcaggaggagggagagggatccagagatgagaccccacttgagttacaaccctaaggggccattagaaattccctggccttgacctctggcttcagcagccctgctgtgccctggggccccagctcaggttctaatggctcctcatttaccctcattaagctgtcagcctggagaccatgccaggccacagggcagagggacagggccacaaatgccaaagcagctaccttggcaggtcatttaccctgagatttctctgcccaccccacaaccccaaccagacttcacttcctgccattcccaacccccagcttaaggtaggagaatggccatatggctttggtgtggtggtagtttccccattctctgcctcagtttccccatcttccttccacccaggattgttttaagatgaacctatggttagattagcataaagcatggtctgaacatcagagatgacatagctgtttgtgtcgactgctcatgttcccagccccccaggggttgggcttctgtgacctccagcctccagttttggttctccaccagtcctggcacttgggagggagctgacctgcagctgctagcacagacaaccctgggcatctgacactctataaataaccaaggcccagtgcagctggaggcaagattggaaacccaagttgctggtgggggctggaggggcaggggggacagggacagagctggggaggcagagccgcagcaccaggagcagataggaaagactgcccaagcttcctggtgaccttgaacacagcactcaacttacatggtgcctcagtttctccctctctcttgcttcccatttttctaatggggacagtagtgcctgtcctgtggttagagagccgcccccgtaactgggaagagcttgagaggcaggaaatggcacatatcagtcccatgatgaggaccccaggacttcccaaactttccagagtcttttgtcaccccaccatcatgcagagtttttcttttacagtctcacctctctctagggtagtactccaatgtcccccacagtgattcttcccaacccccaatgctgtccccagaatgcttccacactgtcatccggccctgtgcccatgatgggctcttgtcactctaggtggccaagctccaggtgccttcagcacctggaagacaagctaccatctactstctatatatggtgctgtttctcctgccctacagtccgaccaaggacctgcttcctatgctgtgtccaagtgctgcccccagcccctccccccacctcctttccctacacaggtcctctctcctttccactctgaaatctcagggtctctgtgtccttgtttttgacagagaaaggggataacctaatatttatggaatgtggaccctgtgcaggcaatgtactcagtgctttctgcatgttattttacaatttcccaaacttggcttatcatcagaatcactcgggggctttaaaaaaaaaagagaagattcccaagcccccgccctacacatcccaattcagtggatctagcatggagtaagagaacctgtttagttttatgagtctcaccgaaggtcctgttgattaactgagtattaaaagcagtggattatctcagaacagccttaagaaggaggaactgttattgttaactccaacttgtgaaggaggaaactgargcttagagaggctaaataagttgcccacagttacacaggtgttgagtggctgagccgtggctcaaagacaatctgactcagagccgatgctcttaacacgwggctgccctgctcctctcattttcctttactggcgctcgccttgctctgccctttttctcagtgtttgaccagtttttatggattttttccaaaacctccatggttttgcctcctactgcaagcccaggggctgagtagacatccctcacactgcccctgcattgcccccagctctctgctggccttggcagggagccccttgctacagccatgggtattccttataggcctgcctcttgggcttcttgctgggagtctgccttacagctgatgacagatgacatcactgaacttgatactttttttttttttttttttttgagatgggatcttgctatgtttcccaggcagggctcctrgggtcaagctgaactcccgccttagccttcrgagtagctgggatgacaggcatgcaccaccatgcccagtatcactgagcttgattctgtgacgggctattcttagcagcagtgatgtctggttggcctgattctcctcccatccccttacctgggccaggctttgctgtgtaggaatcagagctgcmtcagacctggccccagyacttgaagtgctcycacagggaacaggaggacttgtgtgcaggtgacctttgggagactaactgtgcacagtgcaggagaggccctgcagcaggggagcggagcttgtcaagcaaggaatgcatgtatttttttgtttttttgagatggagtttcgttctttttacccaggctggagtgcagtggcacgacctcagctcactgcaacctccgcctcctgggttcaagtgattcttgtgcctcagcctcccaagtagctgggattacaggcatgcgccaccatgcctggctaattttttatttttaatagagacagagtttcaccatgttggccaggctgctctcaaactcctcacctcaggtgatccacccgcctcggcctcccagagtgcggggattacaggcgtgagccaccatgcccggcctgaatgcacattttttactggagcacagtctgggcagaagatgattggttggggaaaaatcacatagaatgtctagaaaccaggaagcctcagttctttctgagaagaatctcgccatcctctggagcctctctgatccttatccaaggctaacaaggcctttttgacccctgacctctgacccacaggctgaggcagatgtggcctccctgaaccgccgcattcagctggttgaggaggagctggaccgggcccaggagcgcctggctacagccctgcagaagctggaggaggccgagaaggcggctgatgagagcgagaggtggtcaggggcctcggggaggatggtcckggagggagaagggagcctgtctctgctggtcctgaccctacgctcaccctctccctgcctttcagaggaatgaaggtcatcgaaaaccgggccatgaaggatgaggagaagatggaactgcaggagatgcagctgaaggaggccaagcacatcgctgaggattcagaccgcaaatatgaagaggtgacagccttgcccctctgcctgctcgctgcccagyctgcaacatgcccagtccttctccactgatctaccctctctttctcactccccacaggtggccaggaagctggtgatcctggaaggagagctggagcgctcggaggagagggctgaggtggccgagaggtaaagatacccgggggtgacaagtgagcccattggccctggggccttccacacagtgggaaggtagcatcctaggcttggggctgtagggacaggccctgttctctgacccctgcccgctgcccccagccgagccagacagctggaggaggaacttcgaaccatggaccaggccctcaagtccctgatggcctcagaggaggaggtagtgacccctctgaacctttctgggcaatggcgccttctctcagctcaccttccctccgtctcagcaccgcaggctgctctttctcagctgctggggatcaggaagggcctggggcttctgagccctgcctgctgtcactctcacaactttgctcttctcttctctcctccacccgtcccctgctgtgccatctccactgtctggcttcgctgtgccctcacaccctgcccccccccgccacacaccccctgcagtaaatgtggggacctagaggaggagctgaaaattgttaccaacaacttgaaatccctggaggcccaggcggacaaggtagaggggagcagaggggcagtgaggatggggtcccacaggggagggaggtgaggggcccaaggcagggaggggctgggtgttcaacggaggcaagatgaccaggagcctacggggtacaatggagaaatgaaggatctgtggtagcgctgtactgatggcgtgtgtgtgtccccaaaagtattccaccaaagaagataaatatgaagaggagatcaaactgttggaggagaagctgaaggaggtgagagtcctcttccagttcccagtctcccctcaagccaccctaatccttgccagagayggcctgtggcaggacacttgagggttgggatggacaagaagcttgacttaggcagtagtctgtgggagggcctaattctttgccatttctcccatcctgcctttacccccaggctgagacccgagcagagtttgccgagaggtctgtggcaaagttggagaaaaccatcgatgacctagaaggtaaaagaagcctttataagtaggtccacacctgccgtgattatcagtctgtcctgtaccttctcatcccattttatttgccaccaataaactagggttgggccacctaggaccctaccaactccccaactctgtgggccatgtctacaattcaagtaattgtagctgcccacggcgcaacaactccagtgcttctcaaacttcagcatgcatgagaatcactgggagagttttaaaaacagattccttgactctgccccaaagagattgctgactttgggctggaggatttacatttctagctagttctctggtactgccaatgctgctggtcctcatgccacactctgagtggcacccwtatagacaattccgtccccgagtgtaacgcagtagagttctagtgcagagactggcttattaactagagagctgttggactgaacatctaggtctgcatgacagcactaatagaaaacactattttaagctagatttgacaaaagcaaacatccagatatttgtgagtctgtggctatttctattgttaatgatgatgtggctaaagttgcctttcctttttattctgtgataaccctttcactttcccacttctctcgcttccagccttctcaggcaagctccaattttacctccagctttaggaggtttgccctttctggctccagcaccctccctctcccctctaagcaagcactcctgcttgtcgagagcattgtacacacagctccctggagaggcaggagctsccatgggtagagccaatttggggtacagagaaggacagaaaagagatggggtagagatggggagaaggagttcctgacagctgtccagcctgttccctggcctccctctctcactctgtctttgtgtacctctgattctgtttttctttccattgctctctctccttcctttcctctttccctccactccctttcccacactcccacctggtcccctccctggaccccccccagatgaagtctatgcccagaagatgaagtacaaggccattagcgagraactggacaacgcactcaatgacatcacctccctctgagccccacgccagcgtggccacctcagctctcttctctcctctcctttccattctctctatggggaggggagcaggcaggaggagcagaaattgccaacattgcacagccaggctgggagcagcctarggagagcccccatcatgcccaccacccactctggcactggcttcatcctttacctatccccttccaccctcctttgctgcttaataaattctgaacttggtctccatgctgttttcctgccctccagagagcacctctatcgccaccacggagcactggttcactcctgacaccctggcacttactgacacccccagcccctgcactgagcccacccacaaaacaccatggcccacgctgaaacccctctgcacaggcactccctggctgtcgctctctgattcaccactgcatgtgggcacgtgtggccccatcaaaccatgaccgcctctggtgccaatccctgacctcagagcacttagctggggttccaggatcaaacagagtgactggaaaggaagtagggtggtgaggtgcaggacaggggcaagaaggttgcaaaaggtctggaatggagcttggaaaaatgttggatatcascaacatggggctttcactgcagcagcaggtctgttttctacctcaagtctgtctgtctggcccttcctttcctggcgcagtctttgtcttaccttctgtctccaacttccttaaaccttctaaagaagaggataaagtagtttatgactcagccctccccaccccacctctatgaccccaaggccttgagtgaggcatccacgtccgtcctgttcccctcatcctagtcagtccatctgtttgtccctgccawggggccctgaggtccgtgaatgcatgtgtcttccttgaccsactccatgtctatatgtcaccttcccctggccctgcctccccacgtctcccccttgtgtctcccttctccctcacctgctgcttcccctcacagagaccttggccagtgccaaggaggagaacgtcgagattcaccagaccttggaccagaccctgctggaactcaacaacctgtgagggccagccccacccccagccaggctatggttgccaccccaacccaataaaactgatgttactagcctctcaaggccctttaatcctttctttggtgttggcaatggagtttgagggacccctgaatgagcagggcctgggtccttgctctgcattgggacttccttttcaggggaaactgggatggagggcctgggctcattgaggaggggctgtgaacaggctctgtgaagcagggagtctgacaggactgggggacatcgtgggccttgtgccctacaggcagaggagctgccatccatagcaccgccctgttccagcagccagctgggccagacagcacgtcctgaagcaaaaactgcaagaagtgacacattttccttgagcagggtgaaaacccaaaagcctgagtgtgatgttaagcctagggctgctgtctgccctacccctcaacacatacactgcacacacacacaaacacacacacacacacagccatcccaacagtatcagtcatttctgtcctcttcctgatagcatctgtggtaggcagaataattccccttctccaaagatgtccatgttctaatcctgtgcattgttcttatcttacatgggaagaaacttggtgattaagattttgagatgggatgattatccttggttatctagttaggcccagtgtaatcccaagggttcttgaggagacaaggaggtcaaatgtggaggtaggagttgtgacaatgggagcaagagattggagtgatgtgtggaaggaggaacaagccctactgacatctgactgctgacctccgaactgtaatagaataaatgcattaccactaaattcgtgctaataacagtaataggaaattcaaataccatccttctgatttggggaacaaaggtgactaacacatattttattataaatatttattttaaaaaatttcttggcagttaaaaggaagtggcataatgagcaggacaggacagttaccggctccccctcagatgcctctggctggcttctcacattctccaagatccagcctctaggctccagtctcggctacctctgctgggcggtagctcacaccccctttggttccccttctgtgtgtacacaacaggaaaggctaatcagaaaactggcccaggagcagctcatttgcatgcgctttgcatgaagtgactccacaagggtgggggaagcttgtgcctgaagaaagggtcagtgtaatacctgtgctgccttctcatctgcacaaggaacgcgacgctggtgacagcaaaaaggaggccaaaaaccagggctaggatgtcacctgcgatggagagcagagagggctgctttgggaaggaagaggggtctgcagagttcctcaacacctgcctcagtgcactccaccacccctgccccgagttctcaggcagcccctagtgcctcagtctccagaagaggccagccaagggatgagggtggatacacgagaaggggtaagataagcaccgtttttgcttcctaaaagccaagtaaaagggccgtttggggccaggcacagtggctcatgcctacagtcccagtgctttgagaagctaaggtgaaaggattgcctgagcctaggagttcgaggctgcagtgagctatgatcgtgccacaacaccccagcctgggcaacagagtgagaccctatctttaaaaaaaggggggggattgttttgcgagagggatgctgggagatttctcaagcttcattctaatcaattagcctctggggacaatgggggaatccccaccatgatctgcctctctaatattggggttggggtctgttctgcagaaaaggagagggagcagaggcggtcctgagcagccctggggctgaatggtgctgaggagtctcctggcatcaggaccaagaggaggggcagactcaccagcagccaggcaggaattcagctggactggagagaaaaaggagatgtgagaggcgggctgtgaccaccaatgacagacactggcacacacatgggaggataagggactactggctggggggaaaccagacaaagctgtacctggctcagcagcccgaggactgctgtccactccagcagggaaggaggcctcaatcactcgcccattcaaaggctgcgtcgctcggaagttcagctgtagccgagagtcaccaggtccccacagggtgtcagagagggtgtggagctagggaggtcagtggacagtgtgggtgggttcatggcatgacaggaaacaagggtcccaggccagctcacaaccagcacctcagggctccaccctccagctcctgtattccccatccagcctcttgatttcttttataaataaataaatgtatcctaaagatggtaggcagtggtgggatcatagctcactgcagtctcaaactcctggaatcaagcgatcttcccacctcagcctccttgagtagctgggactaggcacataccaccatgcccggctatttttggttttgttggggtttttttggtagagatggggtcacactatgttgccccgccttgtcttgaactcctgggctcaaaccattctcccacctcagcctcccaacgtggtgggattataggcgtaagccacagagcccagccttgatttctttcttctcctgtttctcatctcatcttacatcctctttcccccgcacccactgtgtccacacacaccccaggcccacctgcttagcactcagcatcactgtctggttaaacacagtccagatgacaccctgggcacagggcggtgtagtcagagacccctcatattggaagtagcggctgaagtcagagggcaggagtgcagatatgtccagtcctgggacctgagtctctgagcctgtgaagaggatctatgttggggtctcatctacattgcacccccttaaagcttcagggtatagggatacagtttcacctcccagaagccaaggtaactcaactctgagaccacttcttcactaagtgcaggcccttcccataagacgtaactcaaaaaaaagtacagggctttggagcaactggaagaggcctgaggaagcaagagaggaagaaagaaaggaaggagagaagggaaggtgggagggaagggaggaaggaagagaaggaaagaagaaagaccgtctgagtctacactcttaactctgtgtaccatcataaagtgctgggccacaagtttaagcccagagcaaattaaaaagaaaaaatgaatcccagcactttgggaggccgaggctggtggatcacaaggtcaggagtttgagagcagcctggccaatatggtgaaaccctgtctctactaaagatgtaaaaaaaaaaaaaaaaaaaagaaaagaaaaaatgatctgaataacttgtaaataaatatgaatattgataactatacaaaacagacacaagaaatgcaaaggcagagttctacctagtctagcagaaacctaaaaggtctagtagagtaagtgagatttaaaatgacccaagagtgactaagaagagaacgatttccaacaaaagtatttacaaagttaaaatatttgatgcttattaaagataaacagttctcagaaaaagtttagctctccagacttgaccttgacaattccaaacaccattttttggtcttgttttttttgtctcattttggtttttgcttggttttcttttttttttttttttttgagacaagagtctcgctctgttgcccaggctggagtgcagtggcacgatctcggctcactgcaacttctgcctcccgggttcatgccattctcctgcctcagcctcccgagtagctgggattacaggcacccgccaccacgcctggctattttttcgtatttttagtagagatggggtttcaccatgttggccaggatggtcttgatctcttgacctcgtgatccacctgccttggcctcccaaagtgctgggattacaggcgtgagccaccgtgcccggcggtttttgcttggttttcaatctgtaggcagccgtttgcgggtaactgtgtctgtcagcttcatggttattatcaagatgagcgctggctcatgcttcaatccctcctgcactggagggagcccatctccagcctcagacctgaagctccaaagggtgattctttatgaactaggccacagagattagtggccagaccaacaaactgaccttcctcagcgatttcttccaagcgagacagcaactgctcataggcactgttttcttccgggccctcctgggggatgacattgtaagacagatgagtgcatgtatccagggccatggctgaaggccggaacatgaagggggttcccatagtcctctcccattcctcagctctgagaatgctgagggaacataaaattgtaatggttgttgctttttgttgttgctgttgtttttttttttagagacagtgtctccctcttaaaatcctatgtattatttcaaactctatgtactcttgctgtgcgaaccaacaagcttggtggactggttttcaatgacaagctggagagagagggagagagcccactttactaggatactaggctctcagtgacccgtgcccttctgacgtttgcagtctcactcactgctgcctccgtacatactccccacaggaaaccatatatacacctttgtgttggtgtcacctctgcattcaccttcatgattctgtgtttggcttttcaggtgaggtcctgacatgccacttcttttatttattattcttttttcttattttgcttatgaacctaatgttaagaacatcatgaacctaagagtatgaacatattgacatgctatgatggaggcatttctctgaactttgtgctgtgtggctggcattaaagaatcagtgagtgtggctgggcacggtggctcacacttgtaatcagcactttggtaggctgagtcaggcggatcacttgaggccaggagtttgagaccagcctgaccaacatggtgaaaccctgtctactaaaaatacaaaaaaaaattagctgggcatggtggcacacacctgtaaccccagctactcaggaagctgaggcaggagaatcccttgaacccgggaggcggaagttgcagtgacccaagatcacaccactgcactccagcctgggcgacagagagactgtcaaaaaaataaataaataaataaaagtgagtgagtgaacctagcaggcatctcaccatcccttccctttactggcctcctctaatcatggtgtatgtagccattccctaaataggccatattctgagtctttgcacattctgtttcctctgcaatgaacacctccttttcttttctaccagtgaaggctttaagtgtcacctcctctgtgaccaccatctttactatgtccttcctatgtgtctgtcatgtcagcctcccccactggctgtgggctccttagaggcaaggacctacagcttcagaatccttgttgggggctggtgcctggttcacagtgggtgttaaatgaacaaacagtgcgtgaatgagtttgtcagccaggggcctgagtgagcttgctgggatggggtctctggctccacgatagagtccgggaggagcatgggatgggaaagcggggagtagggggtgtccaggatctggtacctccagaaaggcggccaacacggccaggcctcccgggcgccccaaggcctcgtcaactctggcaaaggcggtgctgaggtgaaccacgtggatctgaaaaggacacgagggtaggagagggccacgtctctggccccgctccgccccgctcctttgccccttctcggccagctccgcgctcacctcggcagggaaacggtggccttccacagtgtgctccgagcccggacgacctgcagccccccagtgcagatgcagctgcagagcccggtactcccgcccgggacccagagccatctctagcccaggaggcagggtcagttgcactgcgtagggagaggcaagtgagccggccccgcccggtagggccagcccaacccccgggcaggcactgccgcgacgg

SEQ ID NO: 98039 - DNA, 17087 bp, Homo sapiens
actgaggtgaggtaaaaggtcgctgcagtgactgcagatcagagaggcagtccaagagagtataaaaaggatagacaaaagtcaacgaaatgatctggaatcagattaggagagatacaaacagtgagaataaagaaagagaaatgggtcagaggttctcttcccaacacataaaaatcctatgggagtattaacccgcggatgtgaaggaaccagaggatgtcaggaggaagctgggaacaatctccaaagtgctctgggaggacgcacgctagtaccttggagccattgaggatgtaatgatctccctgtttcttagcggaggtcagaagagaggcagcatcactcccacttcctgaggagggatcaaaaggcagcagagagaaggtgagaaagtcagtgaggtcgagggagcccagcacaattctatcttctaggaaatcttctctaaacagaccctgctcagagtgtgtcactgcaaaacccaagtggccaaaggaactctctgtacttggtggaaactgctcataccagtcaggccactgcctacctcccaacacaccagataggcttcttggtccttgtgacatcaggtcacaggactctattactcctcaaccaaacagctagataaacagtggctcgacatgtcaagaggctggaaggagtgctcggtaatgccatctgagcaggaagcatctctccctgctatatctcagtgcagtgtggcaaattcacctggttcagtgaggcagtaggaagcaaacttctccatggtacagagcggtgggcaaaatttgtgcctctgttcctcatttccgaagctatcaatcatccaggcacacatgctgataggtacaccaagaagaaaagacaatgacagaaataaagatggaaaagaaaaaaaaatgggggagaaggggaaagagaacaaagggcagggcagtggagtaaagcagaagagtgggaaggggagagtcacaattgggaagactctttaaaggcaaacggtggattaaaacatattcctggaataaggactacccagagataaccaggctgaggtacttctcaccagcacgtttgtactacttctagttaggttacacgagcctctaaaaatcagagttatatgtgctttctattagtagtttctattacttcctcaaatcactggcagttccatctttggattgaggaaaagggtgagaggggccgggtgcggtggctcacatctgtaatcccagcactatgggaggccgaggcaggcagaacacaaggtcaggagtttgagaccagcctgactaacatggtgaaaccccatctctactaaatatgaaaaaaaattagccaggtgtggtggcacgtgcctgtaatcccagctactcaggaggctgaggcaggagaatcacttgaaccggggagacggaggttgcagtgagccgaggtcatgccactgcaccctagcctgggcaacagagcgagactctgtcttaaaaataaataaataaataaaagggtgagaggaccctgatcactctattggagaagtctcctggtaccagctcaaaataagatttctgagaaagctggctgacctgattccctaagcaatacacaggatgacagaatcaagtccaacaggcagcaacagacctagcgtgtacttattttatttatttattttttttgagatggagtctcgctctgtcgcccaggctggagtgcagtggtccatctcggctcactgcaagctccgcctcccgggttcacaccatcctcctgcctcagcctcccgagtagctgggactacaggcgccagccaccacacccggctaattttttgtatttttagcagggacggggtttcaccacgttggccaggctggtctcaaactcctgacctcgtgatctgcctgccttggcctcccaaagtgctgggattacaggcacgagccactgcgcccggcccctagagtgtacttttaagtccagttccttgaggacactcagcttcaaaagatcaatctttttcctacgaatctgaactctcacagtcagcccgagtgagcacttcattgtgccttccaagcttgggcactcacttgtggatgcttatataggctgtggtgctggtgcagcctgtagccaaggcttcaaaaatgacagaggtatcaagacgtgacagcccagacccgcccacatctgtttgtatgtagacccctccgaagcctagctgggctgccttccgcatcacatccactgggaacagctcctatgtacaaaagagagcagggtgatcagcagctgattcagagacggccttccttttagagggcacagtgagggattaggaggcttgcacatgcgacagcgtatgaattctcttaatatgcctgtttgtcatcttacagtggttatcagttaacatgggtcctgtaaaaacttgttctggcattaagaagtttctttttattatctatagaactgccttagttttatatccaaatctttattcaactaacaaaaaaaaagttatgtacaagatgatcaggatgccttctaggaaaaatcatccactaccggtattctcacttgcagtaagagttggtaagtggaggagacatttaacaattacattatcaggagacaaagataaaggtctgcctgagacatctgttgttagaacgtctaagcacaagaaaaacgcctaccttctggtcccactctgccatatttggagccatctctcgggcagcaaagtcaaaggccactttttgaaattctttctgctcttcattaagtcccatggaagctgtgggcaggattgcatatactgttctaggacagggtcagtgttgccaacaaggtgttgccaacaagaagcaccacgaagttgtgaaagtggatctactgtagtatttcccatacacggtatagcctttaacagctagagaatggcagcttctgtcgttattccacttgtcatatggagaaaggacagttctagcacacatccagatcaacctagaacaggataggggacttccagacatctcttatcctagcacttagtaaaatgcagttgtagacctagaggttgaggccacagtgctagaactttggtcattataactgacactgaagagcactatgggctgggcgtgatggttcacgcctataatcccagcacttcaggaggccgaggcgggcagatcacctgaggtcaggagctcaagaccagcctgaccaacatggaaaaaccccgcctctactaaaaatacaaaaattagctgggtgtggtggcgcatgcctgtaatcccagctactttgggagggtgagacaggagaatcgcttgaacccaggaggcagaggttgcagtgagctgagattgtgccattgcactctagcctgggtgacagagcaagactctgtttcaaaagaagaaaaaaagaaaaaagagcactatgggaagactatggcgccacacttggcaataatttacttcagtgcctacaagcgatgcagtcctcacagaagaacacaagggcaggtgccagagtctgttccttggggcaaatctgggcatcagtaatggctggctatgcgagcctggagagggcactgctttctgtgatcagtactctcattaaaatgggaaagtcagaaatgaagagttctgaggattaacgattaggctgccttgagaaactcagagcagaaacctatgttgggtattaccctcaggaacagagttagggataaacaattcatggttctctgactggggtcaggccatttattcacacaattttgtacaagggttgctgttactgtagaccatggctcaaagatcatttccaaaagaatgtttattgggtgtttactaggtagcagtgctggggttacaaaaataaatatgatccagccaggcgcagtggctcatgcctgtaatcccagactttggggaggccaaggcaggtggatcacttgaggtcaggagttcaagtccagcttgtccaacatggtgaaaccccgtctctactaaaaatataaaaattagctgggcatggtggcatgtgctgtaatcccagctacttgggaggctgaggcacaagaattgcttgaacccgtggggcagaggttgcggtgagttgagatcgcaccactgtactccagcctgggcaacagaaagagactccatctcaaaaaaataaataaataagatccattcacacaaaggatgactatttcaatcctagcaagagctcattaaatgttaacaaatcttcttcttctgtaaatggctacttcctaaaacaaatagttcaaggaaccacaggcttaagaaataaatctgagttgcattctaatggaaggaaatagttttatgcaaatcatatgcataagtaaacacaagttcccagaaggaaatacagtataaaaacaaaacaaataccaccactcatgaactttgccagttactagcagagttcaagatgccaatacatagttactagcagagctcaagatgccaatacatatacactaaaaaggtaaagctaaatagaaaaacactccaaatgaaatgggaaaagcctttgactgcagagccactcaagtgtaagcaagatgcaaacaataacaaaacccacctctaaataattccttatctgcttcggtatcaaccagggtaatctgggttatcaaattctaagcgctaggccagggcagcacctcttgaatgagttttaggacattcagaagaaaacagtattctatgccttactgtactttatagatctgatatctaagggacttattctgttgtaaagaaaactgccatttatttaaaataaatttaaaaatatttcagaagaaaaaagtgtttataaacattcttggcagagaagtcacaaactggccgggtctccaccactcctcgctacattcaaattactgttcagagcctaaagacactcaagtttgtcagctctggtagagtttcccactggcaataataattatttttcctgcatgagtttcaacactaaaagtgtcttatagccagaggtgttaagataccaaatctttgtgtgtgagcaaatcttgtatgacctggagttcttgtgcagttgtcaccatcagcacccagccagcttcttatattctcactgcttttatgacctactgttatgattaaaaaccaaccaacccaacaacaaccaagccccaagtttcttcacttctctaagcatccgagggtgaccggccgcaggaggacccgggccggaggggaacctgcggggggatgaccggccggaggggaacctgcggggggtgaccggccggaggaggaccggggcgggggtgaccggccggaggaggaccggggcgggggtgaccggccggaggaggacccgggcaggggtgacgggccagatggggacccggatggtggtgaccgaccggagggggcagccaggccgggggtgaccggccggagtagggagccaggccgggggggtgactggccggaaggggagctgacgccggggtgactggatggaacggggagactgcagcccctcgcggacatatgtccgccggggttctggacacctgtcctactgcccgccaggagatccttacggtcgatgcaggaggtcaagctccggtggccggtctggacgaggacccggagaccgccgggcaggcagccgaggcgcgccccgaaacgccggcagccgctccacagcatagccgccgcagctccgcgttcagctaagagtctgaacgccttcgacctccgttgcgctcgcactggcgggacctgcgacccggcaacgcctgtcccactgcaccctgggggttgtagtcctcccacgagccctaacaacccaggtgccaggcgggctcccaaggggacaggactacaattcccagaagtcctcggggcctcggcgccgcagagatgcaccgcccaccaagcgccgcgggggtcgcgctgcacagcctgcggcgcagcggaggcggaccgcagtcgagtctgcagagtgttgggtctgtagccagcaaattacttcatcatctagattatccattcagttgatcctaattagcaaggataacaaggtaacacaaggcttacttatattcacccaacaaaagtgtctctgtggagccacttcccagtgaactacatactgagataggggttcctggatgagaaggaccaaggacagaaccgagaagagtttaggggcaggttatgcgagatggaaatggcgcagataacggagggaaggatttgagggctcaaacgtaggcgtctgtgtttcgcaaaagttggagacgttctaggctgcctctcgttscctccatctcgctctgcgcgggttttggaggacattagcattctttcttgtatctccgttgattccagaatcgtccgcactaaagtcccctgcagcgtgaccatgtcgagaccccggaagaggctggctgggacttctggttcaggtgagctgcccctaggctgcacaaaggcagcccaagaaaaaacttttctcgaagagcctgtttagtactcatttttcactccctgctttttgagaaccctttgtgatatttttactccattatccttaatcactctccatcttctttacttgtctcaccaagctcctacctacagttcctttttcttgtttattcaggcaatggttgttgtgcacaaagactctttgagataccaggtggcgtgctaaagaatataaagcgcctgcttgcgggtgaactgcaaacagatgtgatggggttcaggaaaatggattgttaagtttatggagggaggaatcacggggaaggcctcgagaaggatgtggaatttgagcccagccttgaagaatgggagactttccacgggcaaagtttagtactaagaaaacgtgatgtcgtttttataatcacaaagatggatggcattctaagtggatggaggagraggaacattggaaggtacagaaagtacctcttttgggaatgacaggggttccagatatactacagcacattgcagttatttatcaatatgtggtgtttgcagtgggcctgttaactcctaaggggccattaggaaactaggttaggaaggtatgctgggttcagagcattagacagccataaatggtatttaatgacaattgatgtagggactttgactaaattcagaggcagtatagtcattaagtagcttcagatagacctcagtgacaggtgctgacctcatatcttgattccaccattactggatgtgtgatctggagcatgcttcccagatgaagagtagaacatctcacaggttatgtagattaaccgagttagggttagggtaacacatagaccttgggccctgtcatatagtaatttaacaacttagctactgaatgcctactgtgttccaggcacattctgattgtcttgggatgaaatcgaatcatcaccatttttctacaatgtcctgaatgaactgtttctttcaacttttattggcaccttcaaggagcagaaaggagatgggccaggagccacagtgagcaagaaggaaagacgtatgagatgagaataataatgcttttattatgcacttattgtaatgccaggcattgtctaggccctttgtattacctcatttaagcttcaaaatagttgcaagtaggtgctcagtttcctctttcctatgcaaaggcatagaagagagagtgaggaaaggaaaacatgtattgactactgtccggacctttaatcctgaacaaccctgtaaggtgttcttaccctattgaatagataatccagaagataccctgtaaggtaggtattcttgtctaatttttatagataaggaaagcttcttaacagtaagattaagttcctacagctggtaatggatccatgatttgaatccaggtctgactccaaagctaagctttttccattatgaaacattgcctttaacaagcatgatcttttctttttgcttctcctattgcagacaagggactatcaggaaaacgcaccaaaactgagaactcaggtgaggcattagctaaagtggawgactccaaccctcagaagacttcagccactaaaaactgtttgaagaatctaagcagccactggctgatgaagtcagagccagagagccgcctagagaaaggtgtagatgtgaaggtgagacccttgacctgtctccagtcccttcatggtgttttttaaatgagaagtgaatatgggacaccatagggttccatccccagcttcttatctttgaagggaaggaaaaaggtaaaaatgaataaaatcggcagggtttattatcatcagctggtttgtgaacctgtgtatctagggcaggggttggctaacctttgccacaaagggccagatagtaaattttgtaggcttgtgcgtgttacagtctctgttgcaaccctgcccttgtagcaagagagtggccacagataataagtaaacagctgtggctgtgttcaagttcaactttattcacaaaatccagcatggggttagatttgtcctgaaggctatagtctgccaacctcaatcttaggttacctttctctgaacacctgccatgctcctaggtgtctccctgccaacagttgatgtatatttcagggaatttaatatagcctgggaaaaatataagcagaactattataaatataaagtaaaatgcaagtaactagcagattactttatcacctagattattcattcagctaatcctcataattagcaaggataacaaggtaacacaaggcttacttacattcacccagcaaaagtgtctctgtggagccacttcccggtgaactacatacttcctctatagccagtggcccctctcaytttaggggaaggaactgtctgcttccatatgtgcttactaactggccaaggattgtttaatgattgaatttatttcctcttgcctagttcagcattgaggatctcaaagcacagcccaaacagacaacatgctgggatggtgttcgtaactaccaggtaagagggtaaggaggaggtcgcstgagacccaggtgggatgaatgcctgcctcctcctcatgacgtactcagtagcagaacctcttggccaaggttgctttttctcagaagcaaacctgataatgtattaaaaaatgccttaagtactctgcatgaaattttcaattggcctgtgttctggccaatgtcctggtaaaagtctgggtgtcctggcaaaggggaaggactttctaatgaattgaggagttgcagacaagaatcacccatctattaaaagcagacttgatttctgctaaaagctagtactttccagctggtgggaggatagttactctttcttctcccgrgacaggctcggaacttccttagagccatgaagctgggagaagaagccttcttctaccatagcaactgcaaagagccaggcatcgcaggactcatgaaggttagttgggcaggttttggtgtgaatcccttttcctccagggagactaacttaagtagatataaagggatataccttaattaggcaacaaaaaagtacactcccccccaccccatcccccttttacaggaatagggaaaaactgccctggccccttcctatctgataactcaaagcaggccttcattcaggtccgactagcacagacttcactccacctctaagtcttgatctcactcgaaaacaggcctgatgatagctcctccaagcttatcaggataaaattattaactgtgcagaggggaaaaaaacagtggtaccagtaataacctttgccatttgtttttagagcatgtttttaagacttttgtaaaaacagagttgatttcctagtctatatattagactatatattgtttccaaatatctgagsccccattggctgtacagcaaggcagatgggttaagaatgtgcagggaagaaatgaaagttggatatggattaaaagattggctgtggagctgactgcaggcagatgattcaaagcttttgttttggtttcagatcgtgaaagaggcttacccagaccacacacagtttgagaaaaacaatccccattatgacccatctagcaaagaggacaaccctaagtggtccatggtaaagactatgckttctatttcatgacaggggaaggatgaaccaggggaagaagacggttggggtgactgtaggtcaaggtacacggcccagcacttactcagatgaggtgatactgagataggagcttcctgtgggcggttaaaaatacagtgggcacagtcagcctagacacgtctttctgtcatgtacactgttgtcacataggtggatgtacagtttgttcggatgatgaaacgtttcattcccctggctgagctcaaatcctatcatcaagctcacaaagctactggtggccccttaaaaaatatggttctcttcactcgccagagattatcaatccagcccctgacccagggtaagagtgggccctctcctttattgtccatataccagaatgacctcatgaattcccacttactagctgattaaacttgggcatggtacttcacctttctcagtcagcatcctcacctgtaacacccatgagggagggaatgtggccagagttacctgttactattacmcagtactctatagtgcttggcacctggtaaatagttttgaacgaatgactgctcgccttagtaccatgtaagatgtacctgtgcctggcacaactttcctgttcaagaggggacattaaaaactaatccttcctttttcccttttttttttgtagaagagtttgattttgttttgagcctggaggaaaaggaaccaagttaactgagatactgctgctggaatgggcgagacattgctgcaaagaagtcaagcttttttcagacaaaaggtgtgagggggcttgcttggtatgcttacctgggcttgtgtacctcagtggtttttgtgtacttttttcamtaaaatatcaaagttgaagaacttttcttctaaaaccacactgagtgcagtgggatactccccactgcagacctcttacctccaggcgggctcctttggccgctcccagatgcagagctgcctccaccttctttctttacgatcactagtagttctgtagcaaattgcatgacgtagggctgagatcctcagtctggtaacacccactggaatgaactcttctttctacaccagccttgctcacctgcccctttcatcttctgggtcccacagaggtttaaaccatcccatgagcagttctggataaactgccagatagggataagaactgaattcatttctcagccatgtgcttgtctcaaacaggtggctaataaagtattcatcatttttcacccggggctatacagtgagagcacaggcactatgtagggaaatcagggcagggatctgtctttccctgagtgtcggagttgggaccatgtaagacggaagagaccacagaacttggtggaccgtgggcacaatgcctccaaagccacaggggctttctttaatcagaaagaccattaaaacaaacgttcttcttttaatacagccattgaaaagatgacacattaagaaacatgtaaacactgcagctgcttaattacaagttgcactgcttgatttagtacctatgcactcccaggtttggggaccttaagagagggggacaggagcctcccctcactttcacagttggatagagaaggcaagaatgtgggtagagtaagaaagagaaaacagaagacctggcttgtgcacagcgcctgagagaatcaaagcaaattctgtcttctagttctcccagaagaaaggtttaagatgttaggaaggttggaaaatgaacgtgtgttgtcagttgggaggcaaaggaattgacaaatgcttctagttagaatatcagctaggaaaaggagggatacagagcctgacctcatgctctgaaaaggcaaggaacccagaacttgcctcccttatccacttaagccccaaccttgatcatcaagggcagcgcatgggtgatcctgttcccatgaggattgtgtgtcgcacctgaacacaggacacagcgtgggggaaacaaccttgccttcctcggttctgctgccgccagtcgccctcctaggctacccgaaatgcctctccctccagtctcagctctgatccatgagccctgccaaaggcctgagactgcactgatctcaggaaaacagaagtcttcctttcccacactaactgaaaggtgacacaggaaccaactccttaactttccaaattactgagaactcagactgccaaataccgtacctcttggccagtggggcctgcttggtctttctataaagggaagggaggccaatgggagagtaatgcctgtcatttccaggggaagcagaaaaaggacagtaaacaactttactaccataggccccagcgcagagccgtagagggagaagtaccttcctctctagcataacaagaatattcacaagagtttttttatatgtgttttttaaacacacgataccaatggtcctaaacttgggtcagtcaactggtgaagatgacctatttggcaagcagaatgattcggaagtgtggcagcagtcttctgccgaggccctggtctcccctgtgtaacctatagggagaggggtaaaggggcttgggcattagtaagaacagccttgccaaaggttcgaaactaagccccaattcccagaaatgaaatggagggtgaggagagacgagggttcactctcagcaaggcggagggatcaaggccccttcctgggattggttcttcagggaaccaggccctcttgttaagggcttgctggggcacgtgaagcaatacctagaacagcccagaccttggggttaccaagtggagcgacgtgaaggcaggcggttgccatgcactcatcttccgtggtgggccgggttcagcctcctgggttcaacactgccgccatccgtgcacgacactgaccccagggcttctccgtgcccaaggccatcccacaggcttctgttccaggacattactgacaatccagagaggatggagaagggaggtgcctgggtcccagcagtgagtggccagaaggaggtggcctgtgggaacttgagatcaccacatccaagattcccaaagaggtagcttcccaatcgtgagtcttcccctgccacttagtgggggctggcccaactcctgccactacctccgggacagcaaaggggagtacaagatgtgactacccagggccctgttggcagctcagaatcccagggacatgctcagatcctgtatcaggaagctcagagagccaggagccaaggatgcgtgctctctgctctccctcctctaagacgcaaggcagccccccgaggaagggggctcatgttccccagagaggctggcttccaggatgctacctcttctatcccacatcggccgcagaatcccaaggagagactgcttcccaccccaagccccttgggttctccagagaaaagaatttaagtcaaaaacatgatttgttttcaggttgcaagtaacgggtcaactgagcctcacaaggtccgcccccgcccccagccgctggtgttggtagatgggggtgctgggtgggtgcccagcatcttctcggccctgggggcctactgcctgcagttgttgtcagacagctggctgggggtccgcacctcacccagggaggtggtgccctcaaagcgctgtgaggcgatggccgcctggtgggacatgctcttccgtacgatgtcacccttccgccacaacaccacttcctgcagaattgaaaggggggcaatgtgacaccttagagggaggcatggggacaggtttcctagaggctcccaactttgacgtggggaatctcgggcaaggacctcctctgcttctctctcaccaaaggcagcagctgccagcacctccctgtccctggtgtgggccaaaagggcaggtggttgcaggagaaggcccgaggaagcagactctaaggccaggtgagaatcctcattcttgttgtgcaattgtgggcgacctaatgttcccacctcttggcaaaaatggagtctgaccttccataggaaagagagcctcctgttctgtcccaagggcatcggggcctggaggagcctggccctcacctgctgcttgaagtagcgccgctcctcctcgtctatcagcaccaggttgaggtaatagcgcacagagaacttcttgttgatgtcccgcatggtgggcgtgagctcatacccggccaggaagagccggatcgggatggactctcctgtagggggagggcaggagtcagcacagggggcaaggtgatgccctctcccttataccaggtcactctgaccactgcagagatgccactggagtgcagcacacgagcacttcagccttctgggaaggtgcagtcgctctgctgcccagcaggtggctgaaacaaaaatgtgactctccagttccactccaggtcatgttgcagcttctcatgtcttctcgaaaacagagagcaactgagtgggaacagcacaggtcattattagtataagcatcttttgattacatgcagtgtgtttagttttggggttttcaaaaggcagctgtcaaagtccagttaagccaccacttcacccagcagttctgatgccatctttctccatcctcagtgtatgccccccaaaatacatcctccctcttgtgtggactggcaaggtggtatggtggaaagcagaaagtcctcactatggcctcagttctgcaagaaccgcttttctgatttgtgagttaagtctctgcttcctctggaccttcattttctcatgtggaaaattagagaatcggactgcgtgatactacagatcccttccagctctaacatcagaccgtttctagtatcagtggaacaaaattagggcagtaattctaccaagaaaggccaaacctataatgtggtctaaagctaaatataagccatcttatcattatctgctcttttacatgcattctcagtgacccatttcatttgtacaggaaaaatgacagctggctctatttgcacagccagtgacaaaatgggacatcagagagtgtcaggagagcttggtcccaaccctccaagggcctggcatggtaacacccgcgtgtccccagagctgcaggcagctaaatctgtggcgctcctccttccacatggaacagcctgtgggagtaaaaggaataagccaataaaaccctggaagcaccatgcacttcaaaatgaagagtcttcgccattcctgagggatggctaaagagccaatgaagaatgtaaatgattgcttcttccagataatcacggtccccaaatgacaaagggcttccagctctactaacccagatgtaatgttagctccctggggctgggagaggatgcttccagcaaattccagggctatctgggtacctggtggtgttggctgaagtatctagtagtgctctttctacctgacaagtgaattcagaaaataaatcggagctagagccaagtcacagacaggctgctgtgcatgcatcccttgctcctgagcagcagagaatgccagaatgtcaacaggaagaagcagaaacgttttcaaaccacatctgctaaacctggaccttccaaagtgacgcttgaggttcaatcttcagtacaagcccgatatataatccaagtctaagtgcaacttttcagggtgaagatgggatagtagcctcaagttctacacactcagccttccttttcttccttatggccacccacggtgtaaactgagagattaagaagttacaggttaagaggacatcttattttgacagtgtaatccctcaagcccctccagaattctgtgcaggacatgggagaaaagctgtggtagccgaggcctgggcctggagtctcacctcgcactggtgccccgtccatgatctcgtacttggctatcgtgtcattctcatggtacacgttggggcctgtacccgtcgtttctcgcttgatgatgtctatctccatgtgcttgattttgattctcaccagcaggaagtatatcttccctacaatgacatctttcaagtggtatctggggaacagaaagtacagaaagtaagatgttggtactgtggccagacctttctgtttcagtagagcgcacacgccacggccaagcgtgctggttaaacgtccagttgcaggacacactcacccatcactgcccacatggctgtggctgaactgtttcccagtgcggtctttacttggattaaagtagcttctgtcccttccacatcccacgcaaaggacgtctctcctgcatggtacccattcatgtttgttcatctgctctatctccccagcatgcagctgctttagtaccttttatatttgtgtttttgaaagatatcctaatgtatgagaggctagtcccacaagcgcagggaccagtctctcccttcctctgatctccacacaatgtctttagagaactggacctggatggctcaaagcacacagttctgtccgctctaggccgacaggccaggcagcagcagtagagtgagaagagcaaatcactctcggcatcagcgcctgctttctgggctccgctggcctggccttgtgagttgttacgaagtgagccacattgggtaacacttcctgaccctcagggttttttctctgggtcagtcaatagtctacatgtgcacagcccgtatcaggcatgagagaacgagtaaaatcttaaaacctgatgctcagctcacaggataagaatgctggcatggacatcagaattcagcctccttatattacaggtgaagaaaaggcagttggaagaaaagagataatgttctcttggataaccaggatgtgagtagggggtagagaaaggtggtaaacccaggatcctagtccccaggctgga

SEQ ID NO: 98040 - DNA, 35929 bp, Homo sapiens
gccagggcaggaggactgcttgagcccaggagtttgagaacagccagggcaacaaagcaagaccttgtctccacaaaaaataaaaaattagctgggcgtggtggcacacacctgtagtcccagctactcaggagggtgaggtgggaggctcatgtgagcccaataagttgaggctgcagtaagctttgactgtgccactgcattccagcctgggtgacagagcaagaccctggtctcaaaaaaaaaaaagggggggggggaagaaatcatctcctaactttacagtgtcacatcctcattcctaatgccacctgcacctccacttcacacacgagggtgatcgatcaccctaaaccatctgctcaccagggctctgcatatggggtcaccttggccccatgtgatcccatggctgctgtctagtctgggcgtcagtgaccctgcactccctacatgtgactgctcctctgcagaccccgtccaatcagctctccatttctgtcctggctgcttctcaccctcggtgatctcatgcatcactgtgcttcaacccatacctcaatttaaagaactctcttctctctcctggtctcacatttctactacctgttaaacttcccaaggatctcctgacagaatctcaagttcagaagtctaaacagaactgtttctccatttgaccttgctctttttcccttattccccaccttggttaacaatatcatcatcttcctagttttgaaaccctggggatcactgacttctttctttttctaattccctatgcccagtcagtttagcacttcacaccatgtttttaagatatctcaaaagggcttcctagttcacaaggccctattaattctaattccaaaaatgtccctagtttttagtcttcctttccagttcccaaaattgtaactccggatcatgccattattactcataacacctggatcaccaatacagtctcccaagggctctccctgcacacaatttttcccacttcagtccacctactgtcaagaacgtctgcttaaaacagatctattcatgttacctatctattgcccactgtaacctctttcacacaggctgcttgaggattaaatgagttaatacatgcaggacgcttagaacaaaacctcatacacactctaccaaacatgttcaaactccactgctgaacctcacgtaaagctacccgtgacctacccttactctaccttaccatcccgttccaccacactttttctgtatgcctcttgacacttcctgcgtgttcccattgggtggctccttcactaggactgccttacaacccaagcttctgctagtcatctgtgaagattcgctgctggccactttctttctggaactttcccaaccctaccatgctccctttttcacaccctatgcaacaaatccgcacctctcttggagcatttttcacagtgtggttcgtagaatatttccaggcgcccaaatgcacagtggcactgaactctccaccccctgcaactgcatgtggctgctagacctactttggctagtgttcaaatgtccactcttcctccctgaggtccctggggaggacctcaacctagggagattgtatcgtaatccccactctgtcaactcaggtacttaaggcagtgcttagtgttatgctgaaggaatgtttaattagatgatttaattttgtgatgtgaaacttggaagtgaatttttttttgttcatttaaatgtttcagagatgttaatatccaattagcttttgttctgtttcccaaccctttggttttttttgaaaactaacaacctaaatattaataataatttatatttctatgcattggatagaactcaatatttacaggaactgtttggacaaacctgttaattcaactagtcattcctcagtttaataatatcagattttctttttttgtgagacagagtcttgctctgtcgcccaggctggagtgcagtggcgtgatctcggctcactgtaacctccgcctcctgggttcaagcaattatctgccccagcctctcgagtagctgggattacagaagcccgccaccacaaccggctaatttttgtatttttagtagagatggggtttcaccatcttggtcaggctggtcttgaactcctgacttcgtgatccacccacctcggcctcccaaagtactgggattacaggcatgagccaccatgcctggtcgcagattttcttaaagttaaggttaaggcatgtctgaattgttatttgcattttccttggtctagttttcttgtttttgcctttatatttttcctttttttttttccttctgagatggggttttgccatgttgcccaggctagtctcaaactcctgagctcaagcaactggccagcctcagcctctcaaagtgctgggattacagacgtaagacaccacacccggccttatacttttcctttaatttgctattgtaaaaaacagtcgtgtcttaaaaaaaaaaaatcagacaagtaccttgaagcttttggaggaaagctcttaggatattccaataaattaaccacattctttatgttactcatattgtactccctgtgaactgtacaccaagaaagctaagcttcagattataataatgactttcatcttctacttctaacaccaaactttggctagtttgtttttatatttttacctccatagatccatgttctccagtagcaaagggtaaaaggctttcatagagttttgtgaatgcagccaatccagtctctatgatctctgcttctatgctgggatccaaaggctcagtctctgtgaaatccagttcccacactgtgtcaacccattctaggggaaaatgcaatgaaatgtgtaagtactctgtaacaagtaaaaaaactagtcacctttagattccaggtgtgttcaagaggagaaaagtttactagtcacgattcacatttaacttgttttaataacataggtgtagcataataaaagaaaaccagaaaaggttaagagaatcttaaatcacaactgacactgactattaagctaatcatcttctaaaaatataaaggaggaaatacttttcagatacaagagttttgggaaaggacacttcaaaacattcagtgatcaggctttcccacatgttcaatctagagaagaaacagaggttaatcagattgcccacgaggttcctttgtgaaaatatcataaccaagttaataagtggaaataaaatatagagcactttattgggcccttggacaatcatgtagcatttaaaaaacatatataatttctccaggaagtttaaaatagaagaggcaacccagattcagactcccaggaatacttggtgactttaaaacacactgattgaaagaatgtacattgagaggaggggtattaagacagcacgctggctggattccaccaatctctcttaactctaaatcttcccattcttttctttttcttttttttttggataaacttttttttttaacttaaagtttttgggtacatgtgcacaacatgcaggtttgttacataggtatacacgtaccatggtggtttgctgtacccatcaacccgtcatctacattaggtatttctcctaatggtatccctcccctatccctccatccccccttcccattcttttctaatacactatatttcttcagtgttgtcattgtcactttcccaaactaaaattaggactagatggaaatgtggacatctcaaattattaatcaggtgttccttcaaattaatattaaaagtatttgttcaccactgatttagagaagttgggcaaggtataaataaggaaaaaacagagatgggagcattacactgcactcggcaaatgaaaatgaaaggccttacactcaactagttccatccttagaatacaatctggtcatcatcttttgtcacttgaacttgaccctgaaggagggggtctctgtaccctaagtggctatgcacagcattccttccaaagacatggaatatgctgcctgaaagaagatctgaaaaatacaattgtttctttccaaatttccagtaatgttttaaaggtcattatagaccacagcaaaagttatctcactccttcttttggttttgcttatgacagttccctactgtaaataccatcaaatctaatttggatggcagtaactggccctgttatctaccatttggtcacagaagtcttcagtgttgattgttgagtgagagtataggagacactgagttagactttttccctcagtatctttacactattcaaatctctcactacctattttctcagctgtcgaatgcaggtaacttctgctctgctacttcacttaggatggaagaagaggaagaaatacatcacctattcactcaacaaacactttgagaaaatactagggaagccacttatacttctagggatataaagatgaatactagagggttcttgtccacaaagatctcaacatttcacacttaggataccaaaaaaagcagcctatgatagaagagaggccactgaattttgagtcagaacgaggcaaatatcctgacttgatcacttacacataattagtctctccttcatcattggaaatacaggatttttgtgaaacataatgtgtataaaggccctaacaatgtgctagccacataaaaaacagtcaatagatggtatttattatttttgctatggatgagtgttaaaataatagatatgtaaaatgtaaaatgctacagagcttaatagggaatagtactgggggaggagggagaggaataagatgattcttcaattggacctgaatgtaagagttttgccaggcaaataaatgcagaaaagtgcctcccagcaagcacagtgtaacaaagcacacaaagggaaagaaattaaagtgtttctaaatgaacaaaattgttacagtgtttgcttgtgggtattagtatctgttcagcagttattatgtggcaagtacaaatttatctttacaaaaacccctgtgaggtagatattgtactccccatttgacagatcagaaaacaggggtttagcaaggataaacaacctgcacggtaatacatggatgctatggggtagagccaagggaacaatccaagtgtgtccgactccaaaggttatgctcttggaaaatcaaactggagagaatggcagctcttataaagcatgccaaggatgtggtcatttatttaggaaacaaaggggaaacattaaaggtgtacaggcttgacacattcaaagctgtgttttcaaaagtcgttctgcaaaagtgtgggggatgggctggcacagttaacatcagaaagcagctaaaatactcctgcaattgctcgaggctatgatgaaggcagcagcatcaggaatggagcggggctgccctgagacacctcagaggcaggacagtggtagtgggcatgaaaggggaagcagaaatgccatgactcctgggttggtggcttggatggtgccattagcaggctttgggaatcccattttcactcatgtgacgtttgatgatgtctgcatgtgagacatccagtggaacctatgaacatgaagttcaagaaataagtctggcggaagaaagagatttgcaatttaaaaccatcttaataggtaagaatagataggtgcacgaagacacgcacaggaagaaggggaaggccgagaaaacagatgcacaggcgctagaagagactggccaacattcgcttattctaagggtggcctggccggcttgagcccccacgggaaacctggctagccgcaatcctggcgtggcacggccctggggaccccaggcaccgccgacagccgggcgcccccaccccgcccccaccggcaccccggcccgggcttaggcatcgtcggggacgcataggaccctcgccctggcccccgggcctcccggctgcatctgctcaccgagtctaagatccagcggacaccagggctgcaggccgctaccaaggccccgcaacgccaccatgatcccagggcaccggctcgccgccgccgtgctcaactttcaaagctcgctcccgcgcgcgcgccgastcgttcctgtggaccaatcacaacgtacagaatttcccactggccaaccaccgcgccgagccgtttccattcgctcaaccaatcaccggcgtcgtccgccgcacgctcagagaactgggcgggccgaaaagtggaagccaaacaaggctcctgcgggtgttccgctaattcgttcgagaaggagccagggcctgagttaaaccctaacagcgtttttcccgcctcgtttttcttcaatgggggaaaatctaaagggtatctgagatagggtacttccggtagtaactgtcacctttgccctcgtcaggcgacatttcgcgtgcgtgtcaaagggctgcctttcccgtcagcactcgaacagcgtaatatccgaatgtgaaaggcagcccaacgtgtatcgagctaaagtaataagggaaaagtagccgaaagcactccgagaagacaagacaactgcagttctgtagggactgcgcggcacgcgtgggcccagagcctgtcccagcgaggtagcagctgccatgccgaccgctggagcgccggccgcgctctccctgcgcatgcgcagcgagctctcctccgggctgccgggagtcccaggagcgttagggggtgcgcctgcgcgccgctgctccagcgcatccgggctggagctcgcccgccccctcccccgcccggagccgccgaagcgcctcggtgcgttgcaccgccggaggctgggcagctcgcagcgctgctcggcgctggaccccacccggcaggcgcaggccacccacacccggctctgtgcggctgccccccgcagcattgcacggccgaccctcgcccgcccactgccaccggccgcgggactggctgggactggctcggccgagggcactgctcctcggtgcattgctgctcgggcgccgcagcccgcagccgccagcctcccccggccgtgcccctcccccgtggagccggctgtccgtcggcgcccactgccyggcggcagcggcggagccaggcagccccgcggcggccgagcgcgctcgcgcatcgggccctctggccttctttacctagggcagcccgcgccccggtgcgagggagcggtccttaccgagacccgcccggcccggcggtgcgatgagcttcttcggcttcgggcagagcgtggaggtggaaatccttctgaacgatgcagagagtaggaagcgggccgagcacaagacggaggacgggaagaaggagaaatatttcctcttctacgacggggagacggtctccgggaaggtgagccttgccctcaagaaccccaacaagcggctggagcaccagggcatcaagatcgagttcatcgggcagatcggtgagtcgacccccgggaccccctcccccagcgccgacagccggccggggagcagggtgattcagggcccagctcctccggcgaggcctgtcacagtcgcttgtcaactgcagtctgaggcctggggttcagctacaagtcccgcccgtgggcgactccccctgcgttactgtcctccctgccaaaagtgacagcgcgctgccagggagatggggacggygagggcgggaggaagcgccctgctgtgcctcgtgggatgggcaccttgcctatgggttctccccattgtctccggcatgcactcggctttgcttcttgtccccaggatttctgggtgaggtgctctggccatagcctgcaggtgggtttgttagggggagaccgctctgccaatactggctttcccatcgcccggccatctgcaactgccagaygcaaagtgaggctcgtccaccgagccccacttcccagagcccgcaccaacccgtttttctctttagatgtggtgtgagagagctaaccagttctctcttacctcacctcagccctgaactacctatgcttgtacatgtttccagaaagaagacccataatcttcagtctaaatctgactacctaggctgcgtttcttagacttctttattagaatgcaagttttcagttaccacattttctgtttaaagacaaagaaatggtgtttctaaaaaccacaattaagtgatcagagtttctcaatgctttaaacatgattattaatcattggaactagacagcgccaggcacagtggctgatgcctacaatcccagcactttgagaggctgaagtgggaggattgcttgaggccaggagttggagaccagcctgggcaatatagcaagacctgcctctacccccaaaaatttttttgtaattagctggtcgtggtggtgcttgccggtagtcctagctcctcggggggctaagatgggaggattgtttgaacccaggagttccaggcagcagtgagctgtgataacaccacagcactccagcctgggtgacaaccagcaagaccctgtctcaaaaaaataaacaaataaacaaataagaactagacagtaaaaggcagtaatggtaaagtgatttggggagctcccagtcaagactgggtcgtctccaattctaagccttatttagactcttgtgtattattaaaatgcttgggtacttttaaaataagttgtttttgtcgttaggttaggagtagaatcacagtaaataccctgtgagctacacacctctggtagagaatccataccgataccacacactgcatacataactctgtttttagagacttccttggggaatctttgttaaactctcttatcctgagagtttagcaaagaatttgccgtctttttttcacagaggcaggaaacacggagacacaggtaggagaaaccctgggaaaaggaggccttgtggcctggctcttgggttcactgctcagcctcaagcattttgcctctggtatttaagaacatgaaatcaggttgaagactggctgatcttacaggaagctctttgttgttattttaaagccagaatatgaaaggtcttagtgtaccagaaaaggggccgaagagtgagttccatgccttctgctttcctgcttctgggttcaatggtggggtagatggcaaggttcctcagtagcagcactgtgatgtctggcatcgtttggcatgttgtcatgggatgtttagcagcattcccagcctctactgaccagacaacagtagcatcccccacttgcgaccacaaaaatgtcttcagatattgctgtatatcctctggagggtaaaatcatctctagcaaagaaccccaggataaacaggatgagtccaaagcatattatgctacgcatagtaaatagtcgagaaatccttgcctattgagcaaggtattttttagtagcagttttaaagttattgcattgattctttggctccataataataattagtgttggcaggcatgtttagtctgtgtctataccatcactcccagatggtggtaccttaccagtatgtgaaagataacccagaatgtcttctgccccagacagtgtgaaattagctgttctaggaaccgtgtcaaggccttcctctggtctaaatgaaagggagttgaagaaactgcttgctgttcctgccccacctgatttcttgtctatctccttactcctgagacatccatcatccctgctgaattttctcagaaccttttgttgcttccactagtaactcttcccgggcccttggccaccctgcactgagttgaccatgagactgggggaatttagccactctctgggcctcggctttctcagctaccaagcaaggaaaataacatcacttggtgagaatgttgggcatgccaggggatcatgcatgacccttatagagggttcctttataaaattatggtagttgtagtaaaatgtttccatttcacaaattgagttatcacccactggcttgctgctcttcctcctgtacctgttttacctgaagaagatcgccctgtctactgataaggagtgcatgtttcaaccctttgccttaaatttcttactttggccacatgggccagtctcagttggtgttgtagatggagccagtcccagctttgtgctgaagtatattgttcacgctcaattatccatggttacgtgaggacatggaagtagaataacacagaatgatggacaatatgtttctgattatttggctttgggatgtatttcttgatcaagaacaaggcattagaataacctttgtagttctatttgatgtaaaagggagtttgtgttcctgaaatacacacatggacagggagtaaagatgtactatttggaagtctatttggaggcacagagtgacttttcttagacaacatgtttcttattatttggctttgggatgtatttcttgatcaagaacaaggcattagaataacctttgtagttctattcgatgtaaaagggagtttgtgttcctgaaatacacacatggacagggagtaaagatgtactatttggaagtctatttggaggcacagagtgacttttcttagacaatatgtttcttattatttggctttgggatgtatttcttgatcaagaacaaggcattagaataacctttgtagttctattcgatgtaaaagggagtttgtgttcctgaaatacacacattgacagggagtgaagatgtactatttggaagtctatttggaggcacagagtgacttttcttaaactcttatattcctcctattttatcttcctggttccccgaaagaagcatgttgtgaagtatttgtgtcatacacctgtgtcagtcattgtaaactgagcttggggcaccagagcgaggctagtgagtgagtttgctgaagctgcggtygtgtggttttctccttcattgcattctttgactatgtgtgagatgggtggaacttcagtctgttctgaggtctggctgacggggtggcatatggcagtaatcaagttgatagcactgagctctgtccctcttccttgttaatttggaggcaggcaggcagaggtgtcacttttatcctgtcacttgctgtggcaatctcatctgcaccgatgacttattttctttgttttttatttaaaaaattttttgagacatggtctcactccgtcacccaggctagagtgcagtgccacgatcacagctcactgcagcctcaaccccctgggctcaagcaatcctcccatctctgcctcccaagtagctgagactacaggtgcatgccaccatacccagctaattttttaaatkttatgtagagacagggtctgtctttattgcccaggctggtctggaactcaagcgatcctcctgccttggcctcccagagtgctgggattacatacatgagtcactgtgctgagccccatgaattatattctgatgactcccagactgtttctttgttctgacccgacctctcttctgagtttcacacgtctttgaagctgtctgctagacatgtccaccgggataccctacaggtgcctcagtaatgcatgcaaacacaaacccctctctctgtctctgcttcagccacagccccactgcgtctccttttttccccatttcggcctatgtcagctgggatcatttagcctcagaaatctagaagtcattttgaagtcttggctcctcctcccacacatgcagttggctgctaagttttggccttctctgctggttctgcagtatatctcaaaccagtgtctcctctctcttctcaatgccactgccttttattttctgtttgtagcagcttcctaagtggtcttcctgcctttgtcttcctcccctttcaggtcattttctgtgaggatgaagtttcttaaaggcagttctatcattgtcagtcctttcttaaaattctcgcctccctattggttaatgggggaaagtatatccaaatccctcctgctctggccctccctctctttccagcctcgtctcccctaacccttcactctcaccgcttgtgggttccacaaactatccttttcttctggaatcttggtattttccctttgtatagtaacatctttctgcaagatataaccttccacccaagctcttactccttcaaagcctagctaacatcacatccatcagaaagtcttctctgacttccccaggctgacttaagtgcttcctccactgttcttccagaggcctcattaatacctcttttcaagccgggtatgacaagcttgtgacttttttaaaaaacttgtctgtctttcttactaatttctgagcacctgagatccagggactgccttcagcccatcattagtgcagtggctagcacatagaaggtgcctagtaaatatttgttgaatggatatattggtcaaatctaagaatttacagaaactattctttgttgttgttttgtttcattttgttttctttccttttcccacatctcctcccagataagcaagagttgttttaatgaaagaaagacagaaatcaggtttgttttggtggttgagcagctgagcttcctgcctttgttgtggaggaggcattgatgagcaacatgtggttgtccatcaaggccactgacaactcggtgactctccagctggtgtgcccccactggggctgcgtcctcactgggggaactgggataaggaagtattaaarctgatgtcagtttacctgcctttacatctttctttcctcacactcttctgtgccaagttgaaactgatatccccttgtgtgtaagaacgtaagagttgtcaaacctctggcccgtttggtcctgcaccactgctcagatgtggcagtttgaacgttgcctcctgagactataatatcttatttattcacttatgtggtggacgtttttctgttatcctctgcaagttttcgagccacactgggatccttcctgtacctaggatacttttccagtggcttggtctgtgttctaacaatgccaacacatgtggtgagggcatctcttgggtcaggcccatgggacagaaaggtctaagacctagtcatcctactggcccacgtctttaggaagatgcagtagtctgtaaggakcactgcaaggaaaaactgtaactgtgagaagaagagaccgttgttgagctggaatcctttggggaacaccagtgaagtttagaaagcagacctgggccgccttggagactaatgggttaaataaaccmaacgtaattagaaggtcagacatgcggaggagggcagacaggaacatccctgcactccaaagccaacagacattatctggatttttttttttttttaggttttaataagcccattaataccaatcaagcccatacttttaaaaactccaggggctttctgtattttaattcattagcccttgaaacactaagtaaaaggcacattaaratgaggtggattgattctggcctacttaacaagctgctggtgggactggagcagagctgcgcctggtgaggcgtgggccgctcagaggtgccagtgcttctgggtttcacagggttggcagacaggagtagggtgtggtaagcacgaatcctgacagtggccagccagcagacagtggctgggagggtcagatgaagaggaggctctttggagggcttttttttttttttgagacggagtcttgctctgtcgcccaggatagagtgcaatggcacaatctcagctcactgcaacctctgcctcccggattcaagcaattctcctgcctcagcctcccgagtagctgggattacagatgcccaccacctcgtctggctaatctgtgtatttttagtagtgacagggtttcaccgtcttggccaggctggtctcaaactcctgacctcgtgatccacccgccttggcctcccaaagtgctgggattacaggcatgaaccactacgcctggcctttggaggtctttttatgcttkgctgacttaggtttcttccaaaactgcacgaggcctagactaaacatggccttagccaagcagcaaagctcagggcggctgtcatgggtgacctgtgatgcaaagctggctcagtttccttccaraatggcaaattcacttctcaactgttggtggcaagtttcaccatgaaaacatcctgagtacaaaagttatttcctcctgttggactgagaaggaaaccaaagacaggatagttaccttaaccaaaaacttactcagttcctacttctagcctgacacgtctggtccctgaggactggtgattgggaagatgaccaccagtcatcatgcttctttgggacggaatagaggctatttacaatctctttagggcccagacctctcgtgagaacagccttggatttttgttttaatttatgcaagaggaaaccaaactttctggcaaataggaagcatcgctgtgtctgcccctttgccccacagtgtttgcagaagtattgcagatggcttataaaggatagattaaaaaggccaggccagccctgctgtgactgcacactggccactcttccatgacatttgatgtcagagctgatattaacatgtgtgcaggaggaaaggcactagggagaacgtgatgctatgcagggaatgacttctcctgctccaggtgccctgctggggcaggccgaaccttctgcactgttgctaggctccacaatgctggcagcctgagcgctctctgtgccttctctgttttgtttattcctgatgttgcctttgggctgtgtgatcgcatttctgtatttttccatccttttcttctcctcttcctcttgactctggaccattgattctggacactggggccttgctctgcctgcttctgtcccctgaaactatggccagaatctagtgcttagaaactgaggtaccaggttcccaagtcaaggtttcggcttccacacgaaagccaacaccatcgaccaggactcatgcaacaagagtaagccgaggagtccctgtccccggggctggccgcggctccgcttctgcctgtcatatacttctgacttttattgggggggcacaattactggattgctcactttccacccataatttggagctgccacctcccactctgaggctttgtggattatcactcactaaccagaatgctgcctactattgaaaccactgagtgtttggaaaggaaggtcattgtttgtaataaaagattgtggctgattgtagttacacgggaaatcagccacaagccacagccacacaatacactgtgaattcatacagaagtggcatcactagtgtgggatcccagagactccagtctgtggactcgcctcttcctccccaagcagcaaacaacagaggcaatgagtgtgctccgcctgctctgtgttcccaattcatctgccccgctgcaagttgcagtctagcacgggacttgaacacagaatccttgaggggtggtggcttgaactgtaatgtggccatgcatagccacagtcagtattaagagcttacctcggccgggcacggtggctcrcgcctgtaatcccagcactttgggaggccaaggcggttagatcacgaggtcaggagatcgagaccatcctggctaacatggtgaaaccccatctctactaaaaatacaaaaacaattagctgggcgtggtggcagatgcctgtagtctcagcttcttgggaggctgaggcagaagaattgcttgaacccaggaggcggaggttgcagtgagtcgagatcacactactgcactccagcctgggcgacagagcgagactctgtctcaaaaaacaaacaaaaaaaagctcacttgtgcagggccaggttctaggaagcaccagggagctggggatgtgggccttatctttaaagggcctgcagtccacagtgggagcgggggagaccaggtatgtagcaaaacttatacttaaatagaatataagcaaacataaaataatataggacaaatgggtggcatgaacttatcatcaaaaaataccagaactatttcctgaagaggataaatttagagcaatgcttcttaaagcgtggaagtgtggtagcagccgtcctggggagcttatcagaagggccagttctcaggccccatcccagactcctgaatcagaaacactagggtggagtccagccatctgtgtgttaaccagctctctcagtgactctggtgcacactaaagttygacaccccctgatttcagtggagggaataacatgaaaatgtccatgttcgattggccacatgccttccttttggagtaataacagcagctactaacgatgtttttgagtatttgctgtgtactagatactgttctaagtcttttacctacatcacccctgctacttcacacagagccttgtgaagtaggttgtgtcatgacctgcattataccagctgatagaaatagacgcagtctagaaggagacctgctctagtctcagctctgcagccagctctgcgactccaggccagtcagttaagcatgctgtgcctgggtttccatcgtcttttaaacggggtgataagacctgtcttagctgtgtcagaagattattattataaggatgatatgattaaatagctatatcctttcggaagttggaagtgttaaatgctgtttaaagaagtgtggcatttcttatattggctcccatgacttacccttattaaaagatggtgtccgagtgtcttggagcaggattattttgggttccttttctgccacgggatttcactatataagacagaaaagcctttggagaagaaggagggagtgaaagagcagaggtcaagaaaacaaggctagaaggggtctgttctgcagggaggtccttccagaaagcagtccctccagcctacagcctccagccccctactcsgcccggtgtagctcagggtctgataaaggagggcgtcgcatcrctgtctctcaccagaactctactacgatcgcgggaaccaccatgagtttgtgtccctggtgaaggacctggcccggcctggagagatcacccagtcgcaggccttcgactttgagtttacccacgtggagaagccgtatgagtcctacacagggcagaatgtgaagctacggtaagtgatgtctgctggttccccactgtaccctagaacctgccccatgtggacaaggacctgaggccgtccccactttgagratcttcacagggatcccgagaaggaagagtgtcgcgagctgtggcgtgctggtaaaccattaaccgtgggccttctaggaggaaagtggccctaggttgtagcatgtgtcaatttctgtagtgtacatagccccrccatggccaatttcaagctacctaatgttcctaaatgtagaggtgggagagatgtgctattaccatcatatggagacacattccctcaagagcagagagcattgtaaagggccggaaaataggaagtgatgagattttcgcatgtcttacctttgtttttaacatgattcatttaattgtgagtttatataatttaactttaaataattgctgtgtttaacagccaggtcataaaattcctgaaagttcaacgtcagccacccccagcacactcctgctggctgggtgtcaggagatcctgacctgctgtccggctctgccacacagctgcagtgtgaccttgagctctgtaactcagctttctcacttcaaagtgggtaatggacttggattctaattctagatgtcctcttcttttgggggtgataagaaaataaagttcttaaaatgtgaacacataggtacatggattgtttttactgttatagtgttggaaactctgagaatagagactgatgccaaggtcttttgggtgaaaaaaaatctacagcagatatagactgttaggtgtaaacttgaggttatgtgatgctactgggataaagcagtctcccctgtgactctgaacacctgattccaggtcttgataccatctcataagatcggtttatctcctcacctgaggacctgagtttaggatggtacacaccacaagacctttaacttcttttctttctctgtcctcccttcttccatcagaagagtgaaggctctttttaaatctttgcagaggtggtggttcacgcctgtgatcctggcaccttggccaggaattcgacaccagcctgggcaacatattgagaccctatctctacgaaaaaaaaaawtttttttaatttttttaaaagaaaaaaaacaaatctttgcagagaggtctaagactgacattacacccagtaaagacagtgtctcataatcgcacccagagaatgcagcaaccgcgaggatcatctagtcatcacttcagtttgaccgagggatttattatttaatttttttttcttttgcagtggatttgtcttaagcgtttgtacggcagaaagaaaggtgttgaaaccagtatagcagtgcctcaaaaaattaaacagaattaccatatgatctagcaattcctcttttggatccagaagcggatccaaaagaatggaaaacaggatctcgaacggatatctgtacacccatattcacagcagcattattcgcaataaccaaaaggtagaagcaacccaagtgtccatcagtgggtaaatggacacaggaaatgtgttttgtccgtacagtggactgttatacagccttcaaaaggaaggacattctgtcctatgctacaacatgggtgaacctaaaggacattgtgctacgtgaaagaagcctgtcacaaaaggacaaatactgtctgattccatatatatgaggtacccagagcagtcaaattcatagagacagaaartagaatggtagaggcccagggctgagggaaggaggaaatgggggttggtgtttaatgagtagagtttcagtggcggaaggtggaaaagttctggagactgatggtgatgtttgcacaatacgaatatcattaatgccactgaactgtataattaaaaattgttaaagtggtaaattttatgttatacgtattttgccacaataaaagaaaagtgttaatgtccaaatcacatgaagactttaggattcatgttgcgaaagagaggaggtagagataggaaaattagttgaggacagtttaaagatgtaacttccagattaaaagctttttcttattacacaggcagagggaaaacatgaaaagattattgtggacttttcttttgtctttaggcagagaaaaggttattttggaagattggagtccatatgtagcatttggtggatgggaagagtgtagagacaaaactatcagaaggctattgtgaggtcctccgagtatgattttggtggctgtaatgggaacaaagagaaagtgaggaatgtaacagacaccagcagagattaccagtgagtgcaggcatgcagccgtggagatggagacagagggctatcaggaggaagaaatgatctggagataaggtgattcatccagctctagagggcaggctgaaatactggcaaaatagagaaagcataaaagtttagcagacaattggaagcgcagacctggcactaaggacagaggggacacttagaaatgtgcagtcaggactgatctgctcagaggtcataactgatacgtttttgaagaaagggagcacaaggagaggagagccaggacccaccagggcatggcaggaggaggagaggggggtgaatcagggcagcgcctctgtggaaccgcgggaagagtgtttcaaggaagaagtgtttcacgggacgcagaatcaagggctgctggatttggcagctgggaggccatgggttactgacctcgaggcgagcggtttctgttgggtggtggagacagaagcaaggggttgggaggagtggttcgtggagaagcctcagctgttggtgcagaacccgccttgtgacagttgtctctgaagaaaggaaaagaaagtatggtaggtcaagagggtaaggcctggagagggttcttgggattggtgactttggaaaccaattttttaataagctcagaggaaaaggcctttagctagagggagattgatgatcttggggaaatcagaatatgtagaaggatccagatgccggaccaaggcttccacattagaatcatgtgggaagctttttaaaatgcgaatgcctgtgtccctttccagacaatcacatatcaggtgtgcccaggcagcaggattcttaagggctctcctctcctggtgatttcattgtgcatccatatggagagttcttgggccggagtggggaggagaggtcttgagagggagaggtgctgttggagacaggatgggtgaaaatgcagagacatgtttaggccttaagtaaggaacaaagcagaggaaggagcacattgtaagtcttgactgggaaggccttcatcttcttagtggagtaaaagtcagtgtcttcccagacagcggggtggggagacttgggaggctgagcagttagaagagggctagggacaggtgtcttgggcagtgtgatggttactgaggtgaaccgaaaggatccccaagaagcagccagtgccacacagaggatagtagccgaaatgtgtagttggtatggctagcatatctttatgtatttatttatttatttttatttgattttwttttttagacggagtctcgctctgtygcccaggctggagtgcagtggcttgatctcggctcaccgcaagctccgcctcctgggttcacgccattctcctgcctcagcctcccgagtagctgggactacaggcgcccgccaccacgcccggctaattttttgtatttttagtagagacggggtttcactgtgttagccaggatggtctcgatctcctgacctcgtgatccgcccgcctctgcctcccaaagtgctgggattacaggcgtgaaccaccgcgcctggccatatctttataacttcatctggtaatgcttgacagatggtggggattatctaagttttatttaaaagaaaatacaatttattatattacattagattatattaaaataatgttttatggagaaggaaatacaattaaagagctcctcctcattgagtrttagcacagtgctaagtgccggggatgacagtgctgcactggcgggccacagagggcagcttgttaaacccttcagggctgtgtctctgtcttctctctcatcccctccacagcagcgtcctccccagggatcctaggttcagccagagacttgttattcaacagaccaggtcctgtctgcccctgtggcatataaggtttgctctcctggaatgcccttttctccctccacacagcactggatcgcagcatctcaattagccctttccgtgtgttcccatttctctatttgcccatctcccccggtgaactgtgagcttcccatgagactgtatcttattcatcctgtgcttagcccagtgcttagctcagtaaatgtttgtggaatgaatagctgacttaatttctctctttcctagtcccctcttttaacttaagaaaggtttattgggacactttaaaaaggtttattgattgaatattgttcggtgaacaaacatgcaaagataaaactacgagacggactcctttgccccaaaagccaggagttagctgatgaaataaaacctgtacacaaatacatggtcagtagtggtaagggccgtgaaaggcccaagaataacatgtgattggggtacaaggcagagaaatcactttcccttacagcaggattcttgacccgggggcatgggctccctagagggatttgggggaagggtctttgaactccctagaattgtggttgaaaaggtctctgtataggtacatatgtgcatctttccctggaagagggtctgtaacttcttaaaaggatacaaagccctcaagggttaagaacctttgtacaggcttctctcaagtgggccaatttggtacctatatctaggtagcatctggagactgggagtgtttattcatgacagttccgtctcctacagctatttccttcgtgctaccatcagccgccgcctcaatgaygttgtcaaagagatggacattgtagttcacacactcagcacatacccagagctgaactcttccatcaagatggaggttgggattgaggactgtctgcacattgaatttgagtacaataaatccaagtaagtgtctcagtgccaaggttgtgaaatgattatttaaggaggttaagatgggacttgatgcagatgcaaactgatgaccctctgtgactcgactgctttgtggtggcatgcggtgggggaagaccgtgggagcaatccagtgagtgtctatggcaggccagctgcagctggaccgaccacgacgtaaacacttcatttacctaaactaaaccatattcaactaaggtggtgtctttaagttaaacatcctatgatgcctctcagtcaagctaaactaacttgaggttatttgttttggaattccagcttcagctgtttcccgctactgctaagaacaatctcagaataccattccattatcatgtgctccctccatctgtgtcttcagaaatcaaagcgacgaaaccaaatattggccatgatttgctgcttcctccctgaactaaaatgaattatagcaaagaatattggatttttttttcaagatggggtacagtggcccagtcatggcttactacagccttgacctcctagactcaagcatttctctcacctccgcccctacaagtagctaggagcacaggcatgcaccgccacacccagctaatttgtgtccgtgtgtgtgtgtgtgtgtccgtgtgtgtgtgtgtgtgtgtgtgtgtgtgtgtgtagccaaggtttcataatgttgcccaggctggtcttgaactactgagctcgtgatctgcctgccttggcttcccacagygctgggactacaggcatgagccaccatgcccagccctgatgtattttttataaaagtcttaaaatgactttattttaactggcaagttgggaagatgtatatcttttaaactgtgtttactgttagaacatcaaaataattagccagttataaataaatcacaaaactttctgacagggtatttcaaaagcatctttcttttgaatatgatattcctgagaatgtttggaactcaaatatccaaaagtagaaagggtattctattcacagagagctatacaaagaagccacaaagtctctaagtaggattttcattgtggcaccccctggaccactgtcatccagaggctgggagcagtgggagctgcaccagatggctcacctttgaagggtcaggaacagaactttttaaaactaggaacatatatggttcttggaacagggttggaggaatggtgtgttttttcccctggcaggcctggaacctagagggccccaggaaaatgaccagtgtgacccagaattggctctgcctcgcctaagcccaccagtgaacagagagtgaggcaaggtgggagggaggctgatctgggcctggcatgggaacaggttctccccctttctccttatagcctcagggctctgcggtcctgcccagaaaggagccatccagagtgcctacccactactgtcctgaccatctggtgaaggcagaggccagcagctgtgccacccgtaggagctcaragcagccactggtcatcagtgcatgccagaccaaagctagtgtggaaaaggtgctctagagaggcagggacgggacactttcagaccacacctctccttgcacagcgagctgctctgtgtgagtgcctgatttatatgccagagaactccagacttggaaccaggtcctgctcttacactaagaagttgggcggtcagcagatactaacattttgtatctcggcttctcatctgtaaaacgaggagcttggaccagatcagtgggtttcaaacacacagaaagtgtgaggtggcagcggagctgagatccttagacyctctggccttccgcttttcttccatccacaagcaacgtttttgttgggtttttgttttttgttttttaactctccccgcttacacctagagcagcttttgcttctgtataacatttagaatacaggaatgtgtgatttgtaggagtttgaaaacatctcgaatccatgrtctctaagcatcccctgtaagatggcgcaggtggtctcctgctgcttttgcaaatttgctgaggctgtttgctcaggtgtctgcagtcttcctgtagcctgtgcacagaagggtggtgtgaaacagtggggaacactccagcctggggactaggatcctgggtttaccacctttctctaccccctactcacatcctggttatccaagagaacattatctcttttcttccaactgccttttcttcacctgtaatataaggaggctgaattctgatgtccatgccagcattcttatcctgtgagctgagcatcaggttttaagattttactcgttctctcatgcctgatacgggctgtgcacatgtagactattgactgacccagagaaaaaaccctgagggtcaggaagtgttacccaatgtggctcacttcgtaacaactcacaaggccaggccagcggagcccagaaagcaggcgctgatgccgagagtgatttgctcttctcactctactgctgctgcctggcctgtcggcctagagcggacagaactgtgtgctttgagccatccaggtccagttctctaaagacattgtgtggagatcagaggaagggagagactggtccctgcrcttgtgggactagcctctcatacattaggatatctttcaaaaacacaaatataaaaggtactaaagcagctgcatgctggggagatagagcagatgaacaaacatgaatgggtaccatgcaggagagacgtcctttgcgtgggatgtggaagggacagaagctactttaatccaagtaaagaccgcactgggaaacagttcagccacagccatgtgggcagtgatgggtgagtgtgtcctgcaactggacgtttaaccagcacgcttggccgtggcgtgtgcgctctactgaaacagaaaggtctggccacagtaccaacatcttactttctgtactttctgttccccagataccacttgaaagatgtcattgtagggaagatatacttcctgctggtgagaatcaaaatcaagcacatggagatagacatcatcaagcgagaaacgacgggtacaggccccaacgtgtaccatgagaatgacacgatagccaagtacgagatcatggacggggcaccagtgcgaggtgagactccaggcccaggcctcggctaccacagcttttctcccatgtcctgcacagaattctggaggggcttgagggattacactgtcaaaataagatgtcctcttaacctgtaacttcttaatctctcagtttacaccgtgggtggccataaggaagaaaaggaaggctgagtgtgtagaacttgaggctactatcccatcttcaccctgaaaagttgcacttagacttggattatatatcgggcttgtactgaagattgaacctcaagcgtcactttggaaggtccaggtttagcagatgtggtttgaaaacgtttctgcttcttcctgttgacattctggcattctctgctgctcaggagcaagggatgcatgcacagcagcctgtctgtgacttggctctagctccgatttattttctgaattcacttgtcaggtagaaagagcactactagatacttcagccaacaccaccaggtacccagatagccctggaatttgctggaagcatcctctcccagccccagggagctaacattacatctgggttagtrgagctggaagccctttgtcatttggggaccgtgattatctggaagaagcaatcatttacattcttcattggctctttagccatccctcaggaatggcgaagactcttcattttgaagtgcatggtgcttccagggttttattggcttattccttttactcccacaggctgttccatgtggaaggaggagcgccacagatttagctgcctgcagctctggggacacgcgggtgttaccatgccaggcccttggagggttgggaccaagctctcctgacactctctgatgtcccattttgtcactggctgtgcaaatagagccagctgtcatttttcctgtacaaatgaaatgggtcactgagaatgcatgtaaaagagcagataatgataagatggcttatatttagctttagaccacattataggtttggcctttcttggtagaattactgccctaattttgttccactgatactagaaacggtctgatgttagagctggaagggatctgtagtatcacgcagtccgattctctaattttccacatgagaaaatgaaggtccagaggaagcagagacttaactcacaaatcagaaaagcggttcttgcagaactgaggccatagtgaggactttctgctttccaccataccaccttgccagtccacacaagagggaggatgtattttggggggcatacactgaggatggagaaagatggcatcagaactgctgggtgaagtggtggcttaactggactttgacagctgccttttgaaaaccccaaaactaaacacactgcatgtaatcaaaagatgcttatactaataatgacctgtgctgttcccactcagttgctctctgttttcgagaagacatgagaagctgcaacatgacctggagtggaactggagagtcacatttttgtttcagccacctgctgggcagcagagcgactgcaccttcccagaaggctgaagtgctcgtgtgctgcactccagtggcatctctgcagtggtcagagtgacctggtataagggagagggcatcaccttgccccctgtgctgactcctgccctycccctacaggagagtccatcccgatccggctcttcctggccgggtatgagctcacgcccaccatgcgggacatcaacaagaagttctctgtgcgctattacctcaacctggtgctgatagacgaggaggagcggcgctacttcaagcagcaggtgagggccaggctcctccaggccccgatgccsttgggacagaacaggaggctctctttcctatggaaggtcagactccatttttgccaagaggtgggaacattaggtcgcccacaattgcacaacaagaatgaggattcycacctggccttagagtctgcttcctcgggccttctcctgcaaccacctgcccttttggcccacaccagggacagggaggtgctggcagctgctgcctttggtgagagagaagcagaggaggtccttgcccgagattccccacgtcaaagttgggagcctctaggaaacctgtccccatgcctccctctaaggtgtcacattgcccccctttcaatyctgcaggaagtggtgttgtggcggaagggtgacatcgtacggaagagcatgtcccaccaggcggccatcgcctcacagcgctttgagggcaccacctccctgggtgaggtgcggacccccagccagctgtctgacaacaactgcaggcagtaggcccccagggccgagaagatgctgggcacccacccagcayccccatctaccaacaccagcggctgggggcgggggcggaccttgtgaggctcagttgacccgttacttgcaacctgaaaacaaatcatgtttttgacttaaattcttttctctggagaacccaaggggcttggggtgggaagcagtctctccttgggattctgcggccgatgtgggatagaagaggtagcatcctggaagccagcctctctggggaacatgagcccccttcctcggggggctgccttgcgtcttagaggagggagagcagagagcacgcatccttggctcctggctctctgagcttcctgatacaggatctgagcatgtccctgggattctgagctgccaacagggccctgggtagtcacatcttgtactcccctttgctgtcccggaggtagtggcaggagttgggccagcccccactaagtggcaggggaagactcacgattgggaagctacctctttgggaatcttggatgtggtgatctcaagttcccacaggccacctccttctggccactcactgctgggacccaggcacctcccttctccatcctctctggattgtcagtaatgtcctggaacagaagcctgtrggatggccttgggcacggagaagccctggggtcagtgtcgtgcacggatggcggcagtgttgaacccaggaggctgaacccggcccaccacggaagatgagtgcatggcaacygcctgccttcacgtcgctccacttggtaaccccaaggtctgggctgttctaggtattgcttcacgtgccccagcaagcccttaacaagagggcctggttccctgaagaaccaatcccaggaaggggccttgatccctccgccttgctgagagtgaaccctcgtctctcctcaccctccatttcatttctgggaatyggggcttagtttcgaacctttggcaaggctgttcttactaatgcccaagcccctttacccctctccctataggttacacaggggagaccagggcctcggcagaagactgctgccacacttccgaatcattctgcttgccaaataggtcatcttcaccagttgactgacccaagtttaggaccattggtatcgtgtgtttaaaaaacacatataaaaaaactcttgtgaatattcttgttatgctagagaggaaggtacttctccctctacggctctgcgctggggcctatggtagtaaagttgtttactgtcctttttctgcttcccctggaaatgacaggcattactctcccattggcctcccttccctttatagaaagaccaagcaggccccactggccaagaggtacggtatttggcagtctgagttctcagtaatttggaaagttaaggagttggttcctgtgtcacctttcagttastgtgggaaaggaagacttctgttttcctgagatcagtgcagtctcaggcctttggcagggctcatggatcagagctgagactggagggagaggcatttygggtagcctaggagggcgactggcggcagcagaaccgaggaaggcaaggttgtttcccccacgctgtgtcctgtgttcaggtgcgacacacaatcctcatgggaacaggatcacccatgcgctgcccttgatgatcaaggttggggcttaagtggataagggaggcaagttctgggttccttgccttttcagagcatgaggtcaggctctgtatccctccttttcctagctgrtattctaactagaagcatttgtcaattcctttgcctcccaactgacaacacacgttcattttccaaccttcctaacatcttaaacctttcttctgggagaactagaagacagaatttgctttgattctctcaggcgctgtgcacaagccaggtcttctgttttctctttcttactctacccacattcttgccttctctatccaactgtgaaagtgaggggaggctcctgtccccctctcttaaggtccccaaaccygggagtgcataggtactaaatcaagcagtgcaacttgtaattaagcagctgcagtgtttacatgtttcttaatgtgtcatcttttcaatggctgtattaaaagaagaacgtttgttttaatggtctttctgattaaagaaagcccctgtggctttggaggcattgtgcccmcggtccaccaagttctgtggtctcttccgtcttacatggtcccaactccgacactcagggaaagacagatccctgccctgatttccctacatagtgcctgtgctctcactgtatagccccgggtgaaaaatgatgaatactttattagccacctgtttgagacaagcacatggctgagaaatgaattcagttcttatccctatctggcagtttatccagaactgctcatgggatggtttaaacctctgtgggacccagaagatgaaaggggcaggtgagcaaggctggtgtagaaagaagagttcattccagtgggtgttaccagactgaggatctcagccctacgtcatgcaatttgctacagaactactagtgatcgtaaagaaagaaggtggaggcagctctgcatctgggagcggccaaaggagcccgcctggaggtaagaggtctgcagtggggagtatcccactgcactcagtgtggttttagaagaaaagttcttcaactttgatattttattgaaaaaagtacacaaaaaccactgaggtacacaagcccaggtaagcataccaagcaagccccctcacaccttttgtctgaaaaaagcttgacttctttgcagcaatgtctcgcccattccagcagcagtatctcagttaacttggttccttttcctccaggctcaaaacaaaatcaaactcttctacaaaaaaaaaagggaaaaaggaaggattagtttttaatgtcccctcttgaacaggaaagttgtgccaggcacaggtacatcttacatggtactaaggcgagcagtcattcgttcaaaactatttaccaggtgccaagcactatagagtactgggtaatagtaacaggtaactctggccacattccctccctcatgggtgttacaggtgaggatgctgactgagaaaggtgaagtaccatgcccaagtttaatcagctagtaagtgggaattcatgaggtcattctggtatatggacaataaaggagagggcccactcttaccctgggtcaggggctggattgataatctctggcgagtgaagagaaccatattttttaaggggccaccagtagctttgtgagcttgatgataggatttgagctcagccaggggaatgaaacgtttcatcatccgaacaaactgtacatccacctatgtgacaacagtgtacatgacagaaagacgtgtctaggctgactgtgcccactgtatttttaaccgcccacaggaagctcctatctcagtatcacctcatctgagtaagtgctgggccgtgtaccttgacctacagtcaccccaaccgtcttcttcccctggttcatccttcccctgtcatgaaatagaaagcatagtctttaccatggaccacttagggttgtcctctttgctagatgggtcataatggggattgtttttctcaaactgtgtgtggtctgggtaagcctctttcacgatctgaaaccaaaacaaaagctttgaatcatctgcctgcagtcagctccacagccaatcttttaatccatatccaactttcatttcttccctgcacattcttaacccatctgccttgctgtacagccaatgggggctcagatatttggaaacaatatatagtctaatatatagactaggaaatcaactctgtttttacaaaagtcttaaaaacatgctctaaaaacaaatggcaaaggttattactggtaccactgtttttttcccctctgcacagttaataattttatcctgataagcttggaggagctatcatcaggcctgttttcgagtgagatcaagacttagaggtggagtgaagtctgtgctagtcggacctgaatgaaggcctgctttgagttatcagataggaaggggccagggcagtttttccctattcctgtaaaagggggatggggtgggggggagtgtacttttttgttgcctaattaaggtatatccctttatatctacttaagttagtctccctggaggaaaagggattcacaccaaaacctgcccaactaaccttcatgagtcctgcgatgcctggctctttgcagttgctatggtagaagaaggcttcttctcccagcttcatggctctaaggaagttccgagcctgtcccgggagaagaaagagtaactatcctcccaccagctggaaagtactagcttttagcagaaatcaagtctgcttttaatagatgggtgattcttgtctgcaactcctcaattcattagaaagtccttcccctttgccaggacacccagacttttaccaggacattggccagaacacaggccaattgaaaatttcatgcagagtacttaaggcattttttaatacattatcaggtttgcttctgagaaaaagcaaccttggccaagaggttctgctactgagtacgtcatgaggaggaggcaggcattcatcccacctgggtctcaggcgacctcctccttaccctcttacctggtagttacgaacaccatcccagcatgttgtctgtttgggctgtgctttgagatcctcaatgctgaactaggcaagaggaaataaattcaatcattaaacaatccttggccagttagtaagcacatatggaagcagacagttccttcccctaaaatgagaggggccactggctatagaggaagtatgtagttcaccgggaagtggctccacagagacacttttgctgggtgaatgtaagtaagccttgtgttaccttgttatccttgctaattatgaggattagctgaatgaataatctaggtgataaagtaatctgctagttacttgcattttactttatatttataatagttctgcttatatttttcccaggctatattaaattccctgaaatatacatcaactgttggcagggagacacctaggagcatggcaggtgttcagagaaaggtaacctaagattgaggttggcagactatagccttcaggacaaatctaaccccatgctggattttgtgaataaagttgaacttgaacacagccacagctgtttacttattatctgtggccactctcttgctacaagggcagggttgcaacagagactgtaacacgcacaagcctacaaaatttactatctggccctttgtggcaaaggttagccaacccctgccctagatacacaggttcacaaaccagctgatgataataaaccctgccgattttattcatttttacctttttccttcccttcaaagataagaagctggggatggaaccctatggtgtcccatattcacttctcatttaaaaaacaccatgaagggactggagacaggtcaagggtctcaccttcacatctacacctttctctaggcggctctctggctctgacttcatcagccagtggctgcttagattcttcaaacagtttttagtggctgaagtcttctgagggttggagtcctccactttagctaatgcctcacctgagttctcagttttggtgcgttttcctgatagtcccttgtctgcaataggagaagcaaaaagaaaagatcatgcttgttaaaggcaatgtttcataatggaaaaagcttagctttggagtcagacctggattcaaatcatggatccattaccagctgtaggaacttaatcttactgttaagaagctttccttatctataaaaattagacaagaatacctaccttacagggtatcttctggattatctattcaatagggtaagaacaccttacagggttgttcaggattaaaggtccggacagtagtcaatacatgttttcctttcctcactctctcttctatgcctttgcataggaaagaggaaactgagcacctacttgcaactattttgaagcttaaatgaggtaatacaaagggcctagacaatgcctggcattacaataagtgcataataaaagcattattattctcatctcatacgtctttccttcttgctcactgtggctcctggcccatctcctttctgctccttgaaggtgccaataaaagttgaaagaaacagttcattcaggacattgtagaaaaatggtgatgattcgatttcatcccaagacaatcagaatgtgcctggaacacagtaggcattcagtagctaagttgttaaattactatatgacagggcccaaggtctatgtgttaccctaaccctaactcggttaatctacataacctgtgagatgttctactcttcatctgggaagcatgctccagatcacacatccagtaatggtggaatcaagatatgaggtcagcacctgtcactgaggtctatctgaagctacttaatgactatactgcctctgaatttagtcaaagtccctacatcaattgtcattaaataccatttatggctgtctaatgctctgaacccagcataccttcctaacctagtttcctaatggccccttaggagttaacaggcccactgcaaacaccacatattgataaataactgcaatgtgctgtagtatatctggaacccctgtcattcccaaaagaggtactttctgtaccttccaatgttcctcctcctccatccacttagaatgccatccatctttgtgattataaaaacgacatcacgttttcttagtactaaactttgcccgtggaaagtctcccattcttcaaggctgggctcaaattccacatccttctcgaggccttccccgtgattcctccctccataaacttaacaatccattttcctgaaccccatcacatctgtttgcagttcacccgcaagcaggcgctttatattctttagcacgccacctggtatctcaaagagtctttgtgcacaacaaccattgcctgaataaacaagaaaaaggaactgtaggtaggagcttggtgagacaagtaaagaagatggagagtgattaaggataatggagtaaaaatatcacaaagggttctcaaaaagcagggagtgaaaaatgagtactaaacaggctcttcgagaaaagttttttcttgggctgcctttgtgcagcctaggggcagctcacctgaaccagaagtcccagccagcctcttccggggtctcgacatggtcacgctgcaggggactttagtgcggacgattctggaatcaacggagatacaagaaagaatgctaatgtcctccaaaacccgcgcagagcgagatggaggcaacgagaggcagcctagaacgtctccaacttttgcgaaacacagacgcctacgtttgagccctcaaatccttccctccgttatctgcgccatttccatctcgcataacctgcccctaaactcttctcggttctgtccttggtccttctcatccaggaacccctatctcagtatgtagttcactgggaagtggctccacagagacacttttgttgggtgaatataagtaagccttgtgttaccttgttatccttgctaattaggatcaactgaatggataatctagatgatgaagtaatttgctggctacagacccaacactctgcagactcgactgcggtccgcctccgctgcgccgcaggctgtgcagcgcgacccccgcggcgcttggtgggcggtgcatctctgcggcgccgaggccccgaggacttctgggaattgtagtcctgtccccttgggagcccgcctggcacctgggttgttagggctcgtgggaggactacaacccccagggtgcagtgggacaggcgttgccgggtcgcaggtcccgccagtgcgagcgcaacggaggtcgaaggcgttcagactcttagctgaacgcggagctgcggcggctatgctgtggagcggctgccggcgtttcggggcgcgcctcggctgcctgcccggcggtctccgggtcctcgtccagaccggccaccggagcttgacctcctgcatcgaccgtaaggatctcctggcgggcagtaggacaggtgtccagaaccccggcggacatatgtccgcgaggggctgcagtctccccgttc

SEQ ID NO: 98041 - DNA, 21852 bp, Homo sapiens
aaaagacttcacattttcatctccatgactatgtgtaaaaatatagaaatcttaaaacaaggatcagacaggttgcaaaaccacaatatctgtcatctgtacattttttctgatactgagcaggggtcagccaaccatagcttctgggacaaataccatgcactgcctttctttgtaaataaagttttattaaaagacagtcaagtccacttgtgtacatattattcataacagcagcgttgagtaggcctgcaaagcctaaaatatttactatctggacctttatagagtttactgactcctgatatagaaagaaaggtacaccagccatataaataaccacaattaacaatgtggtatgtttctgtgttggggaaatcaagaattgcttctatgtctcatggtgtaaaaaaaaaaaaaaaaaaaaagcttaaatccctcagttgtgcaggcatctccatgttctttctctacaaaagggtgagaaatgagtggttccacgcttaggcctaacattgactcgaacagtgggacaggcttctgtttctgtcttttctggattttcaaacaagtatgtgttctctctttgaaaatacagaaagtataaaaacttaaggtaaaaaaaaaattataaatactgtgaaatactctcttgaacatgttatatatgacagatcattgccagggttacaatctcaaatttctaatcagttatttattatactcaacccatccttgctagataccctctccaaaaaataatcctcaaagataaaacaacataggtcacaagtcaggaatgcagaccctcaattcccctctggtatcatattgtgctgatctggttcttttgatcctttaacatttttaaactatggttcacagagtcctaagtcagtttttcttaacctgggatacatatgttagaatcacctgggagcttttaaaaataacgatgccagggccctaccttggaataattacatcagaatcactggaggtgggcctaagtcatataatttagtaaaaactcccctagctaatcctgatgtgtagctgggaaatgaaaatcattcattctgggagaatcgttcttagagaagttatcaaaatcattgggagtgttttgttttgttctgcttttctaaatggaggaatggcatgaggggttgcttcttcaaggactgtttcagtaggtttaggatgaggcccagccactgctattctgaaaatgtttcatggctgcatctgaggtgcatccttaattaaaatgctactcaagaggttctgcagaggtgtggctctggggtaaagtctggggaagattcagaaaaggtagcacattacatacatttatatatacatatacataatatttacataagaaagacaaaacctatatgatcacacttcatagttctgaaagataattcagataccagagatatcaatagtatactatagtaagatcagaagagagagtccattacccagtaacccataccgcaggtgagcaaagaaatcaaccggcagtgtttggttctgtatttccttaacaaacttgcgggctgtgtcgggtgggtctccggtgcccgtggtagaaaccacaacaacaagaggagctgtttcggtttttaggtcatactacaaaacaaggatatcaagtcagggacctaacactacatgcatttttgatttaactcagcagcaaagcaatcagcttagtttcctgtcttgtatttcaatcttcttccttgccagtttttttgagacgaccagtccagtgactaggcgctctcagcttaatcaatttgcctaatgcaggatgtcattcaaggaaaccatgcgtctgttttgttgatgctcatcaagaggttgggggggattaacacgtctttctcttcatgttgtgtacgaaaggcagggacaggcacagacagtacccatcccaggtttccatctagtcccagtctttcatttttagaaaaatcagaggaaataggatatagtcaactctttgccactgagtcatgggccaaacattaacatgagctcaaatctgcaaggcaaatcagcactgctaagagccaagatgaggcacctaggcactgtgatgagctgccaaggaggaacagcagctaactgggtggaaacgtcttttcataagaaagtaaaaaaaagcaaggaaagaggtgttaaaatggggatggggagactcagaaataaagagaactgatacataagcactcaggattagaatgccaagacaaggaagcaacaagtagaatactgtggtaaagaaaaacagcaataaaaacacaacagctctgaaatcttcagcaaaatataaaaccagccatgtgtactgcatgtgacactaaggcagagggataacagggcattttaaaactgggaaattaaaagtgttaccccttctaaatcagggacctggctatcaagaaccgctcattccctcaggtttccagagagctgagaatatcattagctataagcgagctacaaactcttacaaatcaagtttattcttattctcatgtaagtttaaatatttcatatagagcatttcactgtcttaactctgagaatatcattagctataagctgagctataaactcttacaaatcaagtttctttattcttactctcgtgtaaatttaagtatttcaaatagaacacttccttgtcttacttgtaagactccacaagctttactgcccatgaacaccatcgaatttggctccaaataattcaccttatttttcacactgataaaagaggtaacaacttaactttttaccgaagtatttaatgcttccaagactctatgtaagttgtgtgttaaactctacatacagagtttgtataagtaatgtcagtaccttgaaaaggactatgtgaaataggaaggatattagattatgaacagctagacgaaaccatcagccagggaggataaatagcatgactatcttggtgttaaaaaaaaaattcaccattcatctgactgccaaaacacctgctgatcaacttactgaggtcaaccacaaggggccaaatcaggactagttttatgatactgatggctttggttttgtccaaagtaacagattcagatacttcatcatgtggcactgcaatctgaacttaagttactgtagaatgacagagtctgctgactggcagtctcctccaggaagctcccttttctctggtgtccagagttaccgtggcagggctgcataaaggaactaggtgagtctccttccgtgagctgggtttataattcacttgagctgcacacagtctagtgttctgaactggagttttaggaaaggccagagagggttgtgcacttgggtgagagagcactggcaggacagtctctgaaatgttgaagtgaattttaactgcttagcggctggcaaatcatcttgtggtataaagcccctgccaactgttatcgcctgaattgtctgaaatagtataatctggaggcagcaaactaaataaaagaacacaagatggtaaagttgcatataccctaaggtaggaacttctgcagagactgaacataaacaactagtccctgaagaagcagccgagttttttccagatccttacactactactttaaattctatttcacaaaagaatctaggcggtccttcatcaggaggaactctaacacgcacggcaaggcctttcttttggggaaaaaagtgggacactgagattcaagaggtggaaagcacacctgagcaggcaaacacacatctcacttgttctcacagccaccctgtgaaacagacacagcatatgctacttctgtcatttacagttgagttgttacttgtttcaatttttgagaccatttagtctaattcaactacacacttctatattaaaaaaatgctggtgatatcttactataccattgaacaaacacatttctgttaaaaaacaaagactatgtggtggtattagtgtccttttgtttcataaatatcacttcccaaccaaaattcttcaaagcacaaaacggtaaaatccactgtaacggctctaaccttatcggattcactaatacagtgaagatctgcagaaaatccatgtaccacagcttgctcacatatttcttctgcgatggcctttgcctgtccctgctgtgtagcatatagtaacagaaacctcctcatcacttcaaggcatgtaacagtgaaactgaaaaatgggggaaaaaagatcctctttttaatgaagcagtaacaacctaaagatattaattctccctcaatctttaagaaacaatgcaacaatacccacacataatatgaaatggccttttctaaatttgttttcagcactaatctcaaatgagcctaaataagaattcatcaaattaaggagagtgtacgaatgaaactctaattccatggctcagaaatcagatgatcggctcgaaactacttgggcttgaatctgtgtttcctaagtgcaaccctgtagacaagctccccaaatgatccgtaccacagctcctttatcctaaaaatgagagtattaccacctacctgaaaaacgatgtggcacaagccaagaacctgaacaaaacttgagccacagtatcattcacaacagtcttaaatagcttttggtttcctctttttaaaaaaagataaaagtaaaaactatattaaaatgataggattcttggttcttatttgatcctaacgctaaacaaactaatcatagtactaaaggtaactgaagcacatactctccttcattatttaatgcaaatcaaaaatatgtgagtgtatgggcatatatacaaacgggtgcatataacgaaaaaatatttccaatccacttaaacattttactaacacgtttttccgcaagagataagcagtagtaaaacaaacgacactcacagatttttttccatactcatctaacggctaaaattggtgggctgtcaatttgcagagacagatttaaactgaaacccaaaccaaaagcttggctttcggtgaatgaaccgcccagaacggcacctggcatgaaactggtactcgataagttatctgaatgagtgaataaacaatatgaaaacactacacattgacagctcacagaaaacggtggaaacgataatgaaaaccttactacagctaaaatttctatcacttcccatgaaacacacatcctgagggcttcccaggatcaatcaacccctcatccctgctactgccccacaatccggcaccaccttcccacgactctcagcggaggcccgggccccagcagccccggaagcggcgcggaggcggtgggcagagctcacggccgcgggcagaactcacggccgcgtcccgccgggtgggcgctcggaacgtcccgggttccccggagcgcgccgccccaacccggcatgttccccagttccccgcgtccccgagtgcggtttccctaggcctggaaagcgcctagaaccaaaggcagaacatgaggagagaccccacgccgcccaggggcctcccgcggcagaggccgacgccgagcccaaggacacgctcccggggacaccaaagccaaaggccaaaggccaagtccgagccccagcccgcgcccgcggcgacccccggaggccgaagggcgtgggaaccacgggcgcaagccggctgcccacccccgccccgggccgcctctcccaggagattagtgcagggcgagcggccggaatccgggaaccgtagccgacaggcagcttacccacgccgcgccagccgggcacgaacctgcacaacgcgacttccaccaaccttgcgccagcgcgcactgacgcagcgcccatgctcggtacccaggaccaatagaaagctccgaaggggacctgggccaatcacattgcgccgccctgagtcgtgctcccgccccgcgtttgctacggaggcccacgacgcccaggcgcttccgcgaccacccggagtgattgcccggcagagcgcggtaggtgtcaacgcggggtctccgcgcagttggtccggctgggtgtcaaagacctggccggctttctcctcaggctgcgccgcccggcccgtgtctcagcgcaggtccccggggcgccgagtttgggggtgctcgccccgcgggtccctttcattcctaggaaaacgcgccgcggggcctcccgtctgtctgtcttgcacacacgtgttgccaaatccccccgcascgtctttagatctggactggccgccccaccttctcccttcattgatctatgttttgctttttcttttcctaccttgtttccattgacaaagtagaccctttccttcaacactaaccttctcccgacaccgaggggaaaccaacagcttagggcctttccagcgcgtttttacccttgccttgctctaacctcgcctaattttgcccactttacctgttctttgatttctatccaaatgcaatttcttccttcaaccaacatttaagggccacccttaagagctacattgcctgagtttgaaccctagctctgccacttaaccmcctgcataaactgggcaaagtaactttgtgcttcaacttcttcctcgtgtaaaatgatagtaaaagtactgaatctgtgtaagttaatagaatacctacaacagtgtttagcaagtaatagcgattgttattgttcaatgtcagccactcttctaactctaggatgcagagactttgcccctctggtgtttatatgttaaccatccttttttttttttttttttttccagatactcgtttgtagtttcataaacattgatgttgggycaaycatgttctcaatgtatttaaccatgtgtttttaaattttttaatttagttatcaaattgagaatctgatggtatggcattwatcaccttgaggaagaacctttatcgtttatctgattttcagatgcatagagctctggctgctttaaaaaataaacctctaaatcatgttcacaaggtagtcaaggagcgtctgtgcccttggttgtgttcacgacaacctgagcctttcggggtcarattccatcatgcccattgtaaaaagtttcattcgaaaaatggaaatgaccttcatccactcggtggaccagtgttctctcaagtatctgactgcgacaggcttgaacaaaatgttaaaaatgaggagagtcagatgttttacaggagactgagcaacttgacttcatcagaagaagtgctaagttttataagcacgatggaaaccctgcctgacactatggcagcaggagctttacaacgaatttgtgaagtggaaaaaaaggatggtgatcaagggctgccaaaagaaatactggagaatagcatctttcaagctttatgctttcagtttgaaaaggagccctcacagctgtcaaacactagtttagtgactgctttgcaagctctgattctgttgcatgtggatcctcaaagtagcctgttgctgaacctggtggcagaatgccaaaatcgtctcagaaaaggtggcatggaagttcgcaatctttgtattcttggggaaagtctgattacactgcacagttcaggttgtgtgacactagaactcattataaatcaacttcaaggtgaaaaattggaaacatttaccccggaggatattgtggccctttatagaatcttgcaggcatgtactgaaaaagtggatgaacaccaaacatttttaaataagataaacaacttttccctatcaatagtttccaacctgagtcctaaattgattagccaaatgctcactgccctggtggttcttgatcaaagtcaagcatttcctctgattataaaattgggcaaataygtcgtgaggcatgtcccacatttcactaacgaggagcttaggagagtcttggaggcgttcatatattttgggcaccatgacacattttttacaaaagccctagagcatcgtgtagctgcggtgtgcctcacgttggatcctgaagttgtctgcagggtcatggagtactgcagtagagaactgattctttcaaaacccatcctcaatgcagtggcagaaacttttgtttgccaaacagaaaaattttcacctcgtcagatttctgcsttaatggaaccatttgggaaactcaattatttgccaccaaatgcctctgctttatttagamagctggaaaacgtgctattcactcatttcaattattttccacccaaatcattattgaaacttcttcattcatgttcacttaatgratgccatccagtcaactttctggcaaaaatattcaagcctcttttccttcaacggctgcaaggtgagttggttataaattctgacagttggaaaaaagtaacctttgaactggcagtggtttcaagtcacatataaaggcaatatgttgcctttagtttttcttccatagtgatccgaagatgagacctgaagttaacagatgctggcataaacacagttaaagcatgctaggaaatcatgtagagggaagaaagctgtctcagataaactgacttttgccttatctgagaaattgcagcattcttaggagatatggtaatggcagtggaaatagccacattaacatgttagaacttttgatgagtgagcaactgtatctttttttttttttttgagaggatggtattattcatcttaattcaaggccacccaaatatgtcaaatttccggaactccatagttaaaggaaatttccactaattctgtgaacatattttatctcttttaattgtattctgtagctaggagcttgggttcttggaagtcaatttcattggtggcaagaggagggcataattaattctaacaagttcatttcatagtgtcatttaaaaatagaatacttctgtctggagtgtgtaaattgatgttgaatgttcatgatgttctctcatacatacctcaattcagacgtaactatgactgggatgcttwctgtttcaggtaaagaatctcatttggacacattgagtcgggcacaactgacccaacttttcttagcctcagtcctggaatgccctttctataaggtaaaagcatgaactatatgtggctttatttccccatgggtgcagtttccttttaagttcctttacttctgatctgtctcaataacctgaaaaagcagaatttcatttacttggagtcakttgccaccagataggcttttctttgataaatggaccccatttttgtgttcttgttcttgaaggaacaatttcctgctgtttaagatttcttaggaggttttatcaagtgctgcaggcatgtgagttacagtatttctccattctctctgaaggttttacagggttttagtactaggtttactactaggtttcccatagctgtttgttatcaaagtgtgaatgtctggactgaacaaatacctaaattatttgcaagtacagtatatttttaagccaagccagaaatttcacttttatctaatagagtttagtttatctagagttcgctcttcccataaagacctataaagatttatcctattayctatcacattccttatgtagaatcagaaatagcacaccagactatgacattctctctctgcttctctctacttgactctgaatcatagtttagagtatctgatttttgaaataaggtaataagaatggaaaaataccccttttttaaaacagcttagacagtactaagttatataaagataaataatagttaaccccgatctcttaccatttctaaaggaacagtattaaaagcagtttctacgcccaaatgtatacagatacataaacactgtctattttttttctcttttcaaggaatgagactcactaatcaaagtacaatttgcttttatgcgcagtatatcatggccatccctcgaggccagtgcatacagatcacatgcattctttttagaaaggcatgatatttcatggtgtttattctactattgatgcacttggaggtttttgcaacttttgtctctatcgggaatgctataataaacattcttgcaaatcctgtcatactagagcctttttggtttttttcatatataaactagattcccaaaaatgtgattagtggattaatttttgatggatactggcagattttttttccctwatagttacagatgtcacatttccccagcaatgaatgaaggtggccatgtctcctccacttctattgcagtgtgttagtagtctctttaatttgtgttactcaactacatgaaagaggatatcatatcatatatttaagttgcattttaatgagcattaatgaagtttagcatattttcaaatatgtgttggccatttacatttcttttgaattgcctttctacaccttaatttatttctgttggatggtttgtctttaaggactcattgtaaaacagatattaactattatgaatgttgtacatattttcccgatttgtactcttttattactttttaatattacttatgatgtatttttaaatgttctgtagtcgaatctgtcttttatgacttccgaggttcctatctcaagagcatgaatattttacatttttaaaaataatatcttttaaattttatttagatctttgatctaaaagtaaaattgaatttttatttatgtattctaattaacaaaaattgtatatacttattatgttcatgttgttttgaaatatgtatacattgtagaatggctaaatcaaaccaattaacatgtgtattacctccatatctatcattttattttgtggtaagaatatttaaaatgtactcttgccgtgcgcagtggctcatgcctgtaatcgcagcacttttggaggccaaggcgggtggatcacctgaggtcaggagttcgagaccagccttgctaacatggtgaaaccctgtctctactaaaaatacaaaaaattagccgggcatgatggcacacgcctgtagtcccagctactctggactctgagttaggagaatcgctcaacccaggaggcggaggttgcagtgagccgaggtcgcgtcattgtactccagcctgggcaacaagagtgaaactctgtctcagaaacaaaaacaaaaacaaacaaaaaaaaaggtaaaaaagtactctcagccattttcaagcacgcaatcattcttattaactatagtcagcatgttgtacacctggaatttattagcatctgtcatggatgacagaagtttaatttagttattttccaaataaataaccattttctccagcatcgtttattatattgctatccttttcttcctaaactggaatgtcatttatatcacattttccattacagattgagtatcccttatccaaaatgctcaggaccagaagtgtttcagctttcagattttttcatattttaaaatattctcattatatttaccagttcagcatccctaattcaaaaatttgaaatccagaatgcttcatgagcattttctttaagcagcctgtctgtgcttaaaaggtttcggattttggagcattttggattttggattttcagattagagaaattaaacctgtgttgaaaactttagttgtgtgtacttaagacccttgggacaattctcagttctaaaaatgtttcttgaactgttagcattattatgtttcttctcactctctcctcactcctttttaccttccttctttacttttctttctgtttatggtaaccagtgactactgtaaaaacacatataaaagacattttgaactattagacttgcactgtaagaagagaagtttgcattatcattttgagagagatgcctgtcccaattcctggaaaagtatcatgcctataaagtaatgttatatcaaacttttctacctaggtaaccttcaatttattctctgttgttatatcttatttttctttctcacatttgcacttatgattttttagggtccaaaactccttcctaaatatcaagtgaagtcatttcttaccccatgctgttccctggagacccctgtggattctcagctttatagatatgtgaagattgggctgactaaccttttaggagcaagattatattttgctccaaaagtgttgacaccctattgttatacaataggtaagtagtrtaaggagttttgttgttttaaacctaagcatcctgttcgattttggagatatatgggacttagaagcaatagaagttctctggaaatgcaaaatggaatggtcccttccctgaaggcaagttggggttagcagcagagccgttgagtcaagactgtctgggtttaagtctcaaatattagccacgtagtagcagaatatcctgggcagaatatttaacctttttctgcttgcttcttcctctgtaaaatgatagtaataytgacctcaaagacttacttaaggtctaaataaaatagtacctggaacgtaggaaatgctcactaattgttagctactactataacctaggcttgtactgtccaaatatagtagccactagaccatgtggctatttaaatttaaattattaaaagtttaagaaaattcaattcctcagtcacattgtaagtgctcagtagccacatgtggctcatggctgccaaattggacagcaccattataaagatttccacatcacagaaatttctcctggacagcactgacragagactccaagtcctccgtccttacagttcttctaacttgatgagcagaagaaagccttctcgtaaaggacagcagttcataggcttcagatggtcacttctcttctctttacgaagggaactgcagtttaccagaggggaaggacagttcggaagccttccgtgctcgcagaccaggtgtctgggtgtggcatgctttctttacttaccatggaggcactgcaagttggaatgatggaagttatgagttgcacagatgtctaatgtcttaactcaagggttttcttcacagtctggattgaaggatctctgccacctatcataaggggaaagagaaagcatgcatggttcttgtcataccccagataacttcagaacccattctgtggtttagygttattgagctttcttaatttaaggctgacttgattgatcataaagccaattgaattaaaattctcaccattgtttggttgtggtcattactttgcagccttcagtccaattgatcaatgcaaggtggaaggaatcaaagcaaagcaaaggaatgaatacaggaagatagtgtttgtgagggtatcacacgaggaatttttcctttcttctctcaccagatgttgaaattaaattagatgaagaaggatttgtattgccatccacagctaatgaagatatccataaaaggtacaggaaaatgttgtgtttttcacattacaagactcgttgaggctaataagcagcrgtatctttttctcaagaargtgaaaaaaatagatatgattctggaaattaaaatactacatttcagaataccatgttgggaaattccttgtaatattttataaacattaatattaataagatcaaattcatgattcatttgaaaataatattggcacatagtaatagmcaaatcccaaataaactttggcaactaaaatatataataaatattttggattatttaaaaaattaagtatttttctccttttttatttttcaggatagcactgtgtattgatggtccaaaaaggttttgctccaatagcaaacacttactggggaaagaagctattaaacaaagacacctacagttactcggttatcaagttgttcaggtacggtttcacctattttttttgtttcccaaaagcaaatcctatttcaaaattatttttccaggttacttttaaaaagtaatctgaggcacagtaaaattttaaagaatttgatcaggcagcaattattgaactggacagcacaaaactcgaaatggcttgggaacccaagagggaggcttttataggaagaacacaagtacacaaagaatctacttgactggttacagttacatattcttgctgccttgtttgaactattctgtggaaagttcctagttatataattattagtttgtgagatgcttctgattggttgagcttaagttctgtttttctgtagtagaagcttckacaagaaatagcccaagttaaattttgcttaacatttgcactttaagcaaagttaaggttattttcaaggcccaactggcttggtctgctcagggatttttcaggcacaggctccattttaatttgcttttacagtactaactggtttgccagcccagtggaccaccgatcttacgtctagtttaaatcccaacgttgttaattcggcttaaatctcttgacttatattttgaaatacagaattttcagagctttgatttttcaaaagtggggcctacctatattcattataagctatgcttaaccctgcttttagaattactcaattgttggaatatatgttctgttttaatttctccttgatttaataaataaaaatgaacaagataatccattaaaataaggagcttcaccaacacttaatatttaagaccttttaaatatttcactrtagataatgtaagaaggtcttatgtgagggctcagcagtgcgtgagaatgagmgctgccctaattctctaagctgtcagtactaggcagcactgtggtttcatatctgctgacttttttctccatcttgcacatccccagctgaatattcctaaaactaatcatgccagtgtctactcagaagcttcaatgtttctttactgcttacagaataaagtaaaaacttctctacatcttaacattcaagaccctccaatggttggcctgcagccaggctgcaggcacatgattactacctggcccctctgctcccagctgagcagactctctcctttgctgcgcctcctgctctctccctcttcattccctctttgtccctgctgcgtcctccagctctctgaatacctaccttccagcagtttgtcggcatccccaccctcatctaatgaaatgctcactccctcttagcactagatcaccaacctacagcttgttttttatatttattgtgtaatttaacttgccacccaagttgtgaactcctggagaacaagagatcatgtttaattcttatttgcatattctacatattaattcatcaaatatttaccaagccccttctcagtgccaggcactgttctagacattggggatacaggatgaagaagctggttgggatatttgccttccaggagcttacattccgctgtggggaagcgtgtaagaaacaaacaaagtaaccaatagccagaggamcctcagattttgaaggatcttgaccagttttacttttctacctttacagatcccctatcatgagattgggatgctaaaatcaagacgtgaattggtggaatatttacaaagaaaactgttttctcaaaacactgttcattggttgcaagaatgaatactgacttcagaactcaaacaayggaagaacttgcatttttatggaactcagtattaaaagaaaaatataatgtgaattagccactttgcagaatatgttctagactggtgrtctgaaagcatctgtagttttccttatactatgtatacatttattgtggtaaaatttaaaattaattttaatttaatactagtgtcatagatactttttgtacatcaaacaattgatcatgtgctgtaaaggaattcaatgaataaatgttatttttaagtattttgtcatagttatctgctaaatgaaaatattttgctctttagagaccttttgttttctaacagatggaggaaattttttctctttgtgtgctgtgagtggaagtgagatttaccgtaaggaaaaggagcaatgagaaatagagtacagtgctttggatataaatattatagaattatgcagaaacaatcttctggttaatgagatatattagtatggaaacttttttttaataaatatttagagaaatggaaaagcaatttaggtaggttttttggggagctgtttgattggagggaggatcttctaaattataaatcaagaatgaattaaattgtcattagttcattgcagagccttcattgcctcatcacagtcaggttacagtttcaaggagaagaggacaagagagccgactggagtagcagagtgtattttttgaaggagggaggagggatacaattgaacctgtaacaggttgagatgataattacataaagcacttagaaaagtgccttgcacagagtaagcacacagtgcaagttagctggtgttagtctgaacgtctaccccatcatggtttttacttcactttagctttttgggtctatttacttatctttagaacaggaaatggaaactagatgagctaagatcattttttgtctccaattacaaagaaagagagaggcaatggaagcaaattgagattgagcaggagataagcacggtagattctgatgtatccgggtacccagctgaccttgccgctcatttgggacctggcttggaaggattctcacagctctctgaaatctgggtaattagatgatttacactttttcacagctcttagatgacttaaaacaggcattcctgacactgagcctaagatctgttccagatcatatcaggcctcagaaacccctttcacacctccttgcagctaatatccagtcctgtgtctttttctgcctttttagtgaactcaggttccctccctggcctctggtccaccctcactgtgctgtacacctcttcctatgactcagctaatttttggtgcgaaactcaacccagcaatgtggtgtgaggttaaaagcattcagtttaaggagcagaaagggacttaaccaattaaacagccacacgaagaggtaatgacggtctgttataaatgctatgaagaaaaatacagcacgagcgttcttcacctgtgctgttgatgtaagtccatctcatccattgcaagcttttccctgtttgctcatcagaatcagatgctcctccttctgcagttttcacttacagcctctgctgatcctgtctcatttggctctcccctaccctcttcacgtacgcattcagcagacagttctgatcacgctgggcacactcaatgctccagctctagggccaaataggaaagagcccctgcccttgaggggcttgaaacaggtgagattagtgagcaggcgatgggagtggtgaggcctccggcaccctgacacacagtcaaggctctgggaacacagagacctcatgcccacctgggcagtgagagagagcctcagagtgatttgtaagctgagttttagaaggaagagagcagggtctaggggcgcaattgtcaatggctggaacacccagtgtaaagcatacagggttggcccagggagggaggctagacctgcctctggccctgttcaaattttaatcccgaagtacatgaaaataatttaggctaatagagagatataaggttgctggtgtcactaacgagcaaatttgacaagctttgtcaaatcataaagctaagtccttttaaactgaattctcatgctgatgaattcattggtatgtctatacctgtacaaacaaaagtgatctgaatgtgtcagttgcaattacatattcaatatgatggctcttgcaactatatatttgataatatttttaataattgcataacctttctatatttgttttcaaaagtaaagcaaagcaagaaaaatgaatgaaaaaaaattgttttacttgctagcacaacccctgcagcaacagtgatagtctttgggcctatcaatagggggcagcaaagttcaggactttgggctgcagcagttgaaactagaggatctctggaggagagagtggatcctctctgagtgtgtgttgtgagtgtgtgtgtagatggcaggcaggcaggagctgtggaagagtgtggtgacagttctgcctgaacaacacaggcagtcttctttacctttccttgccttcctctatgtgaggaatgtgcgtcgcttgggtacatgtggacacttgaaagatatttgatagaattctgggaaaacggaagcagtcagttcctcctaaaaaaaaaataaataaaattaaaaaaaaaaaaaagtatacctaccagaagatgatgtgcgcaaatccagagaggggtcttggctcagtgaggaaccaggcaaattatccccttagggctgcgatctcccaaattgggaatgtgcccacccccatttggagtctaaatacttagtgtagatagtgaaatgagacacgtcttgtaagctgtttagcccaattcctggaaaatagtaaatactcagtgaacattgggtgcaattattgttattggtacacgtgtgttccttcattctcagttaaactttatcgtacagctcgcggtgaagggtcatgtaaggcatggtctgtaagaaggaacatggctaacttgctggtcaggacttctaggggtgccactgtgagcctttgacaactgcctttgttaattatcatcaaggacatagtgctaagaaactttgttctctaaagcctttgttgtttgaaatcagagcaataaaatggaacatctaactgttgtctatatgagctgagccacatgggccaatctgaccaatggagaagtagcttcaatatccccctcaattgcagagctctagacgtgggaattttgcatacaacgttccacatttcttttccctttgagggacctgaatcggcttcttaggtcagggttactgttaactctttggcacactaacttgctgtgcttgagtctctccagctcagcttcattaaattttacctaaattcacccctccccaaatcctacaacagccctgtctagtcctatgtttgactcgatgtctctaggctcctgtggtgtgcagtctcccctgctgcacgagtcaggaaacctgccttcatgttgatgttctccccctgttgggctccatcaaaagaaattttgccttcatccagtacttgtaatcccatcccagaaaaagcaaacatctccctcccactcccacagtctccgatacagagtgctcacagtgtgtgggtggagttgatattttgggttctaatgtttacaagaaacaatcttaataaccctactgtttttgcttgtattacaggaaattttgaacacacataagaattgaaagaaaagtataagaattgaaagaaaagctggctcagtggctcatgttgtattcccagtgctttgggaggccacggcaggaggattacttgaggccaggagctatgatcacgccactgctctccagcctgagtggcagagcaaaaccccatctctaaaaaaaaaagtataagtttgcaagttcctctattcagcatgaaaattaccataattttccaatcatgtttcatctattctttaactttttctttttttttttttccactggaatgtttctagagaaatccaagctatcatattattttatcctaaatacttcagtattcatctataattgataagctttttttctttttttatctaatcattcagccattgttacaaataacaaaattagttattattccctgtcatcatttaatgtgtagtctatattctaaatttcctgtactatctcaaaaatattttttaactgttgatgtttttgaatcaggatccaaagtccacgtatgacttttagagattctaccactgaagtctcttatgtctctaactgctactctttctcacgtagttttcatgtcattaagttattggagaaattagatcaattgccctgtagaatgtcccacactgttgatttggtgttgtctaacttgtttctatatctatctgctgcatttcctattaaaccaaagggcagatccagagacttgcttcaatttggcttgaatgccttgggaatgatgccagaatataaaagcaggcagaagaaggtgaaagactagactggcttagcctcccagcctacctctttctcccgtgctagatgcttcctgcccttgaacatcaaactccaagttcttcagctctgggactcagactggcctccttgctcctcagcttgcaggtggccgattgtaggactgatatggtttggctctacgtcccgacccaaatctccataattctcatgtgttgtgggagagacccggagggagatagcttgaatcatgggggtggttcccccatattctcgtggtagggaataagtctcatgagatctgatagttttatcaggggtttccacttttgcatcttcctcattttctcttgccgccaccatgtaaggagtgcctttcatctcctgccatgattctgaggcctccctagccatgtggaactctaagtccaattaaacctcttttcatcccagtcttgggtatgtctttatcagcagagtgaaaacgaactaatacagggaacttgtgatcacgtgagttaatactccttaataaactcccatataaaaaaatatatataatatatatctttacatagatatatatatacatcctattagttctgtcccttgagggaaccctcactaatacactatgtttaacccagccccagtgtgtgtccttactctattaatttgcctcctttgagaggagggtttttatgcttctttcatcctccccttctccggcacagaacttttgagtacgagtacagacatgaggagcctaaatgtatgactctgtgaccttgtattccactcatgtacctgggaatatataataagatcatataggaaaatacttttttaaaaagagtatttttaaaaaaggaactaaagcctcttaataatcaaaattgccaaagtctgccttgcccatggtttcatctgtctctggtaacctgccctgcatcctcagggcctcacatctcattccaccctcatctctggtggaccattccgtggggctatgactcacctcatgaaagaagcatctcacctccagtacatgcccctgtcttttgctgtcagccctagggctcctcggacaccaaggaggcaagacactccaggggagactgtgaggccctggggcagtggtcgtacaagttcaggagtcaacaactgaaggagcgagcctccaccgagcagacaggagcaagtgatgaaacatgcctccatgttgatcctctggggcaattcttcaaggcctctccaggcccctcagaaaggttcatgaccattcaccagttgccttcagcagtgacctgggtagtgcatccttggtgtctctcctgcttcttgctcctcttggtccctctctcctgttccctggaattacctcccaaataaactcaggcccttgtctcagactcaaatatttgacttcctactgtatgcctgtatgcctgacttgagccatctgtataagtttgttctcatgctgctataaagaaatacctgagactgggtaattcataaaggaaagagttttaattgtctcacagttcagtatggctggggtggcctcaggaaacttacaatcacggcagaaagcaaaggggaagcaaggcaccttcttcacaaggtggcaggaaggagaagcactgaacaaaaggggaggagccccttataaaaccatcagatcctgtgagaattcactatcacaagaacagcatgggggaaattgcccccaggattcaattatctccacttggtca

SEQ ID NO: 98042 - DNA, 22244 bp, Homo sapiens
gaggagaatgctgaattcttaccacttttgcaccactgtaaagtcacaaagtcataagtcgaaccaccataaactggggattatccgcagtccccccttatctgtgggcgatatgttccaagaccctcaggggatgactgaaatagtactgaacgctatatatacagtactatgcttttttctatacatacatacctatgattacatttaatttataaattaggcacgatgagattaaacaactaataataaaatggaacaattatagcaatatgatgtaatacagttatcaggcactgtgctcataacttttgcagtttcatgtgtggcagcaaaactagcaggtatttctttttccttcttcataatttcacagatagaagattcgttcttactacagatcttagcgacctcagcacactttattttttctttccttattataacttttacctttttcatttaaagaaagaactttatggcttctctttgccatatccaaattgctagcatgactactcttgcactttggggccattattaagtcaaataagggtgacttgaacacaagcattgcaatatcacggcagtcgatccgataacgaacagggcacttacttagtaagtgactaacgaacagggagtgtatacagcgtggaggcactagacaaagggacgattcaggttccccaggtggacagagcgggacagcacaagacttcatcacgctactcaggacagcatgcaatttaaaatttacagatggtttatttctgaaaatttccatttaatatttttggacagtggttgactgcatgtaactgaaaccacagaaagcaaaaccgagtcaggggcaggggaggggggcggctacagtaatagcctttccctgtggaccagatgttataccaaacactttcatgtgttatttcacattactgtcatagcactccacaacataggtactgttatgattcccattttatgtaagacaaatctgaggcctagaaaaataaataaataaaaagaaaaaagaaaaaaatctgagacctagagaggttaagcaatttgcctagcaggccaaacctaatatttgcaggacaggagcaagaatacagctgaatgcatacttaaaaagttataaatgaccctaatgaactattaaataaaagacaatctattctgctatgtcaataaataaaccttcacaatgacctggaagaccacattcacatttttgggcctctcagagttctgtactagaaggtggtgagaggcagagaacaggaccctagccctgccccattctctccatatctctaaatctgtgtgcctggaagggccttgtgtccacgcatgcagaggtcctaacctgtgtgctcacactttgttctaggggttctaaattgaaaaggtccctcaggtatccagcacaatgaatgacaaaagagaccaaagcacaacaaaaatcatcacattctagaataccaagagaagatcttaaaagcttccagaaaacggggtggggtggggggaaaacccataaaaagaatcaggattcagaacagcattgtatttatcaaagccagaagaaaaccagagcaatttcttcacaattatgaaagaattctatccacagccaaactactaattaagtacagtagaataaagccattttcagtgccacttaacatgtatggcagcatggtagccagccactaaggtggcctctaatgatttctacctcctggtatctgcactcttatgaagttcccgcacacactgaatatggctgacctgtgaaaccatgggatgttgcaaaattgacaatatgggacttctgtggctaggtcataaaagacattggtggtttctaccttgcccttagatcacttgttctgctgaaaaccagctgctgtatcatgaggacactcaaacagtactattgagaggtccatgtgttaaggaactggggcctcctgccaagagcctgcacaaacttgccagccggggcttctccagccctggccaagccttcatatgatttcaggctcatgagagaccccaagccagaaccacccagctaggacgctctcaaattcctaactcacagaaactgtgagatgataaatgttaattgttgttttgaggagagaggccatttctcttactgtctctgaagagaaggaagaagtaaaagctgaaaaacaacaggaatgaagtcagtggcaagaccaactgatgccacttaccaggcctgaggttaaagattaacgcccccaccctaaccacatgtgttacctatagatcacttgctcaatctatcacaaccctttcacgtggacccccttagagttataagcccttaaaagggccaggaactttttctttggagagcttggttcttgagacacaactctgccaacgctcctggccgaataaagtctcttccttctttaacctggtgtctgacaggttttatctgcagcttgtcctgctacagttttaagccattaagtttgggaataatttgttacacaacaaaagacaactaatacagacctactgggaggggaggagccacagtattttgcagttcttccaatcaggaggtgaagtctacagtctagctctccactctagaatttggatttggctgatgggtcattatagaaagattatagatgtaaggcttaaaaagtgcttgtgctggcagggcgcagtggctcatgcctgtaatcctagcactttgggaggccgaggtgggcagatcacctgaggtcagaagtttgagaccagcctgcccaacatggtgaaaccccatctctactaaaaatacaaaaattagccaggcgtggtggcaggcgcctgtaatcccagctactcggaaggctgaggcaggagaatcgcttgaacccgggagggggaggttgcagtgagcggagattgtgccactgcactccagcttaggtgacagagcaagactccatctcaaaaaaaaaaaaaaaaaaaaaagtgcttgtgcaattgagtcttgccctctcttgctcctgggaactctgcaattatcaccatgtaatttagctaggcttgtctgctggagacacgtggtcccatcatcccagctaacagccagcatcaagcagacgagagtgagaccatcccaaactttccagcccaagctgaactggcccagaaaagctaatccacaggatcatgcgaattaatcaatgtttgttgtttaaagctatcaaagttttagggtaatctgttacacagcataagctaattgatacagcatatttactttgtgtgcacctcccgcctcaacctccccaccctaaccaggaaactactgatgtgttacaagaacactacaggatgtgttcaaagcctggttacctcctaactttacctagtctcagacaagttagtttgcctctttcagcctcagttttcctcatcttcaaattggagataacagtaggtaatagcacctagctctcttttttttttttttgagatggagtctcgctctgtcgctcaggctggagtgcagtggcacaatctcggctcactgcaacctctgcctcctgggttcaagcgattctcctgcctcagcctcccgagtagctgggattacaggcacacgctacgatgcctggctaatttttctatttttagtagagacggggtttcaccatgctggccaggctggtctcaaactcctgacctcaagtgatctacccgcctcggcctcccaaagtgttacaggtgtgagccaccacacctggctgtacctagctcttaaagttcatgtgacaattaattgagatgaactacataatgtgcttagcacacagtgctcaaataaatcattaatgaaggcaacaggaaaaagccaaaatgagtagatctccggggtaaggcctgagttggttcttcaaaaggacactcttaccaaagaaaggctaccaagtatatcagtcaagtaaacatttactgtttgccacattccaggtcccttacctgaaactgtgacctaaaagcaggaataattcacggcactgagctattttgaaacagaaccaagcttgcttattgcacaagtaactaaaataggacatcaaaatatttttcttgtttttatttttttgagacagtcttgctctgacacccaggttggagtgcagtggtatgattacagctcactacagcctcaccctcccaggctcaggagatccttccacttcagcctcccaaatagctgggaccacaggcatgagccaccatgctgggctaatatttttaattatttttgtaaagatggggtctccctatgttgcccaggctagtctcaaactcctgggctcaagtgatcctcccaccttggcctcccaaaagtgctgagattacaggcatgaggcactgcatgtggcccagaaaatatttctgaatggaacttgaaaaaatggatattttggtctatacttcaccagccccactgagcactccagagccagatgtgaagggaagagggtagccagggtatcccataactctctttctgtatcctgtcttttccccaccagggagtaggaaaacattctatcctgaaaacaagattatttcacctctaaacagtgacttttaattattttgatctcaacccacaatatgaaaaacacatcatattgtgtctgaatacaaactcaaaactgaaacaaaagtttcatcaattgagacttgaaatgtgtgatacattctgggtttttttttttttgtattctattttttttttaaatgttgatcacaattctctataaacggattttaaaacctattgacaggccacaaccagctgttcgaaaaaaagtactttgaaatatcacatgggggaggaaacgcagagatcatctagtccaatcccttcacttcacagggggtaaactgagtctcagaagatcaagtcacttgcccaaggccacgcagctagtaagttgctgtggttggatttgaccgtaataaccatcggctactgaatgcccatcatgtgtcagccatttgctgagttttttctttttttttctttttgagacagagtcttgctctgtcgccaggctggagtgcagtggcgcgatgtcggctcactgcaacctctgcctcccgggttcaagcgattctcctgcttcagcctcccgagtagctgggactacaggctcgcgccaccacgcctagctaatttttgtatttttagtagagacggggtttcatcatgttggctaggatggtctcgatcttttgacctcgtgatccgcccgcctcggcctcccaaagtgctgggattacaggcgtgagccaccgcgcccggcctgctgagttctttaattgcattatttcatttaatactcactgtgatcctatgaaacagatactattctttccaccttacagacggggaaacggagtctcagaataggggaaatgacttaaggtgtcacaatggccagtagcagacccaggagtagtctttaggtctggccgtgcacaaagccccatgctctcaagctgtaaccccgctatcaagaaagtggttatgcaagtgggcctgtgagctctcaacgtctaagccgtgcgcatgtgagacagcgataagctcgcgttctccagtctccagggccttatcattcctcacgctttccttcatcggctcgcaaagaaacgtggcgatcaaggaagacagcgaaggctccatcctcgtcgggggaggataattcgaatctcagcctgtgagtttactcagcacacctgtttaatctcttggtccttcagtttccacacctaggaagctggaacagcagcagcatccagcgccaggactggagtcatatacgaactctggcacctgggaggcgcgcgtcctacgtcagttccgctcgaccccacccccccccccccccgccttctccccacgcgcatgcgccgcgcagcggcgctttttacgacgcggcaggcgcggcgcgcttagttgccggagctgaacggcgcggagctggtctgaggcgagccgagccgagcgagcgcggcggtggggccgagaggacgcgcaggtggcggcgttgccatgtcgcacggtcacagccacggcgggggtggctgccgctgcgccgccgaacgggaggagccgcccgagcagcgcggcctggcctacggcctgtacctgcgcatcgacctggagcggctgcaatgccttaacgagagccgcgagggcagcggccgcggcgtcttcaagccgtgggaggagcggaccgaccgctccaaggtgggccgcctggggcttggggcgggcggggcagggtgcgtgtggggcctcgggccgtcggtctactcatttctgatgttaagaataacgacagcctggttgccaagcgcttttccgtgcctgtctcctgccagctctttgggaggcgagcagcgttgtctccccattttgcatatagggaaactgaggcctagagggaacggggacagttttgtcaagctacacagcctaacgctctattccagggctgtgtgggctagagaggatggtcgtgagggccgttggaccattggtgctaatggctgcctcatcatattacctggtgaagaygagcctagggagatgaaaggtggttcccatatagagcaaatgttctttacattgtggggtcgcaggcccctttgctatctgtttgaaagcagtggaccttcttctcagaaaaatgcacataaacacctgcctttcagttcacacttcagaaggctcttcgaccctggaaattcattcatgggctttttgttaagaaccttccagttgggtggcctgtggctgttatgacactggataagactggttagcttcaagttaataagtcttggaaaaccaagggagagtgactcttcccattgcaccccagttgtagagcagggtgggagatgcctgaaattgtaggctctcagcaaatatttgttgctttctcctcccccctccccatcccctccagtttgttgaaagtgatgcagatgaagagcttctgtttaatattccgtaagtatctccttggtgcctacctcaggctaaataggctgtacccagttgcctcagatggattcattcactggtgtcaagagcacacatttgcttctagaaatgggataaattactttggtgggtttgaggaggaaagcatcatagctttcttggtgcagactggaaacagatgtatttgtagaacaataactgagaaattgaggtagatttcttagaattgtagaatgctagaggtagacaggatcttagaaattayctagtacaagttgacagatgagtaaactgaagcccatacaggggaagggtcttgcccagggtcacacaactaaacaggtattcaaactcaggtttgacaaccttctcttttgcattctggcagatttacgggcaatgtcaagctcaaaggcatcattataatgggagaggatgatgactcacacccctctgagatgagactgtaagtggcaaaggcttaggccctcaaaggagctcctaattctctttttctggtaacattttattccagaatagtatcatttttcttcttaccgggtttaatatttccccttttaaaatatcttggtcctgttctcattctgcattggaatacatatatttcttcctgaattaatgacttttttagattaagcatctttaggcccaacagcgtgtctcatatttcaaagtgcttactatgacatgattcattcagagagcattgtgtaaatgtcacttgttgatgactctgcagttttcttaataactagctgcagatctcatatgatctttatggattctaggggttagcttcaacatttttccttgctatttcatacagtaatgatcttatgtgttttgttgacatggaattgctccacctgactttgcgtggcatttagttagcaaagttgtgtatacctcttgcaacactgaatcttttgccaccagagctagtaccctttttgacaacttaccttattccagaacagccttcctaaaagaaggggaaaactgctttctgagtgctggagaaacatataagaagaactttacatttaaaaaattcagtccgggtgcagtagcttatctcacaaaaccaataaaagatgatatataggctgggcacagtggcttacacttgtaatcccagcactttgggaggctgaggcgggcggatcacctgaggttcgagaccagcctggccaacctggtaaaaccccgtctctactaaaaawacaaaaattagctgggcctggtggtgcgtgcctgtaatcccagctactagggagggtgaggcaggagaattgcttgaacctgggaggcggaggttgcagcgagccgagatctcgccactgcactccagcctggatgacagaatgagaccccatctcaaaagtaataataaaaacaaataaataaaaaattcaaatcctaaaggccgagcatggtggttcacacctgtaatcccagcactttgggatgccgagactggttaggagttcaagaccagcctgaccaagatgctgaaaccccgtctctactaaaaatacaaaaattagccgggcatggtggcacacgcctgtaatcccagctacttgggaggctgaggcaggagaatcgcttgaacccaggtggcagaggttgcagtgagccaggatcgtgccactgcactccagtctgggtgacagagcaagactccatctcaaaagaaaaaaataattcaaatcccagcactttgggaggccgaggcgggcggatcacttgaggccaggagttcaagatcatcctggtcaacatggcgaaaccctgtctctactaaaaatacaaaaattagctgggtgcggtggcacaggcctgtaatcctagctactggagaagctgaagcatgagaatcacttgaaccgcggaggtgcaggttgcagtgagccaagattgcaccactgcattccagcctgggcaacagagtgagactctgtctcaaaaaaaaaaaaaaaaattcatctgaaaaattgattaaaggacttccagagatttaagatatattatagttgagtattagaaacatgaatttgaaagcaaatccatgtatttaatcattttaaggaaataatacctttgatgcttttggagactcatttacttggaagttgatggactgacctgagaatattaggcatccatgctgcattgtgatttagagtgtgggatctggagtaaactgggttcaaataatggctgtaccacttgttagcttcatgactttgagaccttatcttctctatgcctggattttctatatctaacatgggaatggtaacagtgcatacatacctcataagattgtggagaggcttaaatgagataaaacatgtaaagagcttagattaggtctggaacacagtaagtgtccaattttgggtgaacagatacgaatacatagccctcagttctaagcacactacatatattatactttatcaaatgtaagatgtcattgattgtaaaatgtaccattatattcaattaatacagaaaaaatgctattgaactatgacatgtcattgacacatccagaaaaattagattgagagtattaaatcagggaagtttgaacacagatgaggtgttacatgttactaaagaattaccattcagccaggcgcagtggcttacacctataatcccagcactttgggaagccgaggcaggcggattacctgaggtcaggagttcaagaccagcctggccaacatggtgaaaccctgtctctactaaaaacacaagaattagccagtcatggtggcagtcgcctgtcatcccagctattcgggaggctgaggcaggagaatcacttgaacccgggaggcggaggttgcagtgagccaagattactccactgcactccaacatgtgtgacagtgcaagactctgtctcaaaagaaaaaaaaaaaagaattaccactgggctgggcacagtggctcatgcctcaatcccagcactttggggaggccgaggcgaaaggatcacttgagcctaggaattaaaggttatggtgaattaagatcgtaagatcatatactggaccccagcctgggcaacagagcaaggcttaaaaaaaaattatttatatagtttgagatagggccttactttgtcacctaggctggagtgcagtagtgtgatcatagctcactgcagcctcgacctcctcagttcaagcaatcctcccaccgcagcctcccaagcagctgggaatacagacgtgtgccaccacgcccagctaatttatgtatttttttgcagagatggggttttgttatgttgcccaggctggtcttgaactcctgggatcaagcaggctgcccacctcagcctcccagtgtgctgagattacaggagctagccactgcacccagccaaaaaaaaatttaaaaaagtgaattgctgttaattttgttatctgttgatattgtcaattattgtaaaatggtattaaatatatgtattttattttattttattttatttttgagacagagtctcactgtgtcgcccaggctggagtgcagtggcgcgatctcggctcactgcaagctccgcctcctgggttcacgccattctcccatctcagcctcctgagtagcggggactacaggtgcccgccaccatgtctggctaattttttgtattttttagtagagatagagtttcactgtgttagcaaggatggtctcgatctcctgaccttgtgatccacccacctcagcctcccgaagtgctgggatcacaggcacatgtgtgtatatatatatgtatatctacatatatacgcatatatatatacacatatatgtgtatatatacatatatacgcatatatatatacacatatatgtgtatatatacatatatacgcwtatatacacatatatatgcgtatatatacktgtgtgtgtgtgtgtgtgtattttttgtttttttaagacggcgttctgctctgttgcctaggcttgagtgcagtggcccaatcttggctcactgcaacctccgcctcctggggtcaagcgattctcttgcttcagcctcctgagtagctgggattacaggtacacaccaccaggcctggctaattttttttttatttttagtagagacagggtttcgccatgttgaccaggcagctctcgaactcctgacctcaagtgatccgcctgcctccgcctcccaaagtgctgggattacaggcgtgagccaccacgcctggcccatactggaatatttataggtgaaatgatgtgtctgggattgctttaaaatattgagcttaagcaaaatcaggctgataggcaagatcaacaaaatgttgatcatcgaagatgagtgaaaagtatgtggagattcattatgtaatctctgcttttgtgtaagtttgaacttttccatagtaaagttttttcaatatatgcgttacttagaatcgattcaatttcatctccataccaaccgtgtggaatatgtactattaccattcccattttacagatgaggaaacagaggttaaatcaggtgcccaaatttactcagctggtaagtgacagagccaggcttgaatcctagaaagtctagctctagattttaactacagcgctatactgcttctcattatgccgctcataaatgtttactattattattattctgtggtgcatcattcttagaaacactttgaagtaaacatttgctttcttttttttttttttttttttttttgagacggagtctcgctctgttgcccaggctggagtgcagtggcgccatctcggctcactccaagttccgcttcccaggttcatgccattctcctgcctcagcctcccaagtagctgggactacaggcgcctgccaccacgcccggctaattttttgtatttttagtagagacggggtttcaccgtgttagccaggatggtctccatctcctgacctcatgatctgcccgcctcggcctcccaaagtgctgggattacaggtgtgagccactgcgcccggcggctttcttaaattacatgcattttgccccagctaatatcgaggcctcttctgtgtgggtgtgtcaataaaacaccctggaattggtggggacatgtggcttagtctttgggaatttgtgggttatagagacagctgctttttagattactctttgaaaaacattttcttctctagcagtttactttttatttattctgagacagagtctctctgtcacccaggctggagtacagtggcgtgatcttggctcattgcaccctctctagcggtttggatgtgagattgcagtcttttgtgatctttcaaaatggaaatcctcatgttataaatgttttaagaactgtaaggtgactgagtgtatggcgtggtttttggacacaaaaaaatgcttgagcattgggttacctgatcttttatctcttaactgtgtgtaatatgtttctgccaaagtatgtatttttcccatgagtaagctgttttatttaataacatcctcagtttggtctgaatgtgctgagttgtttattttctccatgcatttgctgcatgtgacctagtttgagccgtctctttgtgtattgcttctcatgtgatattaacccactcaaagatgccatggggttatgttgcagatctcagctctttttttgttggattaaagatatttgtaggctagacgcggtggctcatgcctgtaattccagcactttcggagaccgacgtaggcggatcacctgaggttgggagttagagaccagcattgccaacatggtgaaaccctgtctttactaaaagtaccaaaatttgccgggcatggtggcgtacgcctgtagtcccagctactcaggaggctgaggcatgagagtcacttgaacccgggaggtggaggttgcagtgagctgagattgtaccattgcactccagcctgggtgacacagtgagactctgtctcaaaaaaaaaaaaaaaaaagatatttggagatacttgtataaaatgtcatttctaaaatatgacccccaaattcagtctcctattgatagaaccaaagccatttaagcagtcagtagaaaattttgaaaacctgaaacgtgataatgcacatttcttgacttttctttcctttcctttctcaggtacaagaatattccacagatgtcctttgatgatacagaaagggagccagatcagacctttagtctgaaccgggatcttacaggagaattagagtatgctacaaagtaagcactgggcctgtcttccattctctatggcttcttatagggcttgccatttatttttggccagtctcctgctctcttagcattggaaatgagttaaaacagtggaggagacttgatctttggcttggtcagtttttggcagagattcagtgcaagccacagacttgttaacttgcaagcaattggcagatctgaatgaactcctagggtggttttaggaamgatgtgtctcccattagtttaggttaacactaaatgtgctttagaatccctgctgggttatgcagcatttctcattcctgttccttgagggcaggagcagtgtttatccctactgccttggacaggatctggcaggtgctcagtaaatggtcattgaattaattgcctgtccaaaggagaaggaagaactcaggagctctgmctttgcctggcttttacaagctggagctgaattgttgtttcacatggtggtgagatactcattgaactataattcataccttctttccctattcctgtcatcctctagaatttctcgtttttcaaatgtctatcatctctcaattcatatttcaaaaaacttcggagcagatacgacaaaggtcttttatattggcctgagaggagagtggactgaggtaagatggggttggaaaggttttcccctcatgtctacatatctgcacactgtggtgatgggagcttccagggaagggaaaagagcaagtgtcataattactcccagtttattatttttcttggttttatcagtataaacttttcgtctcatttgagaaactacaggtatttttaagggggttgaaactgttatttttatataaataatatatataatatatatatatatatctcagctcactgcgacctccgcctcccaggttcaagtgattctcctgcctcagccccccaagtagctgggattacaggtgcccactcccacgcctggctaatttttttgtatttttagtagagacagggtttcaccatgttggccaggctggtctcgaactcctgacctcaggtgatctgcccatctcagcctcccaaaatgttgggattacaggtgtgagccaccttgcccagcctgaaattgtcatttatattaattcacagttttctactttcaaatgctttcattgagtatttttgataatcttttctattcatgaaccagggataagataataccatagacaagttcctattctcatggtacccccattatagtagggagactgaatcttcaaagttacagggtgaatcaatgataatgatctttgcagctttctggagttaaaaagtatcaaaattgggagatattagatgatgacatctaagtattaaaataaggagatattaaatgatgactyctmgaaatgaacctgaataaggactaccgcaatgtgtgtggtgtgggaaaggacagttcttttaatggctggctgacccagcctcaattttcttgcagcttcgccgacacgaggtgaccatctgcaattacgaakcatctgccaacccagcagaccayagggtccatcaggttaccccacagacacactttatttcctaagggctggccaaggctcccatagaggcgctgtgtcagtgaagatgtacgactacctgttgggaaggacaaagggatgaggctccagagagagttggctgccacagcctctgccaagctttgtctttggggcttgctgcagaaacctggcctacggaagatacgacaccactgggagggttgtgtaggtgccaggggaccatcgtggttctctagggcgctgtggaaattgggtcttgggctgggtggcatctggcagtcatggrtaacacttgcttttccagttaatgtggccatgtgattccaagtgtcatgttgctttgtggcaagattgttgtgtgacttgtttttttgtttttgtttttktttttttaaaggaaactatttgtgggctataggaaactttctgatgcctccggattgtgttagtagtagccatcaggagggtctccaactaaaacacttgttcytgcttgctcctttcccctctcattgttcagcattcttgtcaagttgcccagcttggagttgtctgtcacgcacatgtgtcctgtggttatagctagaaggacaggagtctcctgctgatgcgtgatagcttaagcttggggagaaggtcttttccactgcctagctaagcagtctggggagagcatggggatcatttctatgtgtgtgggtaatctggtcagtaagattgagacttagttaagattccccttggaaattccttaatgtttattagcttctaactagtgttgtaagtccgatgccagaatttggagatttgagttcttcttttcatggcttttattcactgtgactaataagcttcctaataaatccttgccagacttaatgtttgtattttcttttgagttcttgatagccactgatgcaactttcatttcatggggaactgtactgaactttgaaattttttgttgttgttttggactaggtagattataggaagtgccacaattaaatcaagactggagccgggcgcggtggctcacgcctgtaatcccagcactttgggaggccgaggtgggcggatcacgaggtcaggagatcgagaccacggtgaaaccgtctctaccaaaaatacaaaaaattagccgggtgcggtggcgggagcctgtagtcccagctactcaggaggctgaggcaggagaatggcatgaacccgggaagcggagcttgcagtgacctgagattgcaccactgcactccagcctgggtgacagagtgagactccgtctcaaaaaaaaaaaaaaaaaaaatcaagactggatcagtttctccaggaatggtcaagcttaattttgtacagtaggccaaaaacactcctacacccatatatagtaaagaagaaggtggggttgaaaacctgtatttcacagaaattaactgggcatggtggcgtgcacctgtagtcccagccacttgggaggctgaggtgggaggatcactggagcccaggaggtcgaggctacagtaagccatgattgcgccactgcaccccagcctgaggcaacagagtgagaccttgtctcaaaacaacaacaacaaaaccctatatttcattttgcacaaaaggaagtgatttgtagaatgacatttacaaaaataagggagaacagattttggagctcatcagaagaaatgagggtgaggaaagtaattgagcagctcatgtggtctccaggtagaccaaagactttggacttaaattttgaaagtcagtttagcaattgaagagaatgtaagtatctaaaaaggggatttgatatggtcagtattctctcccttgcagaaaacaggaacaggtaataaagggaattagtgttgaatctgatccttttgggagaattcctctgaggcattggcccatgctgttgtttggaggatatagccactgtttctccagcctgtcctaggaaaggtctgctaccaccaaaccttgttggccctcaaaatttctaaaatgcagcctgaaataaaccagaatgcaaatgctgttcttgaaaagcatgaagggtcctattcactcagccacagcctctttatttcagttggatcattttttggagttaaaagaagggctatgtttaaatttggagtagggggaaaaataaagttaaaaatcttagagcagactagcccttcactaattccactaattaaagcattaatcacagctcctgggactgagcctctgaatttgaagcttcactctgaagaatttgttttaagtgtcatggtgtctcaggtgatcgaggttgcaggaggaactgttcattcttccataagtggggacattaccctccattttcttttgacattcagtcctgggtccttggcttgtggtggtcccataggctcaaaggtttcctgccccgaatcctggtattgtaggctccctgacctgttgagtacttaggaccaaagtgcctctgggcctgggggaaagtgctttgttgagcttccaactttgtactgttttctttttcttttctttcttttttttttttttttttttttgagacagagtctcgctttgttgcccaggctggagtgtagtggcactatcttggctcactgcaagctccgcctcccgggttcacgccattctcctgcctcagcctccccccgagtagctaggactacaggcgcccgccacagcgccaggctaattttttgtatttttagtagagacagggtttcaccgtgttagccaggatggtctcgatctcctgacctcgtgatccgcccgcctcagcctcccaaagtgctgggattacaggagtgagccaccgcgcctggctgtactgttttctttctgttcaaagaaaacactagtataggttaggctgggagagtgagtcctaagcggctgagggtcaagtgtgactcatttcctatttgcagatccccacacattctcagggacatgctccttcaactcagtttgcctgccttctgacttttctgtggtccctgatacctatttccacttcagcttgatggcagcgttttgtgcactgtctgcatgacattgcttgtgaagggcagcgctaacactgccagtgcctgtccagctctcctgatacggcctttgtatttttcctaggtccttttttgcgtgattaacacctcacgctgtgattttactgtataaaccatgttcacacaacctcatttaagcctaccaacaaagctgtgaaggaggcagggtggttattaccattttatatatcaggaagcagatccagagaggcagaatttaaatggaatcccgaggttgctgtttacatgccttccttgagcctcagtttccccatcttcaaggctggagaactagatgatctgtaaggtctcttcggttcagagtgtgtcattccattcatgatcctggaatagggcatgaaagccagtggcagacacccgaggccttaagaggtgtgtcccatgaggatgggaaggtggtaaagtttatgcaaacaatagtgtgagggatgcctctccttccggtcggccctcctccaggaggcgcatgggtggtggtagcaagtgggagtcttgggtgccctgtctcgaatctacaaggtgggagcgggtgagaacccagcgactgcgcggctgaatgacagggagtagccccgccgcctccaacatggcagcttctatccagcgaagccgggtccccgcttccgggttccgtactgtcggccaggctacttccggcagcgcgatggctgggttcccgggactcgaacggaagttccggcgggggcggccgagggggaagagtgtgtctgcgggagaaagaggagaatcgcccaagcggcctcggaagtcccagggagtggaggtacccagccggcggctgcggaggatgggcgtgtagggggaggtcggcctcgggagggtcccggagagcggggagggggaaccgtgatggggggaatgggggtggggagtgaggtgcgaaggcgctgtccagtcttggggacttcgggagtggagcggggctaggcaagggggtgtctgagtataaagagacagacttcagggtcggaaatagaagagcccattgtggggcgggggcttccccagagtcaaaggtacaaagctttattgtgggcaggtgggagtcctgggtcagggtagaaaatttcactgggtagggtgacctttggtcagaacagaagttcccattgtggggagcgggagatcctgggtcagggtggaagttctcaaggtgtatagagagagacaggtcagggggaaggcacccctccgaggagggagcctgggcgggaggtgcaagtccccacggtggagaaggaagggaatcgcagctcagggcaggaggtgcattccccatgggaagaggaaccccgggtcacaggtgaacgatcccattgtggggagctgccctcaggggtcagagatggaaggtgaggccagttgggaggggtgggcaggcacttgaggcaggtagtggaagcttccggcgagtttggaggacgccgaggatggggaggggccagccagcctgacattcttttgtgtgtttgggagtcccagagcgtggtcaagccagggctcgtttgcagtcagtggcagcagcagcaggtagctccgtttaggggggcgtggagcaccagtttgggggtgggtggagttcttacgctttctggggacatgggcagccccctgggggtctgggaatggatgggccagaaactgctgtgaaggctggatgggggctgggtggggggaggttgagatgggggttggaggcggcactgagtaggggatggaagctcctttccctggcacttttctctccatttcccatagggcccggagttggggaggcagggacccagggatgattggagaggagggggaaggcactcacccctgaggagttagagggggaatgaagcaggcgtgccgctgcctcccctctgccccctgccctacagtccctatgccctgcctctgcctgtctccagcaagctcaggtcctgtggttgggccagaaccagagacacatgttctgggccactagggaggctgtctctgcctttcagccctggaactgaggcagacttcttctcctgtgccctgggacttcttgcttgactattctttgtgcccaggacagaacctgggtgctgtgtggggctgatggcctggtggcctcttgggccaggagtgtgtcctgtgcctggttttgctcttgaccgccgccccgatgtatgcaggcccccgccgtggagccgtgtggtgtatgtgtggtaacaccatgtctgtgcccctgctcaccgatgctgccaccgtgtctggagctgagcgggaaacggccgcggtaagggtcccctttcacccacggccagacactgtgggagcagctggaggaccggctggagggggtgtgggaaaatggaggtggcagtgatgagcagggagtatcctgaggccagcaggctcggggtagtaacctgtttggctgctacctgggttcccccaggtccttgggggtgggggaggggtgggcagaagttggaggacctaggggaagccttcctgtctccccatttcccatccttttccaggttatttttttacatggacttggagacacagggtaagtgactgaggaggggtgctccttaaggaggggtcctggcccagcagcggactggagaggccttctcttcctaccacatcggagccttttctcccgtccctcctacaggcacagctgggctgacgccctctccaccatccggctccctcacgtcaagtacatctgtccccatgcgtgagtgtcaccccagcaagggaggggctgaggctggggatcatctgggggtggtcctgtcatcccaggcctgttctctcctgtcagttgcatcctggggcttgggctcagggcagtcagaagtggcattttcagcctgagctcctgtggagcccccaggagtggggtccagcaccagcccccagccctagggcctcctagacctgagctctcctagaacccacacctccctttgccccttccccaagtactcaccgactacctgggaccccgtcacaccaagcgctgggctctgcttctccattactggcgctttgccccaaccacagcctccagccccacgtggcaggttgcctggcaacaccttaaacacaggccctgcctgctgggaggggccaccaggggcggcgcggccccactccgggctctgagctctggcctcctcattcctcctgagcatgatgggccctctggctctctttccccaggcctaggatccctgtgaccctcaacatgaagatggtgatgccctcctggtgagtttgggagtgggggtgggcagggggacgaggacacttgggctgagggagccacagggggctggctggggttttctatagctgccagtgcctctactcccaaggtttgacctgatggggctgagtccagatgccccagaggacgaggctggcatcaagaaggcagcagagaacagtaagaccccagcccctcctccacatcctccttcccctgccccccaggaaagcgctgggcggttcctcagcctagctcccttattgggccccttggcagcttccctctacccactcatgccccctcccccagtcaaggccttgattgagcatgaaatgaagaacgggatccctgccaatcgaatcgtcctgggaggcttttcacaggtgaggggagaggggtgggggggatttagggggtaggggtggccggtgagtgagctgtgccctcatgacccctctctctcctccctccagggcggggccctgtccctctacacggccctcacctgcccccaccctctggctggcatcgtggcgttgagctgctggctgcctctgcaccgggccttcccccaggtgaatgtccccactgacccccccgccctttgtgtctgcatcctcgtggcttggggactgctgcagcactagctttgccctgagtcctgtccggcctccaggcagctaatggcagtgccaaggacctggccatactccagtgccatggggagctggaccccatggtgcccgtacggtttggggccctgacggctgagaagctccggtctgttgtcacacctgccagggtccagttcaagacatacccgggtgtcatgcacagctcctgtcctcaggtcagtggggggaccatttcccactcccacttctct

SEQ ID NO: 98043 - DNA, 28228 bp, Homo sapiens
gcaggtgttgttcagtacaagcttgaaagcctgagaaccatcatagcagaaggtataagtctcagtccaaagtcagcaaaagactggggtcaggaagaagggattaattctcccttcctttgttttttgttctactcagccttcaatggaccctcaatcagctttagtgcatccactaattcaaatattaacctcattcagaaataccctcacagacagcccctgaagtagtgcccacggtcaacctatgatctagtcaagttgatgtataaaattaaacataacaattaaacatcacactgggtttgggaactgaacaccctgtctagtctaactcatgccctattgatctacaataaattttaaccttgaatacttgttcgtgtttcacactgttgacaagagaggacagaggtcaggatgccctgcctccttcctcagtatcattctttcagatcctcttcttgctactgttcatgacttctatgtgaacaccccctaaaacagggtgagaaggatgacagaggtggtgaaaatacgaaactaggccccagaacctatttgtgggtgaagctggaccccaagacatctatccttatgaaggttttacttgagactccaacactagcttattcattagtcctttaaattaggagtcatctaagctcccatcacaaagcaaatttcaacaaatagattttccagaaactgttacaacaaagagggtggggtcaataccttgtctcttcatctctagccacagtaacattcatccattttccaacctattgtctcttcatccattaggactttgtagttttcaagaaaaacggtgaaagccaaactaattatctttaacaagtgaataattatatacacatagcccactgatttgaattgtttaaaatcaattctcttttctgggagaaacaattttaaaaagtattatcttcatgtatttacacacttaagaatttagtggtctgaggataaaatagattcacttataagtcatgcttttgattttgattatactgcatttcatttattcattcatttacatattcaaaaatatttataaaatattcatccagtgccagggactgaatttggtgctgatacacagaggagaacaagactttgccccttgcgtttttaagtgaaaggtgatagatgtgaagtaaataatggtcacacacacttttttaatggtaaaaaaataaaggtataggatactgtgagagaggaaaacatgagggtctaaataagattggggtgtatactatttgaggagaaaggcagacaaggaaggtagagtcaaagatgcggcacagatcctgcagggccttgtagatgggaagttactgaaaggttgtaagcaagtagtaaaataacctgaactgtctttaaaggattattcagtctgtggtagtgcaagcagatgtctggatatgccaaaagtgaaagccgaagtaagtctttccagtggccctaatggtcctaacagatctacaatctcacacttccactcgcttccctctctggcttttttccttctccttctccttctccttttatttatttatttatttatttgagacagggtcttgctctgtcacccagaccgaagtgcagtggtacacttcctggctcactgcagcctcaacctcccaagctcaagtgatcctcccacttcagcctcccaagcagctgggactacagctatgtgccactatgctcggctaattcttttgcattttttttttttatgaagatggggtttcatcatgttgcccaggctggtctcaaactcctgggctcaagcaatctacatgcctcagcctcccaaagtgttgggattacaggtgtgagccacctggcccagctttccctattttattctttttagccacactggactccttgcagatgcttgagcacatcaggctgagtaggcctatcttctgtgcacttgattcatctgcctggaatgttctcttatcatatatttttgaaaccactgaagggaggaagctccttggacctgctctctgggaaactgtgatgcagagatctggctgacttctctgatgtatagcctgagtgggaagtaaaaactttccaaggttaagcacggtgatcttggatttgttaccttagtgtaaaactagccaatcttgacaaataaataccatagttaacaaagcagacaaaaaatattaatttttaataaaaagctttagtctttaaatatttttcaatctgttaatttaaaatattgtcaagtttaattttcattttcttgactactggtaagttccagcatgttgtcctgtgtgtttttgccttttgacttttattaacaacgaattgctttttacatttgatcttattttccttcagtttgtcttttggctttgttaattatcattattgttgttgtgcagctttttacaaaaatctatgcagtttaatttattgatattttcccttttggtttctaaatgccataatatggttataaaaggtttcctcacgtcaagattattttatatatactcttctaatgcttttgttccacttttttagtttaacttttgtttaaccatgataaatgaaacaataatagttcaactttttaaatttgtaaagtacttattttagtataagtgaattagaatccagccttattttttttcagtttccacacaaagcattgacagccttatttttttaatgatccattttaaatttactatgtttatcccctaataaattttcatatgcatacttgaatctagctgagttaattagtgtaatagtatctttcagacaaacttgggaggttaagaggaagattaggtttgggagacaagatgacaataaattaatttaatctattttagaatttcacataagtaaaatcatactcttttgtatttagtttcttttactcatcataatgactttgagattcatttacatagttcatttctttgtatagctaagtaatattccacagtatagatacaccactatttgtttacccattcatctgctgatggatgtttatgttgtttccagttttaatctgttttgaattaagctgctatgaatattcttgtgtgagtctttataaatatatgttttatttctcttgggtaagcacctagaagtagaattactgggtcatggaataggtgtatgttttttgtttgtttgtttgtttgtttgtttgtttttgagatggagtctctctctgtcacccaggcgtgagtgcagtggcacaatctcggctcactgcaacctacgcctcccgggttcaagcgattctcctgcctcagcctcctgagtagctgggattacaggcacacgccaccacacccactaatttttgtatttttttcagtagagacggggtttcttcatgttggtcaggctggtctctcactcctgacctcatgatccacctgtcccggcctcccaaagtgctgggattacaggcatgagccactgcgcctggccagaataggtgttatgtttaactttattttattttattttcttcctttttttttcttattgttcttatttctctgaggcatacatgtaaccttataaaaactgccagttttctaaagtggttgtatcattttatactccctctagcaataaaagagcattctagtcattcaaaatgcttgttagtgaaggagttgagaatatactactccaaaatatgccacactggcattttgactattttaagttaaatatgcttaaaaaacagcaggcacaagaagatcaccgtgacctttcttctgtttcttaaaagcagatgaaattctcacatgaatgatgccctcccgtaccagaagtaaagtaacattcctatcaccaaagacaggaagttaatgccaagataattctgtaccaaccttattaaaataactgatcttctagcctcaaaaatttactttttcacaatttagtattctgtctaatttggtatttaattgcaactctaactccatctttgggtcttcacttcctttggaagggcccatgccacattaagtttgtataaaatagtcttgtatgttgatctaccttaatttaattcttaagtctagccagaaaaccctgaaaaggtggaagtaaaatttgcctcccttatattatcatttgatgctttcagtctttaactttggccattctgttaggtatgtaatggtatcttgatgtggttttaatttgcttctctaatgttgagcatctttttatgtacttatcggctattcttatatcttcctttttaaagtgttgtctgaactgggcgctgtggctcatgcctgtaatcccagcaccttggtaggctgaggcaggcggatcacttgaggtcaggagttcgagaccagcctgaccaacatggtgaaacaccgtctatactaaaaatacaaaaattagccgggtgtggtggcatacacctgtaatcctagctactcaggaggctgaggaaggagaattgcttgaacccgggaggcggaggttgcagtgagccgagatcatgtcactacattccagcctgggcagcagagcgagagtccgtcttaaaaataataaataagggccgggcgcggtggctcacgcctgtaatcccagcactttgggaggccgaggcgggtggatcatgaggtcaggagatcgagaccatcctggctaacaaggtgaaaccccgtctctactaaaaatacaaaaaattagccgggcgcggtggcgggcgcctgtagtcccagctactcgggaagctgaggcaggagaatggcgtgaacccgggaagcggagcttgcagtgagccgagattgcgccactgcagtccgcagtccggcctgggcaacagagcgagactccgtctcaaaaaagaaaaaaaaaaaaaaataataacaataataataaataaatagcgttgtatggcagatgcacctgacagcaataactttaagcataccctgagaataccctgtggtctaagaagaatgtgtgcttggagctaaggaatccgggaatggccaaggcgaatattcactccttatctgtggagctgcttgggaggctgaggctgtagaattacgtggggcccaggagttcgaggctgcagtgagctgtgatggcaccactgctctccaacgtgggtgacagagggagaccctgtcttgaaataataaaaataaataaattatgcccagttagccacttgggttccatcttgaaggactggctttttcaggttcacatttgttcacaaatgcaaacacacacacaacaattcctcataatttatattaatagatttctctgaatgcctcttagagtttaccatgcgctgtgtgctctaaatgaatgtaacattaaaagtcagatgatttttttagttcaatttgaatggcaatttttgatgttcttaaattggtacagagccataattcagaatagcggtgcaaagctcactgagcacgttcatgacccttgaaagtcttcgaaaacagattactgggcttcgctcccagagaatgatttcgtttcttaggttctgtggtgcaggcaggtttggaaatcacttatctagaagtccttaatgctttgtgaaacttaaggccgctcactccatctaccattttctcagagggcagcatagtattaatggaaatgacccgttgcattttacttcttgcgtgctgttaccaccactgccttttactctcctttgaaataattaaaagcactgggaagggaaagcactggagaattttactaaacataatctgttgcaataaggtgtaactaaataaaatgatagaaaactgtgccttttagaacaggaatcaactgcatgatctgtgtgctttccaaaagtgtggctcactcttcttttgcaaaagaaaactacaaggaatcttgacaggaagttgttgggtttttgtttttgtttttgttaagtagttagttctaccaaatagttttgcaaatagacccaggcttgactggcaattaaacatgaaacttctcattgggtattttcgagactactacggggaatcagctaccagcttactgccatgtggagaactgcacgagattccgggattggaatcaaaatgctaatttaaaaggtcaagtgaagctgctcctcacgttttggcgtgcctgcgctctctgcaggcagaagcgaacaaagacccagcaagagaaggcagaggctaagacccatcccgtatctgctctcctgaaataattctggagtcatgcctgaaatgccagaggacatggagcaggtaagaactagcaattcaagaaatgaagcattctagagtaagagatgctttaaaagcattccagtgaacgcctgctaaaaccagaattgttgtgtaaagaaaatagaaacgggtgtcattcatttccttaaaacataacctcgggacatggaagaataagccaactttagttactgacccggagaaccaggttatgaagggctcagctaagtctcactagctgacaatacagaattgcactttcatttaccattttaaatgcaattatgtatataaagtttctacataaataaggattttatctgtagtgtgttcctttccagatgttctttgtctttgtatgaattgaatctgctaacataacttttagtttcaggctgctctctttaaatgtatagacttagccaccacacgaagttgtatattgtctatgttaagaatggcgtttgattcgcatagaccctaccatcattaaagaaaatgattaaaaaccatatccaaacatatgcccctagaactgtacccaacttttacggggaaagtatcaagtcagattttcaaaagcagccaagttaaattctttytgttcctcaagactaggctgctctgagaatcagaatgctaattgcatatgcttgcccttaaacctgcttcacgttgaagaatgaagaattaattttcttttctcccatagaaaggtaagattacatcacgtgttgcgactagaaactttaaaccgaattcccagttaagagaaaaagtagtaagatgatcttggctgctcccccggccctcttcccgccctcttctttgttgtcccctgattatgcttgtttagcgctggggcagtcctcaaggattccctaaataaagccaaactratgaacagtaatagcctgtgtttaaaaaaaaaaaaatcggaacataagaaacctcaggctgtcttcgattactgttctagagaaactttatgtttacacgaataaggaaatgagtttttgttgggggttgaggaggaaggaaagtcatggtgttctgacgtggaaaacttctttaaaaggctgcttagtctttagtttgaaaataaaccaaaaaggtttaggagtcggggaaaggccctaggaaaatccagacagtggtcacgtttgtggacgacgtttagagcttgctatcctgggcacacaagaacccttggactgttcggtgcaaagttggcaaatcctacacggcctgtgccagggtttactttctgcatcaatttcacaggcgtccagcctggctgaggactttttgcggtttttaactggaagggaaataagtcggcatcagcacttagggctgcttaacttttaaaaggtggtagaacgcccagccttacacgctgctgcttaaattctcggtgctcaccaaggctgggctcgtgtggcccaatcctgcaatccccgaggcggtgtttcttaaagagtgggcttgattctggttaaacccattaagaagtcggaccccgggctcgtttcttgttctgtaattatgggtaaagtccaaggatctgcgttttgaagaggtacctaagtagttcatcttccttccccctacaactttttatttttaattagttaaaaatagttttacatttttgatatctcacacacaggttttttctttttttaagcatcccaggaagacaaatggctcagacgccaacccttttatttttattccttgtctttttctaaatctttcaaaacccccacctagagctctagagatgtgtccattatgctctacccacctccgcccccgcccccatgactttaaaatgctttttattccactttttatattgctcagtcgatcctcatgcactgcgcagtctgcaaacttgaaactcaaggcgatccacttcaatcttttcccgagtcaagaaaaaaaggaaaaaaagtagaataaaaagcactcaaataaaatctccgaaacaaaacctgaattcactgcctaaggtcagggcctttcttttgtgtgtcgctttaagcatcggcgcgtgggctgggggcagaccgcgcgtacccgccctctttctggggcgtcggcggagcgtggccaatcaacgggcgcggctatggcagcggaagccggaagcggcgagcggggtcgttctgggcctaggggaggcgggccgagggcgtctgagctgaggcccgcgtcgatcctgggttggaggaggtggcggccgctgaggctgcggcgtgaagacggcgggcatggtggggcgggagaaagagctctctatacactttgttcccgggagctgtcggctggtggaggtgagggagtcggcctgggcgtctccggtgggagcgggggcgccgagggggacgagccaccggggckcgggcggctttgcaggcgtattccgcccgggtcagagcctccggccgggagtggtctcaccgccaccctcccagccccggatccgaggggggcgccaccgagtttgtttatctcagcgcacacgggtcagtgtttttttcttccagccactgcggcaggaagcaagtaggtggaggttttactttcgagttctgtctctgctcctgaggacgaagaggtttttcagaattgtttgttttgattttggttttccccgtttattcatctttggttcgtatttctcgatcttacaagttcgtaggtttgagaaagaacaggaaaaggtgacttctcacaaataacagtgctggagatgacaacttattgaactcttaagttctcagcactatgttatgcacttgacgggcattactttaatcctccactgtgagatacttgttattgcctcattttgtagacgagaaaacgggcatagagggtgagacattggcccaggttcattccgtaaggttggagcctggaattcagatacaggtttgtgtgactgtcttgggctttgaaccactacggagtttccctgaaggaagattatggtgatgattggaagatccatctctggtgcccccckcgcccccgtcccatcctgctccattccacttaagggcctccagcattaatctgtccacagaacatatccaaccctggggataagaacactactaatgcccagaccatgtcttttggagagagtagagaatataggagatggctgtttctgttattgcaaagttttcatgcttccaaatttacttagggttttcaaatcactttggttctttgagggtaaagttaggataaatggtctattaaacctctatgttcctaggtcctccagaccgtgctgagtgcatgttacatacgtttacatttatatgtatgcatttgtatgtgtacgtgtgcatataaarcttaatctactttcacaaaaagttcagtataaaaatgaaaatagcttttcgtgttttccttcattaaaaatgaaacaacgaagagcttggcacagacttactgctctcwaaacctgtagaattaaagcttactgactcatgagaacgagaactgtctcatagttaaygttagagaagcakcctggagtggttgttgttagtaatactgtctgtggagcacagtagcgtcgcagtagaagttagaccaatcccacctaagtagtcagagaatcttaaaaagtaaagcccagtaatgtttacttaagggtctgtttctggggaattaaaaaattaaacatggaactgtgccaagttttaaagtttccaaaaacgacaaggtatttaccactgaaatttaggaaraccacatactaatagtattccattctttacttttctagaacatttttagtagacattaatgcaggtgtgctaaagtagaaatcactgtcccagagtactgtgttggaccatttggaaggagccatgtatctcccattacctatacaatttggtatcattcgattagatasgataataagaatatttatttatatgtacttaatttttcaagaaatgtttttttggtgtccataaatctggtcccttggagtgattgaattccgtacttcagagtttagacaataagaggcagatacgtttagagtaacttaaactgwtattagatctactttcccccatataataaaaattgagaaaaagtagacttcaggcaaagtattatcaactctttattgtgccttgagtgaactagatagcattttattctttcattctgactttcttaaagtgtttagacatttcttccttgtgcacaactaaaataatttatggagtgcaggtccaaagtagtttttagagggatatttctttttctaaagaacgaaccaaaaagcctcaacaaaacagtgtaaaaggcagagtattgcttatatagaagctcaaaaacagagatatttgtttggcatattttaaatttcggagtaatgcatattcagaggaaaagttaccttatttaagtaaacgaaactattcggactcctcgtggtagggataatatggaaaatgttagaaatrtagaactttaaagctgaaagagccttagtcattttgtctaaatgccttccccatttaccaatgaggaattagatcaatagagatagaataacttctaaacaccaatttgtggcagaacagataaaactttaatcattcatgaaaccaaatattagttcacaggattgagacaaaatgcagtgtatttgacttgaccagagaagcaagactcaggttctggttccagctttttctcttttactatagacaaaacatttaacactggacttcttgttactctctttggaaataatatctcttctaacaagctgctgggtttttttgttttcttttttttcctcttgctctttcaccccgtctgaagtgcagtggctcaatctctgctcactgcaacctctgcctccagggttcaagcgattctcctgcctcagcctcccaagtagctgagattataggcgcccacyaccatgcccgactagtttttctatttttggtagagacagcgtttcaccatgttggccaggctggttttgaacccctgacctcaagtggttggtccaccttggcctcccaaagtgctgggattacaggcgtgagccctggcacccggcctcaaactgctattaaaaaaacaaaaacagctatgattgtatacttatataacatgttagttttcttttttttggtttttttgtttgtttgtttttttgagatgaagtctagctcgtgtcccccaggctggagtgcagttgtgcgatctcggctcactacgacctccgcctcctgggttcgagcgattctcctgcctcagcctcccgagtagcttagattacctaaaattacctagaaaaaaatatgaaacagtgtacagtacccagcagtcaggtgtcagtgctcaagatttttattaagagtgacgatctgaagtgcaagcatttactgaaatggaaatgatactgcacaacattttatttgaaaattaacatgttataggccgggcgtactggaggccttacatagtaacccaggggtataaggatataaagttgcattttctcatacaactccacttccttttttacgttaaggtattatattccctaaagagccttgttcttctctatacttaatactgcatcaactccaagaagctcttaattaaaagaagatcatctgggctcttaagttgcattaagttagcaaaaactactgcaaaactgtgacgattcataagattttttttaaattcatttaacagatgttaaaatgaaactgtacttcacagagtcagtgaagtacacagatcttaattcattgttyagtaacttttgtggattgtataatgctttggcttctatttcaagttttcttttttaagggggaaagatactgttgtcattttgagaaaggtagatggcactttttgttttccttgtgtaagagaaacggattgttatgaaagctttgaactttcctggagttcgagagtacactggtcctctaagtgcggtctccaaatcacgatgatcagcrtcacttgttgraacttgttgggaatgcaaattatcaagccccaccccagacctttgtgatctaaaagccctccaggtgattctgatccacactgaagcacgagaaccactgaccttaggaactgttacctgttcctttgcttccgtagagtgaagtaaaaagtgaggaactcagaagaaaccaaattatctctcttttagagtattttttcaggaatctttaccgtatttatcctgtgtaaattgttttctctgactgtatctgtactagacttggcatgttttctcctctttacagttcaatctttgtagagctgttttcttgccaaatttcaaagaaaatattttgttggctgaaatccttgttttcatagatcagttggtttagagccaagttttgcaacacagcctgaatgaaattgctttcaacttttaaaatgtcttgaaattggttgaactaaggaaaaataatcctaagaatttacctttatactatctttccctgttagtcttttcattttacgtttttgattgctagaaatacttgattttggtgtcttttaaaaaaaaatgtatgtattcggctaagtaatttaattgagctaagggctttaaaaggtctttggttattgtatatgtatttaaagattttgacagcccagaattaggtgattataacaactcttgagttaaaataactggtttgtttttaatagtaaaagttgactttattcaagatcctggttggaaacttggtgttaaccatcttgggaagaagggacatttttggaactatgcttggaaacatagaatttaaattttttcctaaatagtggttctttttcatttctgtgtgtaagaatttatttgtttcacagtagcaacacagatgagcttaaaatattttttcttatcctttgcgtttattagttttagcttttttttttttttttttgagatgtagtcttgctcttgttacccaggctggagtgcagtggtgccatcttggctcattgcaacctccgcctcctgggttcaagcaattctcccgcctcgcctcccgagtagctgggattacaggcacctgcaaccacgcctggctaatttttttgtatttttagaagagatggggtttcaccatgttggccaggctggtcttgaactcctgacctcaggtgatctgcccagctcggcctcccaaagtgctgcgattacaggcatgarccactgcacctggccaattttaactcttctatgtaggtaaattttgggttaactaaggaacatttaccaatttggttaaacttagaaagcatttaagtgttgtaaggmccaagttttttttcctcctcgtatattcctttgaaatgttgattaattctctaccttgggtccatcaaaatatgataaattattgagacttgaaagaacatttgggattaaaatctgaagaccagaaatgtcagcttgtaaatatattggcagatttgacgcaaatactaatcaggccttaaaataggtaaacttaaaacacgtttctctctagagactcaaagagcaccttcagtcgtatctatagaagcaagacaaattgtaaagtcttataaactgaagaatgtaatgttgttatttactatttaggtacttggagcaaaagtataaaaaaagttgctgtttactaactcatttgggtattatcaatcataaaaataggattttctgttaacataggaaatataaatctacataattccttgcatatcatcttgtgttcctttccttgggtaagattattataacttttttaattaaaaaaatttttttttttgaaacagggtctcactctgtcccccagactggagtgcatgtcatgatctctgcttattacagccttggcctcccaggctcgtgatcctcccaccccagcctcccaagtagctaggactacaggcatgcaccacctgtagctcagctaatttttgctttttttttttttttttttttttggaaggacggggtttcaccatgttgcctaggctggtctcgaactcctgggctcaagtgatccacctgccttggcctcgcaaagtgctgggattaaaggcatgggccaccatgcctggcaaaagctttttcttaagtgatacagttttttatatggtttgattaatcattgttctaactttatttattacatttttaagttgtgttttctgctttttttattttaaaaatttatttttataaatacaaagtatatttttactgtttttttgtattgagatgggtctcattatgttacccaggctggtctcaagttcctgggctcagcggagctgcctgcctcgcattcccaaagtgttggaattacaggcatgagcctgatgcccgaccctaacttaactttagaattggcttgcagatatgggacatgagtcaaaatacgtagaattaagacatttagggaacaacgatgggcctaatatatttgagagaactgttttcaaagttagtaactctttctatccgccttcaccttttaggaggaagttaacatccctaataggagggttctggttactggtgccactgggcttcttggcagagctgtacacaaagaatttcagcagaataattggcatgcagttggctgtggtttcagaagagcaagaccaaaatttgaacaggttaatctgttggattctaatgcagttcatcacatcattcatgattttcaggtatgatttaggttattttaagatatacatgaacaatattaagagttgtctggatgatacagaaactatccttgctctcaaggaaattactatgtttgaaagctctaaagttgtattatgcagtagcatttttttcatttagcatgacatggtatatgtaaaccttaaagttaaattttgacacgctgacaaagacaaatatgagacattttataaaatgcttatgtttatagagtgccttctaagtaatactttctctgcaaatggttttcaaatgttactgtaaacctcacaacactgcaaaatagttattttcattttagggctgagggagcaggctcagagaggttttcggtatcattgatactattctccctttgacatggatttattagatatttaaatcatgttaattgcataaatgatagctctttccttttgtccaaattgggggataaaacttgttttgatttagaaagacttctgttttgttcttgtttttgtgacgtaatcttggtttgttgcccaggctggagtgcagtggtgcagttgagctcactgcagcctccgcctcccagggttcaagcaattctcctgcctaagcttcctgagtacctgagactacaggcatgcgcaaccacacctggctaattgttgtatttctagtagagatggggtttcaccatgttggccaggctggtcttgaactcctgacctcacgtgatccacccacctcagccttccaaagtgctgggattacagatttgagccaccgcgcccagcctagaaacatggttgttttattttcagacagggtctcactctgtagcccagggtgaagtacrgtagatcgatcacagcccactgtagccttgaattccttggctcaagtgatccttctgcctcggcctccacaacagttagaactacaggctcatgccaccacgactggctgatttttaaatttttttgtagagattgagtaccaaccactatgttgcctagtcttatcttgaactcctggcctcaagcattgtctcacctcagcctcccaaagtgttgggattacatgcatgaaccgtcacaccagagtagaaatacagttgttgacagtttttttcctggtttgtgtctgcatattatgaaatactcttttcagtgcctataaatattttaagtttgaaccttgcggggaaaagaagcagcatgacaaaactacattagaaattacaatgatttattcttagttgaaagaatgttgacttactgcacatttttctctgaattaactttaagaaggctgtaatacctctttcattttattttgagttaaaaatacgtcaatgcttaacttctagccccatgttatagtacattgtgcagcagagagaagaccagatgttgtagaaaatcagccagatgctgcctctcaacttaatgtggatgcttctgggaatttagcaaaggaagcaggtaatgatgactttataaaattttcataaaatattaagtgattgctgagtttttagaaattaargttttgtagatggttatttgtttttatatatcatgaaaaaccattctaaattccatgaaagagtaatgtcatgtaaacatttaatagatttgtcttctttttttgtagctgctgttggagcatttctcatctacattagctcagattatgtatttgatggaacaaatccaccttacagagaggaagacataccagctcccctaaatttgtatggcaaaacaaaattagatggagaaaaggctgtcctggagaacaatctaggtaagacctaatctatttagcccctgattgtttttgaagactttaaaaatcatttatacatacacatatatatgttttaaatttaaaaagtcaatgaatatgaatcattagagaaaaattagaatatagttaataaagaaaataaaaaattctaagagataactactttgtgaatccttcaagacagtttccactatcagtgtttacatattcatctttacacatagaaaacaagtcaggtaatacaagcttttgtaactcattttcaaaaaacagggcagtataatttctcttagagtgagatattctgtttatgtattctgttatatgtatgttactgtgttatatgtgtatgtattttgtttttatgtattctgttatatgtatgttgtatgtattaacattctattatggtgtttcttttttcctgtatgtgagtttgtgtataacacacatctccatatataaaaagtatacactccttagaaaaaatgtaaaattactaagaacaaaagttctcataaatgctgcctcagggagataaacaccaaatatggttaagtgtggaagcatttttatatattttcaaaaaatgtatgcatgttgtttcacaacctgttttttttccctcaacatctttgcattttagtacacatggaacctactctgggatatcttactcctatcagtggctgcgtagtacttaatttaatggtcccctgcactaaaactactgccttagactgtactatggccttgagaagcagccctagtatagaataccttactaatggacatttagttttttaaaaagttttcttgtattataaattattctgttgaaatcatccttgaatacatttgtcttagtttatttcgtgctgctataacagaataccaacaactcagtaatttataaagaacagaaatttatttcacacagttctagaggctgagaagtccaagatcaaggtgagggtctttctggtcctctggaggggaggaatgctgtgttctcacggcagaagagcagaaagggatgtgcttcttccttcaagtccttttataatggcattaatccattcataagagcagagtgctgatgaccacctaaacacctcccaaaatgccccacctcccagcactgttgcttcgtggattaagtttcaacatgaatttttggagaggacaaaaacattcaaaccatagcagtatctaagttctcttgtcatgtaatttaaaagaaaatgtttgatttgcagttaaagtgttaactattgtataccatcagcagggaccattataaaatctaaatattaatgagtggttgtaaaactaatgtgaacactcatatacccttcacatagattcacaaattgttgatgttttgtcacatttgttttatatgtttgcttttgccagacccattgataatyagttgaatttcatctccaaatactttacctttcttttatcttctaacaagaagaatgttcttcacataattacagtgcagttatcatacatttggaaacttaacattaatatggtactgtaatcaaatacaaatctatttaggaattttctcatttatgccaaaaatgtcctttattgcttttattttttaatctagcatccagtcaaagactattcattgcattcagttgtcatgataagttttatttttaatgatcatattaatgtaggatttatatatataaaaaaaactagtccaaatgacagaagatacttaacaaatgtggttttgcctttttcttttttttttttttttttttttttttgagacagggtctcagtcgcctgggctggagtgcagtagggtgaacacagctcactatagccttgacctccttggcttaagcaatcctcccaccacgaacggctaatttttttacattttgtagagacgaggtctcactgtgttgtccacgctggtctcgaactcctgggctcaagtagtcctcctgccttggactcccaagtgctggaattacagtcatgagccccaccgcactcagcctttgactgtttttaattttatttttgaggcagggtctcactctgttgcccaggctggagtacagtggtgcagtcatagctcattgcaaccttgaacttcaggctcaagagatccttttgccttactcagcctcccaagtagctgggactacaggcatgtgccaccatgcccagctaattttcattttaattttttgtagagacggagttttgctatgatgcccgggctgatcttgaactcctggcttcaagtgatccttctgccttggcctcccaaagtgctagcattataggcatgagtcactgtgcctggccttgaatatttttacattgcgttgtcacaagtgagctgtgtcattttggtatattttaattaaaaggcaaggtttctactttgatattatttaaatccacacccttgtatcttacatcaaaatttaagaatcagtcagctttaaattatttgcttttattcttctctaggagctgctgttttgaggattcctattctgtatggggaagttgaaaagctcgaagaaagtgctgtgactgttatgtttgataaagtgcagttcagcaacaagtcagcaaacatggatcactggcagcagaggttccccacacatgtcaaagatgtggccactgtgtgccggcagctagcagagaagagaatgctggtaagaaggattcctgagtcctgtcttagcgaaggtccgctttgtcttttccatgcttgaactttcacagctgtacttggagtgttactgagtgaaagccaaaagtgcttttttaaaactaggagaccaaacaaaagtagtttacatatacactgtattcatgaagaataaaaatattatgctcttctgtttgaatttatttcttatgtactatagatcccatcatttcttttattgcaaagtgttaggaaacttcaaaataatcatctaaggtcttttaagaagatactctttgggggctgggcgtgatggctcacacctgtaatcccagcacatttgaaaaagttggtattaaatataatatccatacaaagaaagatgagactgatttagtttagaatattaataggatgaccacagttttttaatatatgagaattatattttgtaatatataacatgacaatatttaagaaagtttagctcaacttgaaaaatggttctattaagtttttgttgtagcttgggataattaaaaatactcattaaattgtactgttttcataaaaatttgtaatgcttttttatattcccactaattaagtaaaattggagcctttttttgattttaaaaattcttaaggtttaaattctagaaattgctcttttaagtgttttgctaagagtattrgtaggaatttgattttagatatcttgtggagacctttccagaaaaagagggttgccttttagttcctggaccttattttaagtaagctttttggtcaaacctattctactcagctcaaaaagttgaaactattgaatttattgtgtcatcgttcttaggatccatcaattaagggaacctttcactggtctggcaatgaacagatgactaagtatgaaatggcatgtgcaattgcagatgccttcaacctccccagcagtcacttaagacctgtaagtacatggctgtaaaaacctttaggtccattgctatggtatatattattgctgtgttgggtaacttcatttctcagtactaatcaaagtgaactttgcttgtatgctggctgttcatagtgctacttttctctaaattatcatctgtagagaagatcatgagtattgaagtttgtagaaaatgtattattgtcttgatcatgacaggcatttggtttatttttccagggatgatcaaatcagatttcttacactaagagcaaaaataagtagcaaatataaaacctcaaaatggccaggcacaatggctcatgcctgtaatcccaacactttgggaggctgacgcaggaggatcccttgagcccaggaatttgagactagcctgggcaatggagggagatctcatctctgtttaaaaatatatacatatttaaaaaaaggtcagggggaacaaagccctcaaaatatagcctttcacttacttttgatttttttgtgtttatctttctttaaagattactgacagccctgtcctaggagcacaacgtccgagaaatgctcagcttgactgctccaaattggagaccttgggcattggccaacgaacaccatttcgaattggaatcaaagaatcactttggcctttcctcattgacaagagatggagacaaacggtctttcattagtttatttgtgttgggttcttttttttttttaaatgaaaagtatagtatgtggcactttttaaagaacaaaggaaatagttttgtatgagtactttaattgtgactcttaggatctttcaggtaaatgatgctcttgcactagtgaaattgtctaaagaaactaaagggcagtcatgccctgtttgcagtaatttttctttttatcattttgtttgtcctggctaaacttggagtttgagtatagtaaattatgatccttaaatatttgagagtcaggatgaagcagatctgctgtagacttttcagatgaaattgttcattctcgtaacctccatattttcaggatttttgaagctgttgaccttttcatgttgattattttaaattgtgtgaaatagtataaaaatcattggtgttcattatttgctttgcctgagctcagatcaaaatgtttgaagaaaggaactttatttttgcaagttacgtacagtttttatgcttgagatatttcaacatgttatgtatattggaacttctacagcttgatgcctcctgcttttatagcagtttatggggagcacttgaaagagcgtgtgtacatgtattttttttctaggcaaacattgaatgcaaacgtgtatttttttaatataaatatataactgtccttttcatcccatgttgccgctaagtgatatttcatatgtgtggttatactcataataatgggccttgtaagtcttttcaccattcatgaataataataaatatgtactgctggcatgtaatgcttagttttcttgtatttacttctttttttaaatgtaaggaccaaacttctaaactaattgttcttttgttgctttaatttttaaaaattacattcttctgatgtaacatgtgatacatacaaaagaatatagtttaatatgtattgaaataaaacacaataaaattaacacttgatccagaatgttaacttaccaccccatcctagaatgttacagttactgtatctatttgtgggaacggatttgtttttaactaaaaattaatagctatataatcttgttacattatacagttgacccttgaacggtgtgggtttggggtatcaaccttgcacagtctaaaatccactataactctggactccccaaatacttaattagtaaaaacctgctgttgaccagaagccttactgataaacatagtcatttaacatatttctatcttctgtgtattacatactgtattcttaaagtagcctagagaaaagaaaatattattaagaaaatctcaaggaagggaaaatatatttactattcattaagtggaagtagattatcataaagttttttttttttttttttttagacaaggtctcgctctgtcgcataggctggggtacagtggtgcattctcagctcactgcaacctccgcctcctgggttcaagcaattctcctccctcagccactcgagtagctgggattacaggcacccgccaccacgcccagctgmgttttgtatttttagtagaaatgaggttttgtcatgttggctaggctggtctcaaactcctgccctcaagcagtccaccctcctcggcctcccaaagtgctggcactacaggcgtgagccactgcacctggcctggatcataatcaagttctttattcttatcttcatgttgagtaggctgaggaaattaactggggaaattttactgatacctgagtcctaccctgggcttactgaaataaattttgggaattgaggcctattaatttatttttaaatgtttcccaggtggttctaaggttgccagtctggcattgcatttggcaaccactaaattaaagcattttgttttatattttaagttactacatttcatatagtgcataattaagtttcggagagtaaaaagtgttgttattctctagccacccgtttttcaactgtggaagaaatggatgtagatcagttccttgcatatgtttctagaggcactctgcatatagaagaatataatcaaaaaactcacgtgtccatactctcaccatccgccctcacaaagaataacatacaattctctgacctttttttcatttggaatttgttgtataatataaagaatgtccttttttttttttttttttttttttttgagacggagtcttgcgctgttgtcaggctggagtgcagcggtgcgatctcggctcgctgcaacctccgactccctggttcaagcgattctcctgcctcagcctcccaagtagctaggattataggcagcgccactacacccagctaatttttgtatgtttagtagagatggggtttcaccatgttggccaggatggtctcgatctcctgacctcgtgagctgcccacctcagtctcccaaagtgctgggattacaggtatgagccaccgtgcctggccaaaaatgtcctttttaaaaaacttcatttaaaaatttcattatttgccatgatagcataaataatgcctgtatttccctttccagattccccagttgtcagcatttagcacatttaccctatcattttcatgcacactacatatgtatactatttttatttcctgaactattgaagagtaggttgaagatacgatgcttcatcacccacttagtatataaacctcagtgtatattttctaaaaataaggatacatgcctatataccctgtaatataatcacaatcaagaaattaccattcaatttcataagatcccattcagatttcatcagttgttccagtttcctttataggtctatgcagtccaagattacttgtgtgtgtcgccatgttgctttagcttcaatatggaacagttcctcagtgtttgtctttcatgagcttgatatttttgacatttctctgtataagaaaccataagttgacatcgatagctccagttacagtcttgttccacagggtttattttggctcttcccatgtttgtggcacctttctctgacagcaaccgaattcccagttcttttttttgagacagggtgtcactctcacccaggctggagtgcagtggcacaatctcagctcactgcagcctccacctcctgggttcaagtgattctcccacctcagcctcctgagtagctgggactacaggcatgtaccaccatacccagctaatttttgtatttttagtttcactatgttgcctaggctgctctcaaagtcttgagctcaagcgatccactcaccttggtctcccaaagtgctgggactacagacatgagccacagtgctcagctcgaatttttttttttttttttttttttgagatggagtctctctctgtcatccaggctggaggtgcagtggcatgatctcagctcactgcaagctctgcctcccaggttcatgccattctcctgcctcagcctcccaagtggctgggaccacaggcacccgccaccacacccagctaattttttttttttgtatttttagtagagatgacgtttcaccgtgttagccaggatgatctcgatctcctgacctcgtgatcagcccgccttggcctcccaaagtgctggggttacaggcgtgagccactgcgcccagcctcagccctcattattctatttattcatttgcttcattcatccataagaatcattctgatgacactagccaagccttcctctgttctccactttacataggcctccaagccagctgagcattcccagacccatgtgacctggccctgatgccagtgactgcagggaccactgtacctggtcaaggatcctcccgacccatggagcactgcaccaagaatcacatgtgccactatgtaccagcagagcaccaaagagaaggaactagttctttttttggctgcatttattccattgtatcaatgagggaaatcacaatttgttggtgtatagatggtccctgacttacaatggttcagcagattttttgactgcaatggtgtgaaagtaatcacattcaatagaaaccatacttcaagtactcatacaaccattccgtttttcactttcagtatagtatttaataaattacagaagatatttaacactttgctataagataggctttgtgttagatgttgcccaactgtaggctaatgtaagtgttctgagcatatttaaggtaggctaggctaagctgtgatattcagtaggtttatgtgtattaaatgcatttttgactcaggatattttaaatttatgaaggattcatcaggatgtaaccccattgtaagttaggtatctgtattggaatttaagctaattatacccttttggcagccaaatcatctcatcaacattaaatatagcagtaggcttttttgtaattttttttgtgcagtaggttttaattcaagggtaggctagtcaagatattttttttacttgaaggaagtattatgtatagtgcaaagaaacaactctagattcaaacgtgatttttccacttgctagtagcaagttgcttttcctttcggagcttgaagtaatttttagggttaaatgaaaagaataccacctatttcacaggtctgtcgtggaaatacttggaacagagatactagcacatgtagctgtggacttaacaaatgcctaagggttggggtatgggggagaaatggtggtcttgtaatattaccttcactttcagctgtaagatattaggagttttctctcataaataagattaccagtggtttttctttgtgatttttaagtattttctagacttaattttagtattttgtaaatgcatttaaaaatatttcaaagaaaattatttttgtaacttgttttacctaaggacttctgaaagttcttttctgtattttgctacagaaatagccagaatacttgaatttatatacatataaatgtatctctggaaattgaatacattcacttcatgtatttacttgcaagtgatttacattgaaagatggccatgaaatttcccagctgtgtctacagttactttgctttccatggtccccatttcaattctaatttttgacatatatacatgctacatattattgaacaatttcaatttccccccagtttgttatagatttaaaaaatattccctttgaaatgaaaaattgatatatggcctttaaaatgttttaatgtgagatgctaaaaattattcaagataaatcaaacactttggcatataggagggctggaaataattttttattttccttatacagcgtcacccccaggctttatgtgcttagaacacataaggtccttggaaagttgaaagagggatgatggttctggccttcagaagtgttcgtctgtagttacaattcaccccgaaactagaggtcaagaaaggaagaggaaaaaatagatgccatatgatatgacaccaaataagatgacaccaatgtctatgtagttggataacatttctctaagcagcatgagggacagtcatctttcataatgttaaccccaaaacattctgaatttttcttttttttttttttttttttttgagacggagtctcgctctgtcgcccaggctggagtgcagtggcgcgatctcggctcactgcaagctccgcctcccgggttcacgccattcacctgcctcagcctcccgagtagctgggactacaggcgcccgccaccacgcccggctaattttttgtatttttagtagagacggggtttcaccgtgttagccaggatggtctcgatctcctgacctcgtgatccgcccgcctcggcctcccaaagtgctgggattacaggcgtgagccaccgcgcccggccctgaatttttcttaatgacccattacagatctatgatctatgacccacttaagtctgccaaaccaatttaacacactctctgcctacagacagtgttatcagacccagattatttattttatttaaaatcttgaagacttgtgaaaaagatgtgaactttggtgaatagactggttgcatcccaaccttagattttttaaaaaatgtttttaattgtgaaaagaatagtgcatacaacaaagtacattaaatgtatgtgcagtttgaagaataatgataaagtcctgtgtacctgccactcaggttaagaacattacaaataccttagaagctctgcaaatgctttccccctattgtttctgtattaggcgtaattttttctctagagaaaagaaacaataggatatgtgtgtgcgtgtgtgtctgtgttatatttttcttttttaagagatgggggtcttggtatgttgcccaggctcgagtgcagtggctattcatgggtgcagtcatagccactacatcctggaactcgtagcctcaagcaaccttctcatctcagcctcttaagtagataggactagagacatccaccactgtgctcagcttgtggccggcagactgaagacccaggagagccaatgttccagttagagttgaaaggcaatctgctgcagaaccaggaagagttgatgttgcaggtgaagtctgaagactgctagagaattctctgttgcttggggaagatcaatctttttattctactcaggcattcaactgattagatgaggcccactgacattatggaagatgtattggtccattctcatgctgctaataaagacatacccaagactgggtaatttataaagaaaagaggtttaattgactcatagttcagcatggctggggaggcctcaggaaacttacaatcatggcagaaggggaagcaaatatgttctttttcacatggtggcaggaaggaaaaacggtgagcaaaggggaaaagccccttataaaaccatcagatgtcatgagaactcactatcatgaaaacagcatgagggtgaccacccccaagattcaattacctcccactgggtcactccaatgac

SEQ ID NO: 98044 - DNA, 38262 bp, Homo sapiens
ctaaagagattgctgcaagtaactatgtactgtcttatatcttaagtgagctctacctacttctattcatgactgttagttgatacagagtatggatttcctaataagccattatatatttaactttatagaaagggaataacttgaagatccatgagatacttgggttcctaatttgtagaaagtgctgtaaaggatacagtaaaatagaagtttctctctcaaagcttagaagtttctctctcaaagcacctcaaaggttaagacctagcaaaatgtaattgctctagaaggcattcaatggcagcggttagatgatgagtcacacagtgactcattcaggagaaaagaggaggtgactctagaaatcttgaagcaggagtttggcacgataagtgcagaaagatgaagaggtggaagagaacagcaagaacaaaattttagacagtatatgacataaactgagctcttttctgcatattttatattggatacctggcatgtgagttgaacacatcatcctaacctctgagggtagacatgcctgaactaatagataacataaatatttgttgttcggaagttgccttttaattccataatcagtagctattaaataaatttgactacatatccttttaatctaacttgaattagatttataaaaacaatttagggattgatttaagtttcaagagttcccccataatgtgctttaatacattttgttaatagtggttactgttttaaaatcctgtttaaccagtttttcaaggatatatgcattgtgacaagcaagatgtgaaccaaaatctaattactcaattttaaaagaactcactgaaaaaacatttttccatgacaacttcctataagtactaatagatttcagaaaatattgatgatttgccatttaccaagtttcacccccaccttgattttatggattatcaattatttcaggcacatttataatgaggttatagccagtataccttttgggaataacgtaaccaaaccaaaatgaaatgtttcctttttattaaagatcatagaagaagatgctgctcttgtagaaataggacctcgttttgtcttaaatctcataaagattttccagggaagttttggaggaccaactttatatgaaaatcctcactaccagtcaccaaacatggtaagcggttgtgtcattcagtagtcttcaatgtaccagaaccctttggccaaaatgattctgtgaagtaattgctgttttattacctgtgaaactgaatttggtttttgctgcatagaaacttggaaattactcccttttttcatgacactggctgaaaggatatatggttcataactgaaagtctttgccttatataaaatgtttatttttatttcaaaagcatctaatcttttttttttttttttagcatcggcgtgtcataagatccatcacagctgcaaaatacagagagaaacagcaagtgaaagatgtgcaaaaactgagaaagaaagagccgaagactcttcttccacatgatcccactgcagatgtttttgtaacaccagctgaggagaaaccaatagaaatacagtgggtaaaaccagagccaaaagttgatttgaaagcaagaaagaaacggatttacaaaaggcaaagaaaaatgaaacagaggatggacagtgggaaaacaaaataagtcaatggaaacctgatttgtttttcagttactttatatttattttgtattcaatgtgtaaatacttttattatctaatactatcttacgtctaattagtgtagcatttacaagaaagaaaaattaagatcttaaaatcagtgattatctttttctaaataaaatatcaccagaattcatcagttaatttctgatttctttttgaagtttgtgttgctaaaaatgtagcacacttaatgtagcctgttctcttgggttggaatttttggtttagcaaagctgaaattcagacatttattaggtcatattatttgtaaaagcattcaacacttcaagagcatcggttgtggatggtaaagtaggagtagactggtagaaaggaaggcatctcactgaagtttactcagtcatcagttaatgaagccatggaagaaccaacccctgatctgtcacttcaaaaaagagtatattaaaatgttgaggttttgagaatcaaatgcattaatggctgtgttgaaagcactttgtaaattttttattttattatattttatttgtgagacggagtttcgctcttgttgcccaggctggagtgcaatggcgcgatctcggttcaccgcaacctccacctccctggttcaagtgattctcctgcctcagcctcccgagtagctgggattacacgcatgtgccaccacgcccaactaatttgtatttttagtagagttggggtttctccatgttggtcaggctggtctcgaactcctgacctcaggtgatctgcccacctcggcctcccaaagtgcttggattacaggcatgagccaccatgcccggccaaatgacatacttattttagaagcagtgtgtatagattacttatttagaaaactaatagtaaaaggagagaaaaataggacagttgttaaaggggataccagaacatttgaatttttccccacatgaaagagaaactgcctattgtgtaagggggcactaggcttaagatcttatgggtaaattagtaacggaaagaaaagattctgagtaccagtgaccatggaggtaggtggctgctgacatggacagatagaaatacaataaaatatatatctaatgaaatgacacatgctgtttcatcacctgcttttttgacttcacactgattgtttttctatgtgtttgttccacatgtttacttgctaactgctaactgtagtattctgtgtaccatagctatgtaatcagtattttcagtttttcctcttttttttgctggtatcgatgcttgtagtgaatacttatatagatgtgttacatgtctttttacacaacacttggtttcctagaagtgcaacttaggttaaagattatgaactctaggctttttgcttgttccctccaccaccataacctcactagaggctattagagggttcatttccttgtccccttaccagtttcactatgcatgaaagaatctgtcaatttaataggttaaaaaaaaaaacccacctttttttttttttagttactggtttatcctttttgactggactaatcatgtttgtttttctgtggtaggattgtcttttactgattctataagtgcttttatatagtaagtttattatagagatctttcctagttcacttacattttaattttatgtctttattattttaagtatttaggcagaatgatcaatattgatggtttttttttccttaaattttttgctaagaacggccttcctgagtgcttaattggccttgaaatagtctaaattaggaaacttgaaatcttgaagtcatctaaattatgcaggtaattcaggtgagaggatcacttgaaatacttgtatgtgactagggccaaatctagttaaatggaaaaaaaccaaagtggccgttattttatttaggcagttgaatatagtcttggataaaaataagacagccgtattcagaatttgtttttaaacacccacatctcaggaacaagttaattataggttataaactagatcaacaaattgtaagttttagtagagatacaaacttgtacttttgatgtgtgcattgtggagttttggtgtaatttccaatttcacaattttcaattaacagtttccataatagagatatccttatatctcaaattccctttcacaattatatggatatcttatttgagaattcttctggaatggatcatctctaaagtctggtcatttaaagggcaccagtttaataaaagatgttcctttatttattagcggcagggtcttgctctgtcacccagggctgtagtgtggtggtgtggtcatagctcactgcaggctctaactcctgggctcaagtattcctgcctcagcctcctgagtaactaggactacaggcccacgccaccatgcctggcttttttttttttttgtagagacaagttctcgctatgttgcccaggctcgtcttgaactcttgggctgaagggatcctcctgcctcggcttcccaaagtgctgggattacaggcatgagccaccacgcctggtcaagatgttcctttagactgaaatttatatccagcatagttacctttaattatacaatgttacaggcaaaaatccttcttacttcagaaggtaaaagaagtaagtgattcctacaggctgtatccaaaaccaaatcaagttggagggagaaaatactccaaattaagttggagggaaaaaaatactttccctttccgtttttttttttttttttgtccctcccttccccccgcccaccatcccaattctgttctcaggaggggaaaggtttcattctcccccaaactcagacttctcaatccttatccattaccaatttaccaactaactgagactgtgtagaatcttcctctggaaaaaagggaagtgtatgaattctgagtagtgagttggttggtcagtggcgtgtgaagtaacctgatgaagcttagcgtgggttttttattttactgggggcagcatattggggaagagaaggataaccttactaaaccgcttgggtacgccaaccctgtgcaatagatattagcaacatagctaaccatacatggttagtaaatacaacccacacctaactgatgcatgtaaacattccacattacagtgaaatatattggtgtattaatgcattttaataattatggtattattttgatacctttcaaagtgtttggaataattgtgcagatagtcagatcaaccaaaacctaccagttaaatactatcctttaactgctttcttaacctaaaccaatcttggaaaggtaggattagaggccagaaagttaggattaaagtgtgttggatggatagatcagcacaatttcatccatgttggtggtaaggcttttcattaagtgtgttgatgcttcccttttaaattgtttccgcttaaataatctaactgtcctttctcaagcatattggtcaagatgatcaataccagatatcttaagtggcagctgaagagaattaaagagattaaaaaaaaaacctgatattcagtccaaccgaattctgctactgtattagctgaggaggcttgagccaaccacttgaccacttggagtctgaatcgccttatctataaaaacggggatccattgagaaattataatcagatattttccagaatcctctcccatcccagctcctatctcccccttcagccctcaggtcggctgccactcacactgaccgccatctgtgcccctcacaatgacaccagcgtggccctgcctcccttccgcgcggccccgcctctcgccccgccgaggccccgcctctcacaccaaggtcccgccttcctcctgttcttcccggccaaggcctaccttcctcccacgcggcccgcctctttccccgccaagctcccgcctttctcctgcgcggcccgcctctctcctcgccaaggccccgccttccttcctcggggcctcgcctctcaccccgccgaggccccaccccctcccgcgcggccctttccggcacagagcccacccctagcccatgcgaagcggcggccgccggcaccgcccccgccgcgctcccgcttgccgcagcctgcgtcgtctgccgccaccgcgcgccttcactgacctacaccaccgccgccgccgccgccgccgccgggctcgctggctggcccggtgcgggcggcggactcccgccggagaggactgccagcgccgccgccgccgccgcttcggcccgggcccgggccccgaccccgtcccgggccccagcgccggccgcccgcccggtcgggcgatgaagtgtcactatgaggcgctgggggtgcggcgcgacgccagcgaggaggagctcaagaaggcctatcggaagctggccctgaaatggcacccgggtaagtacctgtcccgcagcccccgcggccactcggagaagcccggccctccccgaccttcccttcccccgggcggactccgcggagccagcagagagggacctggcggcctaggagctccttgccccgcccggccagtgcccggagccgccctgcccgtctcggtgggcgaagcgctcygccctggcgcaccccggctcacaccccatctcctcatacccgcgaccccggccccgcatcgccactgtagggggaaaactgcagtccaacaacctcacttgctcccgctaccgggtcgcagacaccacgagggagcagtcgggaactcggaactcagacctgccccaggcttgcttttccctgcgycccttgcagcgcagcctctcggtgtttttcctccgctgccctccacctcgtccgggaatcccagatacttcaacctgatgtatggctcttttcgtttcttagttaagaagttaagacacgggagctagtaaaatatcttttcaatagggatgcgcttttttcgctgttttttttttcttttaataagctgtttaagcagaccttgtacttcactttggacatgattctgccggggaaggttttaatcaggcggcttccccagtaaagtttgtatgtttacttagaagtatccttcctttggatgtttcattggtctgtaatccaggcctgtgtgacttttatgaagtaatctgatcttccaggctgggaaactaagagagtagttgactttcagctttttgaggttcatatgaagaggctttcatattagcattcatcagtaaacacggttacagagtatccaatatatgcaagtcactgcactctactaagtagatttggaaatgctgagacaggggtcttagagtcttgttaggaaaacaactttctgccttacacaaatgaaaagttaaatacaactgccagaaaaaaatcgcaacatacataattggtggttagattaatggaacaactaatatatgctccaggaattcagggagggagttaccattttgtattgagtcttccccttctcagaggagtttggactggatcgtagaggaatgcaatttggaaaagtgaactcaacagtatggaggatagcatggtggaggacaaaagatgttccgggggacagtttgactgaaggtggtgtgtattgcaggtctgaaaaatagggattatgagaggagtggaaggaaaggtcagggacccaaagtcaaaagggaatggctatggtgatggagtgagagatagaggtgtgggtctgttacttaaagttatgcttaccaacagaggcgtgaaaaaatgtgattataaatatattagaagagcagaagtaaatgaactgatgttcatcatagcagtaagtcagaagatacagccaaaattaataaatgtaaaaatagtgtagaagtatattcttagagtttgggttagtgtagaagcatattcttaggagtttgggttgttactgttagaaatcaagttaggaattagaaggaagttcggaattccttgactttctaggtgggaaagggtaaatgaagtagmgaatgctgtgaccaaaagcgtatgtaattttctgaagagtgattttaaatcagattgtatttcttgagtacaagagtagtttgaaatcagattgtatttcttgtaatcttgaatattagcccaaggactgtgaaatttgcttcgctaaataagggagagttgtggctggttttattaagctgccatgggagagtactatgaaggcaacttagtggattgaagagggctggagacagaagttagggagagtccgcagtggacagacaggtaagggcccaagccaggcktggggtcagcgggagggggaaagcgcaaggggaggagatgttgggaaggaaaaatgaccagatttggtgattaattagaaatcagtgctaggaagaagcatgcaaatatgactaaagtatcagttaactcctttgaaaccaaacctgttaggaactgaatgcaaatatcttctctaaatatcatcataatttatggcatcagtgtgatggtatctgagaatgggcagcaggaagccctgaagagccatgttctagggcggcaaaactatttgtagataagacattgctgtcatgttttcttgtaacttcttagaagggaagtattgagctgtagcttaaagaactttagtgtgctccggccaggtgcggtgactcacacctgtaatcccagcactttgaggggctgaggtgggcggatcacctgaggtcaggagatggagaccatcctggccaacatggtgaaaccctgtctctactaaaaacacaaaaattagctgggcgtggtggcgcacgcctgtggtcccagccacttgggaggctgaggcaggagaatcgcttgaacccaggaggcagaggttgcagtgagccaagatcgcgccactgcactccagcctggtgacagagcgagactccatctcaaaaaaaaaaaaaaaaacgaactttagtgttctccatagtcaattcaaaatgctttacgttctgaatatattagttgtctattgctgtgtaacaaattaccaatacctcagggcttaagacaacaaacaacaaaaacagcaagcctatgttgactatatggactcccacagtttctaaggatgagaatctgggagcggctttgctaggtggttttggctttctcattgtctgaaagaacctgcttccagctcaccaactcaccagctcaccaaccaccaactcatgtggttgtggcaggcctcagtgctctgccggctattggcctccttcaccccatgagcttctccagcttctccataggcagcctgagttgctcatgctatggcagctggccactcccagagtgatcaagagagagggaaagcccaaggtagaaactgcagtcttttataacctcatctcggaagtgaggtaccattacttctgccatctcctgttggtcacacagactacccttgctgacacagaagggactgcacaaggtgtgaatgccaggaggcggggtgctgtcttgcaagctgggtaccaccctgaggcaaggacgctttctgaattccatggttcaggaagcacagctaaggaaataataactaattagtgtatattttttaaactttatgagatttcttttgatatacattgatgagaaagaaaaaaacaatgtcagcactaaacataatctagtacaaaataagtctttctagaactgattttatttattttactccttttaaaagtaaaatttatactactcaggtttttccttttgtggatatccagttgacttgttttacttttattttattttattttattcattttagagatggagtcttgctggagcacagtggtgcaatctaggctcactacaacctctgcttcttgggttcaagtgattctcccacttcagcctcccgartagttgggactacaggcatgcgccaccacactgggctaatcttttgtatttttagcagaaacggggtttcaccatgttgaccaccaggctggtctcaaactcctgacctcaagtaatccacctgcttcggcctcctaaagtgctgggattacagtgggcgtgagccatcacgcccagcccagttgactgtttagtgatgtaccaaggcttagggaaaagcctgaaatttctgcttagattgttgcttttaacaaatcctgattattgactgttacgtggagtctttctgcttggccctggttgtttcttgttttgtgcmcgtctcatctgtttgtggcatttctgatggaaaatgtcttatttagattctgtcctgtacgtttttgattgacttaaatttctgtgactttaacagataaaaatctggataatgccgcagaagcagctgaacaatttaaattaatccaagcagcatatgatgtgttgagtgaccctcaggaaagagcatggtgagcatcacgctgtccttcccatcctagtttatgatgttgggagcagttatcaatwtaggtggttgttttttcaaatttagtayattaaatggtttttggtrtgttctgaaacatctgtcacctagtcwtcacataaaatctaacgtttgggtcagaaggaagcttggaaatgattgctccaattatctgatatcatagggggtgaaacaaagtttggtgatattatatagttttaattttgatactttaggtgacttctcattaaataccctttggtgtatgatagatttactgatatcagacaggwagaaggttttcgttttttgtttttttttgagacgcagttttgctctgtcacccaggctggagtgcagtggcgcaatctcagctcactgcaacctctgyctcccaggttcaagcgattctcctgcttcagcctcctgagtagctgggactacaggtgtgtgccaccacacacctgtattttttttttttttttagtagagacggggtttcagcatgttggccaggctggtctcaaactcctgacctcaagcaatccacctgccttgacctcccaaagtgctaggattacaagtatgagccactgtgctcaaccaatacagtgttttaatacaagaatggtaatcctcaaaactactttatatgaagaaattgaattaagcttctgcatctgtgacagatattactaatgatggtgtgatcatttaaaataatttccagatgaaaattactatgttgaagttctgagttttcagattctcaattaactttttgctacaaggaaataggttttaagctttgacataactgtgcaagatcctgctcttacaaagagctactgtgcaagtcatctttctgttaaacagtgtacaaccaggtggttgtcaagaaagaaaggctgcaaagaaaattcttacaaaattgtgtttcataagaaactcagagagaggatcctgaacatttctctactcaaggaatttggagatctggtcttagaattgcttttgccttcttcccagaactttgaaattctttcctgacttccttttgcctactctcttctcaagatcttgggttgttttctgatccttgggattcctttgtctttttagtcaaagctcttgcctagtaactctctttttacctggaagcagtaccgtgtagtggctaggagctggtcttcccaatgtaggagacctgcttctgaattcagactttgctggttactggttttattattatggatgacaaattatgtaatatcactgagcttccatttccttttatatcagatggagataataactgcctttacagagttattatgagaagcaattgtgtgtgtgtgaagctcctagattaagttgacataaatttaggaagattcttattccagtgcatcttggtaaatttccaaatcacagatgtgtaatgattctgtgggccagatttcctatgtcctgttttatgtttctttcctgtggaagtacgggactcagagacagtcatggaaattccttggctttttaaattcccctgttcatgtgggctagcattgtataatgtatcagaagttgcaggcctagttataattaacagttctgtgaaagattatgaactcttttcatgttaatatttcattaaaaatttttggttatggattggacatatcaacaaccaaaaatrtacaataataatattcaaaaggagcaagaaatccttttgaattcttacttattcagccttcacaatgatgctaatttttgtttttcaggtatgataatcatagagaggccctacttaaaggtgggtttgatggcgaatatcaagatgacagcttagatttgctacgctatttcaccgttacctgttattctggttatggagatgatgaaaaggtaagataaatgaactcacccttgatttctcatcaagtacttcattaagactcacatacaaagagaattcttaaaactattctgtaatagaaagtgaagcagtgttcattttgaaaactgaagatgcattgccttcatgtttaagctgtcagtgtataaaaacctctagttgaaatctaaatgtattgcagggactgaactttgtcccaaaattcttcaacattaaaatttttcattttgtattttaaaatctttttctgtgatcaggctgcaaaagtattaagaatttgtttttgttactgttttttagggattttacacggtgtatcgtaatgtttttgaaatgattgccaaggaagaactagaatctgtgttagaggaagaggttgatgatttcccaacttttggagactcccagagtgactatgatacggtaaaataaaaatgcattgttctataattagtatttatcactgtgtcatttttaaattttattttactttttgagatggtctcactctgtcacccaggctgcagtgcagtggtatgatcatatctcacagcagcctcaaactcctgggcttaagcaatcctcctacctcagcctcctgagtagctgggaacacaagtgtgcgccaygacatctagctaatttgtcaattgttttgtagagatggggtcttgctaagtttcccaggctgatcttgaactcctggcctccctccttggcctcccaaaagattgggattacaggcaygagccacagctcccagcttctcatttccttgttttaaaacaattggttctagttctcgaacctatcccatgacctctctttgtctctcttcctttctgaagtagcttttcgatctcttgcaaccttccccctttacttttccctttttattttttattttatttgtttattttttttgagatggcatttcacttctgttgctcaggctggagtgcattggcaccacctcagctcactgcaacctcagcctcccgggttcaagcgattctcctgcctcagcctcccaggtagctgggattacaggctcccaccaccatgctcagctaatttttgtatttttagtagagacaggatttcatcatgttggccaggctggtttcaaactcctgacctcaggtgatccacccacctcagccttccaaagtgctgggattacaggcgtgagccaccatgcctacttttcccttttaatttactaattgtttactgattatttactaatcaccatggtcccatctagtgattagtaaggctatttttattttctcattaagtttattttgaagagtgattttttctggaaagccttaaaagtmctgtcttctccagagattattagaagtgttatatacatgaaaaaagaaaggtaaaagatgtttcgcatcagtaatatttactgcttttctaaaaaaaaatcttaaagcgcagaagttaatctgttttctttgtcactaggtagtccatcctttctacgcttattggcagagtttctgcactcaaaagaattttgcatggaaggaagaatatgatacacgacaggcttcaaaccgctgggaaaaacgagccatggaaaaagaaaacaaaaagattcgggacaaagcaaggaaagagaagaatgagcttgtccgtcagctggtagctttcattcgtaaaagagataaaagagtgcaggcgcatcgaaaacttgtggaagaacagaatgcagagaaggcgaggaaagccgaagagatgaggcggcagcagaagctaaagcaggccaagtgcgtagcgtgcgtggggccctcttctcagtatcggtgggggtcagaggcagcaccagaggtaccttacatgttcatgttgggttcagtcatcagcctggctttatcctgctttttcttcttttttaaattgtggcattggatagtgttttttcatctactgtgtaaaaattattattatttttgggacagtgtcattctgtcacccaggctggagtgcaatggtgcgatctcggctcactgcaacctccgcctccaggttcaagtgattctcctgtctcagcctcccaagtagctgggattgcaggtgtaatatgccaccatgcccagctaatttttgtatttttagtagtgacgaggtttcaccctgttggccagtctggtctcgtactcttggcctcaagcgatctgcccgcctcagcctcccaaagtgctggaattacaggtatgagccacagtgcctggcctaaaatttttatttgaattggatattttccttcagagaccctttacatttgagagatcctttagacttttgtaaaacttaataattttaattaataactagcgttaattgaattcttcctctgtgcaaggccacgttctaagtgccttcctcacagcaatgctgtgaagtrcttatcctccttgttcttctgaggaaacaaggctgacaggcctgagatcacagagccagtaaatggtagagtcaggaattgaacctgagaattctgactccagactttcctgctttagccaccgtgcagtactgccttttggtcagtgtaccctgagatactcagttcattttagttcctctaaagttttgttattaaaaagttactgtaaatgcattgtgtccagagcattatagcatacttttaaaaattattcacttcttaagaattctactcatcccaccctcatcttttgaaaattaacactttacctacatgacttaaaatcatctgaagacttttaataagttgctgagtttcatgtttcaaaacctgttatctactactggagcaattaaaattaaccatacaacaggtaacaggtttaagtgactttgccttggttttaactaagcacaggttttaagtttgtaagcgtggataggttgggagcaagctctctagtgggaatggattttaaacctaagtagtaagtgaaaaccatgcagaggcgtgcttgtcgctgtgagactgtgctgtatgtgtctagactggtggagcagtacagagaacagagctggatgactatggccaatttggagaaagagctccaggagatggaggcacggtacgagaaggagtttggagatggatcggatgaaaatgaaatggaagaacatgaactcaaagatgaggaggatggtaatattatttttattttatttatcttttttgttttttaagtgaagctggaaatctccttgcttatttgacatctcccaatttttaaatgtggcaaataattaaaaataatgttgtatgggccaaaggtagtcggctgagctagtctaattcaagtaatttgattaacaaattcttttctgaccatgtcctaaacagtgtgtacttctagctgcataatatgacaaatggacatgtttacaagtgtgactatttttttttttttttgagacggagtctcgctctgtcgcccaggccggactgcggactgcagtggcgcaatctcggctcactgcaagctccgcttcctgggttcacgccattctcctgcctcagcctcccgagtagctgggactacaggcgcccgccaccgcgcccggctaattttttgtatttttagtagagacggggtttcaccttgttagccaggatggtctcgatctcctgacctcgtgatccacccgcctcgacctcccraagtgctgggattacaggcgtgagccaccgcgcccggccaagtgtgactattaaagaaaattcaactaagtgataggtcaagttttaatagtaactatttctagaaaagctgatattgcatgagaatctatgtgttgtgtataaattcttcctctcccttgtgactttatagaagggctcctcttggtgtgccaaaatgttgttttttttttgccgctatcattagagcacaggtatttgactaccttaaaaggcaaggattaggcatttttgagaatagctgtatatctgattttccccactgtctctataaaattgacccagttttaccttatctacaaatgtgatttttcagattcgtagcccaaataataaaatgataaacttttatttattcaaaatgactaggaagtgaagcgttttattaatgaatcagaagtaatacttttgaaagtactttgaaaattataaatcactctataaatgtgaggtggcctaatttccatcgagttttacaatttataaagtcctttcacgtacaagctctcactggatcgtcacacaatcccccttacatggaggttttgctcatggaatcgtctctgttttgccgttgtggaaactaggactctgagaagctatgagatgtgcctgagaatgtatgaccatttttagatccagagtttttgcttcaaatccagtattgttaactattcgattaattaaaatttcacatacatgatatattgaaagtctacaataccataatggaaaattaacaccatatattaaacattaacactagatagggtatattttgatcatttatgatttcaatgagacagtccttcaaaatcatactgacatcacttataaataaccaacatgtagaatatggaagataccttgagatatttattggtcctataataaatcccaaatgacagtttacatgtttgtttcttcaaaaatagaatacggatttgtgaaaataatttcaattgagctttttagtcagttggtttttgtggactatactgatagtaattattcagttgtaataaagccaaaagcttattaaaaaaaagtttataatgttaaactttacatgtaatatgttaacttayggcctatccgtcttacagtgatggaatgttataaacttataaactaagtttattaagtatttaagagtaagtcacagttgtaaatgtgtttggaccaaatcttgctcaagaggtaaactaagaaaagaccttttttgaaaaactgcttcgtggtagaactatgaaagtgggatttaattttttaaacttagctgacatccaagactttaaagatgttttatatcttcttctaagtagacttaggaaaagaacttgaaagttaaggtgctttatttggagcctttccttatagtacagtgctgcttttaaaaagccaactcaaatccttaggattatttttttttaggtaaagaaataaaaaaatttaatttctaatttgttagcatattttagatttgtgctctgatcaaagagggttcttactgtaggcttccctgtcataggtaaagacagtgatgaggccgaggacgctgagctctatgatgacctttactgcccagcatgtgacaaatcgttcaagacagaaaaggcgtaagtttattaatttaatttaatttaattttgagacagggtctcactctgtcaccaaggcaggagtgcagtggcacagtcatgactcaccacagcctcgacctgttgaactcagatgatcctcccatgtcagcctcccaagtagctagggctacaggaacctgccatcatggccagctaaaaaactgcagttacttttgcaccaacctaaatattttctttggagatggggttttgccatgttgtccaggttggtcttgaactcctggattcaagtgttccacctgcctcagcctttcaaagtgctaggattgcaagcgtgagccactgcatccagttaaaaggagtaagtttagtatctctgaacttgtgttttctttttttttttttttttttttttggagacagagtctcactctgttgccccggctggagtgcagtggcacgatctcagctcactgcaacctccacctcctggattcaagcgattctcctgcctcaagctcccgagtagctgggactacagatgcaggtcaccgcacccagctaatttttgtatttttagtagagacagggtctcaccatgttggtcaggctggtctcaaactcctggcctcaggcgatccacccacctcggcctcccaaagtgttgggattacaggcgtgagccacagcgcctggcccttgtgtttttttttgaggtgaagtgtaacattttgaaagttctaaaaacaatgtgcttgtagcagttgataactagccccacatactgtctcgggggattcctttccagcagggtagaaagaggtatttgtacctgccattaaacctgttgtactgattgtcactcatcccagtattcctatagctgcttttaaaacacatgcactgtctccagaagcattgcttgttttggcaaagaagacatagtcacatgggcaaaaagtctagaccgtgtctaatcatctccctccatcattggtgtcagactcacttcccaccatcattgtcccatgcaggctgatgctgccaatataggggctttaaacttgtctggcccagagtatctttgctgaagtggaagaactttatcttaggggaacaatgatgaagaaagaagtattaaaacggataccattattataaaggagggaggaaacaacacgggagaaaatgggagtagaatcagcaagggaaaaaaagcaaaatgggcaatcagagagaaaggaggccaaaggatgagaatggygctgtgagagtcataaatggtattaccatatgacctcagggagaaatgacagagtactaggggaagtggaaagaggcagaaaaattagaaacaagcaagaaaaaggtcaacaatgaaggagattaaaaatttttttttatttggaaatgacacacttaaaggtaaattgcaagaagagaatatagtgtgtctgattgacctgttactaacgttttgcacaatttgcatgtcctctttctctctacacgctcaacacacacacagtatttttctgaataatttgaaagtaacttacatatatagtgttcctttacctctaaatacttcactatatcttaagaataaggttattctcgctgggcgcagtggctcacgcctgtaatcccagcactttgggaggtcgaggtggacagatcacctgaggttgggagtttgagaccagcctgaccaacatggagaaaccccgtctctactaaaactacaaaattagctgggcgtggtgacgcatacctgtaatcccagctactcaggaggctgaggcaggagaatcgcttgaactcaggaggcggaggttgtggtgagccaagatcgtgccattgcactccagcctgggcaataagagcaaaactccgtctcaaaataaaaaaaaaaagtaaggttattctcttatgtaaccatgctacagtgaccaaataaaagaaattattaacattgatatggtatttttatctaatttactacctgcattccaattttgccaatcaattatttattaatatagaatttttctccaatacagaatgcagtctaagaacataatctggaacagcttgtgttgtcttttatgctgtttacattttagaagtacactgttttcacttttttcatagaattcttctcattttgtctttgtgcatttcctcatgattagattcaggttatgcagccccaggagggaygccgcacaagcatgttgtgctctcagggattcatagctggagacacgtaaagtccttctacccctcatttgtcgtgataattttcatcacccaatcaaggtgtcatctaattttactactatactactaattttactatagagttagtattttttcccttgcaacaggttttcccttgtaacatgtttaatctgtgaggagacactttaaaactatgcagatatcttgcttctcataaaagttttcctcatagctttagcatctgttgatggttttagcttgcgtcagtcttttttatgatggttgcagaatgatgcttttccagtgccagtaccccctcaagtttttatcagttagcacttggccttctgctgtaaacaggagccttcccttttatccatttatctattatcagtttgaatttatttctttttttcagtgttttataattcattactgaccttttcatgctcaaatttttccagaattggttagtgagcattccttcaaaccacccttgtgtccttttgacatgtgcttataacttttttggaggacttactttcagacacaggatcttccattatctccagggcagcttggtctcaaggagaattttagtaggaaagaaaaacagcaactaaaactataataccaaaagcctgaacagatgagatgaagtagatagttgacaaagtttcctgctttttagttgatataactcttgtagcttatgttgtcaaccctgttttgttgaatgctttttagttgcctgtaggtgtgctgagacagacattgccagcagggttttgaacacagggatagagatgtgtctgaatgtacgttacggtggtgagagtgagaaaggagacctctcctgagaaggtgaaaagcagctgttgaaaaagcaagaggcagtaaactgctcttgtatttcaagccttcccaccaccatttctctagtccagggggctcttccttttaacattaaaatgtgtgtcttctaatttcccagtgatccctccaagtctgtgggatggcctggaatgtaaaaacacttagcaaatacttagtgattaaaagaaaacaatggcggaagctttaagaattgaaaaatcaaaataataagtagagaatttgtccaaacctccccctgccgacattcccccatccccagaaaggaagaaaatgtatgtagataaaaggacagagaaagacagggaaagctgtggtacggaaagaaagagtgtggccacgagcttccagtatgctcactgccaaggaatcctgacacgttctgtttctctgtataaaatcatgaacaaataaaaaaaaagaaaaaaataaatasaatcagaaacgttttgcttagtgggaaaaaagctaattttatcttggttgcagttatccagcaacattatctggacacgtgaactaattttagcgcagctgctcacgtcagattgctctttcagcatgaagaatcacgagaagtcaaagaagcatcgggaaatggtggccttgctaaaacaacagctggaggaggaagaagaaaatttttcaagacctcaaattgatgaaaatccattagatgacaattctgaggaagaaatggaagatgcaccaaaacaaaagtacttctaaatattaaatgtcactagaaatacttatcacattcagagattgcattaaaaggttttttttgagatggagaatcactctgttgcccaggctggggtgcagtggcgcagtctcagctcactgcaacctccaacttgtgggttcaagtgattctcctccctcagcctcccaagtagctgggactacaggcacacaccaccacgcccagctaatttttgtgtttttagttgagacagagtttcaccatgttggctaggctggtcttgaactcctgatctcaggtaattcacctgcctcagcctcccagagtgctggggttacaggtrtgagccactgcgcccggccttaaaggctgttttatcccaaggaagttattctaactagaaaagattgtctccatattttctagttaatggaactttatagtgttgaagtggatacagacgtcaactataatatttatagaacatattatcactatattaaaagcagtttttatacctggcagttgataarctaattactrtccattgaactacagccttgtgttattctctaaaatgacaatgtgaatrctttattttccttttaatgctttaagatattaaatatttttaatcttttacttctgttttactactttatcactagtgtttcaacttttttttttttccrcttactcttcacagagtcaagtatttgacatttcgatttatatttgctcttaggctttctaaaaaacagaagaaaaagaaacagaaaccagcacaggtatgttagaaaggttttgttaacattaaatgccawcgataaagttgcagtgctcttatttattcagtgtagtctgtgttaaggagagaaacttatactccataattttatgttgattgtaagattgattaaaaaggaattagaaatattttccttttttagtgcttccccccccttgtatgtatgtaataacaaacttaattatgactgccagtgtgtttaacaagtatgcatgtagaattcccctggtatgaattagctgaattttcagtattttaaaaatctgaatacatctcacaaaaggcttttaagtcaagacaacaattaaaatcttgaaataggaaaatctgggattggtcatttttttatctcagtttattctgccaacaacataaacattgcaaaaggaacatttggttagaaacttgtaatgattgtgagtcttgaaaaaatgtttctatttttctgaagtttaagtaatttaaatatttcacagctgaagtccaaattcattctctgtcttaaggactatttttaaataaaatggtattatgttgttatacctataaaaataaagtgaatttgtccattttaccaaggacatttggatttatggcattttagtataatctagttatattaacttacattaagtattaaatatttttaagaaaacacattaatgctttttaataaaacttcagatttggtttatttatccaaatggttataataatatatttaatagtcttttttaaaatcagtttcctattcaaaaaatgatatatgacacatgagttaatcacttaaaattgtaatttggaactttttgcttcagttataaaaccgcatagcaaatatgtgttctttttataaattgacayctaccatcatccatccaaacaccttataattattagtttggaacactttctctttcctttgtgtatgtcagtaccattacagtaaggacaaaataaatggagagagatttatgtttaacctgagcctgtattaccttgattaatggagcatagattctattgattgcaaccataaacacatacgttagtattttcttactgatgaaaatgcttcaaatgaacaccccatcgtttctctcaaaagctatattcctttatagcatctctcgtttatgattcctgattgtagcaagttcagacctagcttgatgtaacacttttcctgatattttctaagctctttttgaagggaagggcagtgtggagaaatgtactgatagatttaagagcagacggcagcaaataatgagtatcttgaaacttgagattggggaagttttctgtatggccagaaaaattccataaccaacaaggaattgtacaagaaaaccctcccagattaaaactgaatgtaaatagaaagaaatgaccctgactgacaggaaagaaaatttaattcaagtaactcaaacatagtactctgactgaataccttccaagggatatagttgaaagataaaattaactgccaaaaaagtaagtcctgaatttagtatgttttttggtggtattggtgtggtatttttgaaagtaaatgagtatattttcaccaatttcatagaggaggcattgatgtgcagaaatgttgaagtatcacgtagttaaatttttctgttctttgttaatcacatatttaatgttgtgtctaagaaaatggttccaagacccatgtcatttctttcccctatattttttctaagaggtttgttagttatttttatgtgtaagtattttatttaaaatattttttgtatatgattcaaggagaggatccagctttatcagtgtagacatgcagttttcaccatgtttttttttttttttttgaagagattatcttttctctatcatgtgctcatggcaactttgtggaagatcatttaatcatatatagaagagttcatttctgtgccgtattctgttctgttatctgtttttctgtctttgtgtcagtaccacattgtttttgttattgtagcttttaatatgttttgaaatcaggaagtataatgcctcctctttttcgtgagtgcttggctagttatagttcataatcaaatttaaaaattttaagcaatagttctgtaaaaaaaaatcctgtgctattgggatttttatagaaattatattgaatttgttcacaatgtaggttgtattgacatcttaataaaattaaattatttgatccttgacccctcccccaaaaaaaggaattaaatgaataaattgtagctgggaaccatattctttttgtgggaagagggaaatacaaatataaattgaggaaaagagaagaagaatactgtagagttggattgaagtggagatgttggtatgagcccatgatttaaagaaagtaagtgtgtgagcagtgtgcattgtgaggacctagaagcagtgacacccctagcagtgagtacacctaatgcacacgttttggtttttaagttcacttttccatgaaaaggaaacaggcttgctctttggagaaatacctgatttcagggctgagactaggaaagtggaacgtgagcctagagcatcttatactagaaactaaggaagtgctcaaaaactgayggggatacgttagaagtactcaagatccagcttgcggggcctgccagttagggaaaacttgagtcatcaaaaggaataagggtaatagatcttcatacatkgcatttgttaaaaagaaatttatgtatctatattgacttttaaaatagtgagagctggccaggtgcggtgkctcacgcctgtaatcccagaactttgggaggccaaggcgggtggatcacaaagtcaggagttcaagatcagcttggccaacatagtgaaaccccatctctactaaaaatacaaaaattagccgggcgtggtgccatgcgcctgtaattccagctactcaggagcctgaggcaggagaatcgttggaacctgggaggctgaggttgcagtgagctgagatcacgccactgcactccagcctgggcaacagagcaagactgtctcaaaaaaaaaaaagttggagaaaggagataggaaagctttattattacagaaaaatattaattagtacaagtgcaaatgacacaagtaatagagggagaaaatcactcttctacatccaccagtatataaatgtttcaggcaagaatcattaatagatgccaagtatattcggtaaatggtcatggggacaggatattcacacagtctcagagtcacactctgcagattacttattaatttaaaaagggaaaacatactttacagttgaaaaatctggcaataccaccctaaccaaatgatcaaacttaataatatcactgaaaaatgacaaactcattttgcttcccgggattatagtattatgctagaaatgtttaacctgaatctgatcatttggaaacaaccaaacaaagccagattatgggacactctacaaaacatcaaattgtcaacatcatgaaagacaaaaaaaaagtgggggagctgctctagaataaaggagattaaaggtacctgacaactaaatgcaacatgtgatccttgattacaccccctatcctgtatatccctatacaggaaaaggagtaattggtaaatttgaatgtgggttgtgtaacagataatattagcattagattcttgagtgtgagtattgtgccagagaatgttttgattcttaggatgtacctggcaaagattcatatctgcctgcagctcactttcagatggcttggggaaaaaagtgtgtgttgggagagagaagagatggagagagcgagcacaaatgtgccaaaatgttgcttgaaaacagacaggtacgcttaggatatgtttgccaggcgtctttcttttataatgcctgtttgttgttgccattgtttgtgactgtagaagaatagttgctcattgcttatcatttggaatatggaaaagtatcatccttaattttacctgtagagattacttaataaagaattaaattgtgattacactatgtataattttctttcttctacttttgctaatatgttgtaagtattttttcacataattgagtatctttggaaacatgatacttaagcacttcagaatttttcttcatatattcagccattcactttttgaacatttggattcttttcagatttcccttaatttactatcactgtaatgagcatccatgttcttaacttacctgcttctcctttttatttcccgaaggtatataactatttggcaacataacataaaaagctagtagtagtattatatttattttgtaacggcacatatgttttattacctagaattatgatgacaatttcaatgtaaatggacctggagaaggagtaaaggttgatccagaagatactaacttaaatcaagacagtgccaaagaattggaagatagtccccagraaaatgtcagtgtcacagagatcattaaaccatgtgatgatccaaaaagtgaagctaaaaggtaagtcaaagttgcatattatttgtaaattactgaatattgatagtaaggatgtagcttttcatatatcaaataaaatcttctttcccatgactgaccaggtaatttagatgtatctgtacatatttatgtatagatacacacacacatatgtatacagatgaagagcgttgagaagaggatgctagaggaatgtgcccacacacatctcagcagcatggccaaaatcagaaagatgtcactttgatccagttcttgtttaccttatcctgctgtggcgctgattttgtcgtggatcattaacacttgacactcacatgagaacaagactcctgctgcgtccctggagtgtcactaagcaaatctccatgctcacgacagcagcctgtgttgggccccaccatgttgtgaggacacatggcagcagctggggcccttcctgctcagaggagccctggactcttggtgctgcacaaggccatggtgtggactaggaggaggtctcacccaagggaggtagccagtcctgttctctccttcctcctcttgtctgactttcttttccccatcctcctcggttcctctagaacagagaatcatttcttatttcttgaggaaagatctgatagtgaggagcttcaagtttctgtcattacagaaccctgaaaagaattaaagtgagagagcaaagtgggagcatgamgtgaaaatgctaacactggagcaacagtgatggggtggggagtgtgtgtacttcggagtttaaggcacttagtagtaggaaggaggaaacagatgtgggtgagacctacagtatgactctggctatagaaaaaggtatataaagaactacacaaactggtaatgttgaagctttgaagaactttggagagttgaagcctagaaagggaaattcacatgtatttcactctgacaccaggtgtttgttccctttctacaaatggggaaactgaatttcaggttaattgtccaaggacaaaagctattgagtagaaaggctgacacttcattccatctgcctgacaacttgaaggcacccagatcatctgactccatggagcctgtgtgtcctgtgggatgggcacaaagagtgggccaggaggtggggctctgggcccctgaacccctttttcatctaaaactaaaatgttttccatgttacttcttttttttttttttttggagatggagtctcgctctgttgcccaggctggagtacagtggcgcaacctcggctcactgcaacctccgcctcctgggttcaagcaattctcctgcctcagcctctcgagttgctgggactgcaggcatgcactgccacgcctggctatttttctgtattttagtagagacggtttcaccatgttgcacagggtggtcttgaactcctgacctcatgatctgcccgccttggcctaccaaagtgctgggattgcaggtgtgagctaccgtgtctggcctccatgttacttctacatgagaattgatctggggaggaagaagggttctcaggcttgggcaaccactgatatagttcagctctctaatttcactgatgtgaggaaaggattcagagaattcaagtgacttcttcacagctgcagaatggcagrgctaagatagatacattatacccagcaccctccccacaccactctgctgtcccctggatccagggcctttatgctggcagctcctctgttgcttctctggagtggtgtggacactggccacctactgagaagtgtttttttaaaaaatgtgtgtgtgtgtgtgtgtgtgtgtgtgtatagtatttttaaaaaataaaggtcttagatatcagcttcagagatgtaactgtctttcataatataagtgatgtttgccaggaatattatcctaaatttgttagacatatttctgacatatctgtgatgatagtttgaaaattagtatgtattatttgttgccttttatgccattgtgtccttttcttgatgttttcaaagctggctgaatcctacacaatatgttacactcctaatctgcattttttaaatgcataggccgtttaacttagcacagactattggcctctgcttgaagaatagtatacctataaactggaagcattatcatcacttactcattataacccatcctgtctgttctgtacagtatagttggacccagatttttaccctatgaatttggttagcacaaatgggggaaagtatgaaatgccaaggaaaattgaaattcatgtaggagatgagtagaggaatgttcaggagttcaagcagaacaagaggaacccaactataccgtttctgatctaaatggtatggtggggaaaaaccatcagatcaacagaaaggacataatttttaaataaaagtaacttccttatattgagcaaatttaattttatgaaaaatgcattacaaagtctttgtttcactcatttctctgtgcgactattgaagtgtttgttaaactggatcacgtccaagaagttaatgttaggccaggcagggtggctcacgcttatattcccagcactttggaaagccaaggcgggtggatcacgaggtcaggagttcgagaccatcctggccaatatggtaaaaccctgtctctactaaaaaatacaaaaattagctgagtatggtggcacgtgcctgtaatcccagctattcgggaggctgaagcaggaaaatcgcttgaacccgggaggcagaggttgcagtgagccaagatcgcgccactgcactcgagcctgggtgacagagtgagactccatctcaaaaaaaaagttaatgtttttggggaaccacacttcatgtcagatcatttatgattaccgttggttagttttgaagatggtttgctcctttaaatggagtattaagtgctttgtgcttttttttttccccctgaaacagtcttactctgtcaccccagctagaatgcagtggtgcaatcttggctcactgcagtctccacctcctgggttcaagtgattcccctgctcctcctcctaagtaactgggattacaggtgcctgccaccacgctcagctaattttttatatttttaatagaggcggaggtttcaccatgttggccaagctggtctcgagctcctgacctcaagtgatctccccgccttggcctcccaaagtgctgggattacaggtgtgagccaccgtgcctggcagtgtttttatgaaaacactgtataaaacattctgtataaaacactgtattaaacactgtataaaacatttatctctgtataaaacattcagagatattttaaggaccttgttttaactttgtttcaactgttttaaggaaattccttaatttttgtgccaaatttgatattcaatttgatttctgaagttgctttttaaagatgttcatttaagatgtaaagattatttaaattgcctttaaaattaatgaattaacttttaaagtgcagttcacttttttgagtgttctagagagcactcaaataatgatggttaaaaggagtatgttatttttggattatgctgaattatttattttccagtgttcctaaacccaaaggaaagaaaaccaaagatatgaaaaaacctgtcagagtacctgctgaaccacaaacaatggtaggtcaaaatcatattcatatctctttagcatatcttgctgtttaagcagtataatgatctaaagatggaaatgtgtatttggtgagccattccgcaaagagcctgcaaagatgtggatccatcaacagttttgtttgatataatgtatctttttttttcattaaaataaaaagaagcacattggaaatgctagactgtaccagaacagttactgttgttttctattacttttcaatctaaagccttggtgataagaattacatgtgtcaagttctggagattaattgtgaagcataaactcttcctcttttttagtccatgaggtacatgctattgaaagtctcaggacccttaaagttaatcgtgttgattagtgggatttaacctccaagaacatctgcctttgttgaacgtgtttattacctgtccactctgttaaaacatctttattttacaattgtttgatgcttaatcttgayattaaaacctaaaacactactttcaagtgataacgcttacttttatttatgattttttgcccttctcagagtgttcttatcagctgtacaacctgccatagtgaatttccatctcggaataaactttttgaccatctaaaggccacaggtcatgcaagagcaccttcatcatcgtctttaarcagcgcaacaagtagtcaaagcaagaaagagaaacgtaaaaacagatagagattctgcctgtgcttttgtttgactgtctctagattttgaaaccaaaaaactgaactgaaatcatctaaagagttaaaatttcagtgatctgcaattaattacattgtggaagattattttttatcttgtaaaaacacttttttggtttaatatatatttttaaaacatttcactagtgattgaattctacttttgccatctgaattgacttgaatgtcttaaaacaggtaaatactgtaaagtgtgtattcttgatgtttwttggctcatgtggacagaaatgtacagggagaattacattattttaacacacagaagtgcaactttctgctttattttctgaatttcacattacttttacttaatgcttttgtgttttgttaatacttcataatatgtgaaaaactcggatcttttaaaaagcatcatagatcatttttccatatgacactggttccgattttaaaaattatttttaaataaccgattattgattactgtattttttttctcaagaacagtgataggtagaaactaattgaacatttggtagtctttcaagaatagtgtctcttcaaggttttacttgatttaatttgatattttactggtttaccagtaaggtgtattgttcagttttttgctccgatttgaattgtggaggtggaagcaaattagtttacatggcatgtcctccctaggcacagtgacagctgtaaagtatgacggaacaaggtagcagatggtacagaatttatactatttaagaagagatgtggtgttcttcattgagtttttttcttcactattttcagaagtttttgttctttttttttttccatcactcagtggagaaaagctttgttaatgaaagattttgtgatagagctgatgcttatacatctattctataacagtgatgaatattaacacaaaggaaatatggagaactgttataactgagtgttagaacagtcgtgtacattgatcagtattgagtccatttttaggatggattagtcagttcttttcattggtcttgaaagtaattttggctggtcgcggtggctcacgcctgtaatcccagcactttgggaggccgaggcgggcggatcacgaggtcaggagatcgagaccatcccggctaaaacggtgaaaccccgtctctactaaaaatacaaaaaattagccgggcrtagtggcgggcgcctgtagtcccagctacttgggaggctgaggcaggagaatggcgtgaacccgggaggcggagcttgcagtgagccgagatcccgccactgcactccagcctgggcgacagagcgagactccgtctcaaaaaaaaaaaaaaaaaaaaaaagaaagtaattttaaactcactggcttgaaatgtgtgctttctgtacaatgaagttattgctttccatatatccttgaatcttcagattaacgaaatgaacaaattttcggttatagatcagctctcaaacactaaagtccttaatggcaaggtcttttctgatagcttcatggatagtattgatgatcagatttcttctgtgttattgtcttaaaaataagcatttgaaccttaatttaaattcttttcttttccatttagagatatgtttttttctttaccttcatacctttctatttcttgctaatttctatcactaattccttataattgtccctgctccccttcttgatctcttcagggggaatactaggcagttttgtatcttctgatctcgtaccctgagacttcatctgaatgtgctctgccgccttcttatctgaactagatgaattggccataattatgaataggaatattaatgaaccagaggacatactagtcacatgttattatacactaaaaaataggaagtcatcttgaaaggcagttaatgtactgcaaatgtccctatgacttctttgctttctcttataccaaacatgcaggtatttaatttgtttaatgagggttgagtggagttatgtgtcgcttttattcggattgacgaaaatcaaccataattttcaagggatcttcatgggttgtgactggaagctgaccttagtcttgcgtctcatcctttatgatgttgagaaatcatctaatttctcagaactttttcttatctctaacacagttattaccataataatattgtctccatttatcatacaggatcattatgaaagtaaaatgaagtagtatatatgaaaatgctttttaaacacaaaagctttatacaaaatattgttgaatttaaataaggtaaatcttttttagtttatatatttgcagactatacatgttggattaaatgggcaattaagttttataggaatttgcttcctaagtctacttttgaagaggaaaacaggaacgtaccatatattttgctaagggtaaaatatttttggtgaattgcagacatttaatttcacttgtctgaggtaaaacaataaactaaaatacatgggcatgcatcttacactgatcttattagaggtcagtgctaagtacccatcttgattgaagttagctcagatgtggagattcatagaatgagggtccaggagaagaaagttaggggaaatctcattttctctctgtaattcattcagtggtgccaaagctgggggttccctacaatggctatttagactttccctgcttcaaaataagagcagtatccttagctctagccaagcatttttctaattcctgcctttggtcacaaagaaggaaaagcagagctgtgaatgagttagtggaggtcagtcacatcagagttcatgacctagtgattgctggtgaagtaatattggaattttggtaccatgagaagacttataaaggatttcatcagaagttttcattttttctaaatcctcccctacaaaattttcagattggaaattactcttgtatttgtagaagattgtctctaaaattgtggtttaactcacgcaggaagtaaaattcctatagcaagacatagtttcattttagaggacccccaaaatcccgtgaattctctggtgatgattctagcctaaccttcaacataaaataatgaagagaacttttaaacttttttatgaattcctaaacattaccatttatgtggcagaagttctgttccctataatctgcaatgctgaagtatctctattcaattcccttccttatctgttaaatttaatgtctttatactaaaaatataggctcttgggattggagaggaaaaattagaggtgattttcagatttcttgttctatggaagaggaagctgagctcagggagatatgagctccacagccacagctggttaggggcggctgccagtagaacagggcagatgcctggactcccaactcagtaggccttctgttacacctcaaaatgtgttacatgggaagaaaaagattaagaaaaagcaagataattttgaagaaggacgagaggaagaggcatgaacttgtcctaacaatgtcaaagaatattttaaaggtataccagttaaagtagtgtgtggctggtgccagtagaggtcagtcaagggatccctgacgagaataaagagcccagaaacaggtccatgtttatatgggaacttgatttttgacagatacggcaagctctatggggaaaacaatatgtactaccttatacccttccccaaaaacaaagggattaaagacctaaatatgaagacaaaacttttaaatgagaatctataaggttattttcatgattttgcaaatgggaaggatttctttaaagcaagacacaaaagcatacacaggaaaaaatgatgcataaaaacatggcttctgtagaacaatagagactgtaaaagaacaagctacagacaaggaaatgtttgcaatgcatggaactgtcaaaggattcgtatctggaatacattaaagaagcaaaagaacctcatacaaaagtcattgagtaaatgacagccatgcattagaacagcaattctcaaaacttttggtctcaagatccctttacactcttcaaaagtgagaaccccaaagagttttcatgtatgtgggttaaatctattgatattttctgttagaatttaaaaattatgttaaaaaaataagaagaatgactatttttcaaaacaaaaaatgagaagagtggtattgttttacatttttacaaatctctttaacatttagcttaataaaagatagctggcctctcatacctgcttctgcagtctattgctgtgtgttttggatgaagtatgtgaaggagaaaatcagcctcacatggataggtaatcgttaaaaaaaagggaccttgcagacccactgaatgggtctcgggaccgctagggtccttggaccacacttaaaattgctgcattagaaaaatggatgaattatatgaacagaaaaagcctgaatagtcaaaaaaaatgtggaaagattattactgtcctgataatcagtgaaatgtgacctagttttttcatgctttcagattagcaaaaggtaaaaagtcacaagatctagtgttggtgagaatggagcaataggaacacattcactacttttggagtaaaaacgggttcaatttgatgatgtctaagaaagtgaggtttgcatactctgtgacccaacaattctaggtatacacttaagagtctcacttcccaaagtgtgggccacagagcagcagcatgggcttcacctgggaagcttgcaactctcaggtcctgacctggacttgctgcaccagactctgtggttaagatttcttaggtgactcatgctcatgaaaccttgagaagcaatcttctagagaaaccatgcacatgtgtacaaggagatgtacaagaagcctcacagctgaactgtttgtttccaggaaaagttacctaaatgctcatgagcaagaaaatagataagtaaattgtggcctatttatagatggtaaacaattgagcaattaaaatgaatgaacttgatctgtaatgtggatggcccttgaagaaatagtgaatgaaaataagctgtcgcagaagatgaaatgcatgccatttatacagttttttaaaaaaactatgttgattgttatttatagagagaaagtatagaaacataatgagaaagcagttgccttgaactcagaggagagtagaactgcttgtggttgcaaaaggggtctcttctgtttcaatttttttttttttttttttaaagatctgaaggaagatgtaagcatttgttaaattctggatggtgggtccatggggatttgttactctggttctaacaaaatacttcaagtatcaagaaaagtacagatgaatgtctcactttgctagcagaatatacacttgaatgaaggggaagatgaagggatttaagttctactttttattcttggcatactcattaagcacactggcagaggctatggtctctcaatattcatcctcccttttagaactctgattttcagataagtgcaaggccacccagaatataaggattactttcccagcctcacttggattcaatcagatctggctagtgatctgagcaacgtttgggacatgtccttaaagataggagcatgtctttattccttcgccagccaaaatgcagaggtaatgtttggagctctggcccctatctgggatcgtgaaaccacagagggcacagcaacaaaaaacataggagcttctactcttgacacctcagagggacactaggagccccagattgtctacgtctgcactggagagaagaaaatttctacgtttctgaagccactgctgttttgacctgtcacagataacaaaatcctgactgattcatgtttccacatgtgtacagttagctaagtgagaggtctagtttaaacaggggcgagggcatgtgggcatttaactctcagatcttgcattgaattccagtcttgtgttagcatacgattttaagcaagtcatttaaacacattgagcaatgtttttttaaatctgtaaaatagaggtgagaccaatctggcagaattgtgaagattagagtcttaaatgtgtgcacagtgcttggcacgtagtaggcattcaataacttagcttttgtttacttcaaaagtttcacagtattcttgcttcatttaactgttcactttgttttctgaaagaatcccaacaatggagtaatctggagaggtatcagtgattaaattgatcctgtactgtattttttttttttgagacagtctcactcttgcccaggttagaatgcagtggcgtaatctccactcactgcaacctccacctcccattttcaagtgatactcctgcctcaatctcccaagtagctgagagtacaggcatgccaccgtgctacttgggaaatttttaagtagagatggttccaccatgttggccaggctggtctcgaactcctggcctcaagtgatccacccgcctcggcctcccaaagtgctgggattacaggcctgagccaccatgcctggccctgtactgtattttttaagatactgttacatatatgaaattcttctggctcaaatggaagaaaatttttaaaggctaaagctagaagctgtcttgaagatcagtgatccttaattaccttagaaggctcagtacatttttactttgctgttaaaactagttagagggccccacatcagtgatgtccttttagataccatgtgccttctgaaaatagaaaagggtcaaattaaattattctttgcactgcaaatcatttgaatgttacttagggaaaatttcttttctaacaatttctgaaaatgaaaaggccgtagaaactcggcatttagaaaaagtggtatatagtttatagctctcttcagatacttattttcaaattaaataagaactcatacttttgtgagtccaaaggttacagttatctcagcatattgtgaagcagaattcccaaccgttccatccaacaatggaatcggtatcaggatgtggttagctccctgtaccagcgagtgtacagtcagagactggccagtccccttgttacaaacactgtagaagaatgtgacagcagctgctgtggccagtagattgtctacctgtagttgcagagaagcccaagagtttgatgatgaggcagcagatttgaaatctttctacttttttttttttttttttttgagacaaggtctcactctgtcacccaggctggagtgcagtggtgcgatcttggctcactgcatcctctgcccgggttcaagcgattctcaagcctcaacttcctgagtagctgggattacaggt

SEQ ID NO: 98045 - DNA, 32433 bp, Homo sapiens
ggggaagccgaggcaagtggatcacttgaggtcaggagctcgagaccagcctggccaacatggtgaaaccctgtctccactaaaaacacaaaaattagccaggcatggtggcacatgcctgtaatccaagttactcacaaggtggaggcaggagaatcgcttgaacccaggaggcagaggttgcagtgacccgagatcacaccactgcactccagccagggtgatagagtgagactgtgtctcaaaaataaataaatacataaacaaacaaacaactttgagacattttacttcaaaggtttagattagttcttatggaacatagctaataatctttaaagtcctttattacactaacagttcatctggagtaatgatattctaataaatgctatattttagaagatacataatattaatatctttgtcaaatatatcttagaattaccttctctgtcctctttataatatgtaaaagaaattgatgagtccagcatacgcttcatcttaaatgaggtgtatgagaaacatgctaaactatggttccctatctctgcttcacaatataaaggtgattccagaatttggaagcctcaactgtaacaaactagatgaagacagaagctgattagataaactgcagtggtcaggaagcctcaccaacagagcaaacaacctccatcttcagctgcttattgagaggccataatcctttgctgcaatacatacaacagtggctagactgaacacagagaagggacatctgtttcttaggcctgttctttctcataaatgattgatggcaaatatggaggagagtgatctggatgcacaaagaaacttgaaaattttactctagccaattttaggctttcgttaattcaaagctgtatctgccatacaacaagaacattttcactagatcaaaagaggaataagaatatctgcaggccttgagatttcaactattttgccttttaaactatatattagctgaacgtggtggctaacataaacataatcccaacactttgagaggccaaggtgggaggatcacttgagcccaggggtccaagaccaggctgggcagcatagtgagaccctgtctctgaaaaaaaaaaaaaattagctgggcatcatggcacacacctattatcctagctgctcggaaggctgaggctggaggatcacttgaacttgggaggttgaggctgcagtgagccatgatctcaccactacattcctgctgggtgacagggcaatatcctgtctcaaaaaaaataaataaataaaaataaaataataagataaaacaaataaagtatatattattcaaagtaccctgtgtcttgaactttgtggatcaggactcacagtaagaaatatattttacatcagaatccagtacacatccaatacatatacaattaaacaaaagttcatgaacgttacccttacaacatgtagtgaatatgttaagttgctattttatgtcatctttttaatgctggctacataccacaaatttgagtaatgagtcatcaggtacagtttgagaaacactgctgtacgtatacgtgtggtctggcctctgcctacctccctaaccacatttcatggtattttgcaccatattttccctactgcagccacccctgcaccatcccaccacccagtttctattattttattacattgaaccataagttcctaaaatataccaatctcttttctgcctcagggtatttgatcttgttgttagcgtggcctggactcctccagatcactgcactttgtattatattatgcaggtctcaatataaaagttctttccacagagaggccttcattgaccacctaatttgaaagagccccagcctgcaatcccggcaggaggagtgggaacaggagttcattcattgcccttagcattcctgggaagtttgataacataatgtaagacaggcaaaaaccaaaaacagtattgagcaaatgtcactttctacctccctatgccattgcacaggtcatagaattctaactattgaaattctattccattttcttcatgacaacttttctgactctgactgagaagcagggactcaattgtacaatttgccccctattactttgtattctctcagaccacttagcgcattctttcttattttgtattcattccgcaaacatttgagtgcctaatatgatctaggcaatactgtgaacaacataagcatgaattcctccaacagttcacattttagtaagagtgacagatctataaacaaataatttcaaccgaatgaggcaagtacaataggagagatgtatactacataaaatggtgacaaaaagaatgaacaatcaacctctttttctttttttcttgatttcacagtgtggaggggaaagctctgaatatctgcatagattttaaatttgtatttatttatacttttttagagacaaggtctcgctatgttgctcaggctggccttgaactcttggcctcaagcaatcctctgacctcagcctcttcaatagctgggactacacacatatgccaccgcacctgactcgactcaaccctctttgagtagggaaggaaggcatcacagaaaagacacctacactgggtctggaagtgaatccacctttgcaaaaattataacagtgagagaaatctaacctaactgactccatattgcttctaacctcacaaagctaactgcccttgctcatacctgggcataggcaagctaactatgggagaaatttatagtttaactttgaagcaaggatggtaatagtcccttccaaaactgaccccctctagggactaaaacagccttgtaagactaatagaaggccgcaaggttaggactatgggagggacctaaaatctgctaaaatataggcataggtaagcaataaccagctactgttccttgcttttctataatttcttactattcagaagtcatgtagccagaggtcacaagatttgtaacttcaccaattgctcctttagataacatcactattgtaaaacctaagattggtcttgagatatttttcaggcttctgcattctggcaaacctcctgatgccacccagatacatgcctcataccaagaaactgactctactagtcctatgactctcacctagacaactgactcagcacaggaagacagtttggaaacacctataaattcatccccaaccaatcagcagcgcccattccctaccaacctgcccacaaaattatccttgaaaaccacaacttccaagctgtcagggaggcggattttagaaatatttcccatccttccactcaactgccttgcctccattaaactctttctctgctgcaactcctgcattctcaatgtttggcctttctgggaagtgggcaagaagaacacgttggcctgtaataggagaataaataagtttggcaagcaacaagagggtgcaagtattctgtgtagaaggaattgcaagtgcaaagtagaaagaggaggcatactaccagtttgaagttgcttggtatgttcaatgaaaagcaagtagctaaaaggcaagagaattttttttttttaagtatggaaagggaaaggcaaaagctagacagaaaagtgcttgttcatggaggaacttgtgtgccattctagacattttactgtaggaaatagggaatctagagttttaaggaggtgagtaaatcaacaggttgggtttttaaaaattccttcttgtggcagagaaaataatggattggagaatttccagaccagactgtaaaagtcactattaaaataatcacgaaatgaggagatgacaaactaaaatttgatctagtgaacaactgaatatgggagaaatagaagagggaggaatgtaggataactctgatttctagtttaggttataatatagtagtagcattatttaacttggtgaaaataggagaaaccaggaggaaagatagcaagttcagttttggtcatattaagtttgaaggacatttgagacagatgtgtccaggaagcaactgagttaggcattagtagatctgagaggaaaattgaaatttagaagcaaaatcaaaggtgttagtagaatccatgtgagtggacaaaatcacccaaggaaaatgtctagactaagaaatgaaagtaatcaaggagttaattccaaagaatgacattcaaaaaccaggcacagccagtaaaaggaattaatgactatgaacctcagttgtcacaaagagactaagtaatgtaaattttgagaagtaattactgtatttggtatttaaaaggccattagaaacttaagcaagaacaactttcttgaagccattaaagaagccagacagaagacttttgtctgtttgatataagtaaaaataatatcctttcaagaagtttactgatagataggaggactaggaaataactggataaacacaggatggaggacatggttttgctttatttaattttcataagatgtgtgacttgagcactgaagagaagaaactggagaggaaaaggctgaacgcacaggaaagaaaaaaacaactggaagcgaaatgtaacagatggaagcaaatgagatcaagagcaaagatggatggattatcctttaatatccctttctctacactagaaatacaagactaaaggctcggcaaaaatatagagcaatgtgtaggttgggggcatgaggttgaagaaatggcctgttatactccatcatgtttagaaaggagaaatgaagagggcaaaagacagggtttgtaaagggaaggtttgaaaatgtcttcacagagaatgggtcaggggaaaactggggtaaccaaaaggattgctgagtagtatgaagaaacaaggggtggtgggtgagggctctgtttctaaattcatagctataactatctaaagatctttctatcctccagtccgttatccataagtgcttaaaagatatggtagttaagtgaattaactagaaccctctcaaacataggggtgaattaaaataatctataggcttatttaaaatgcaaataccgagctccattcctttcattcagaatttccaggggtgaagcccaaacagtgaagtccagaagctctccaagcaatcccaggagaaatttctgtttaaaaaaaaaagaagaagaaagaaaagaaaagagaaaagaaaagcaagcacagacctagaaggtaaccaactggatagaagagcgctgatccaacatacacctgttaatggccctcgtgggggcgtggggcagtgctctgccactcagaaaagcaaaaagactccaagatctagggagattcagatcagtgttgagacagtcacatacacaccaccccatactcttaataaagcgcgttaatgtgaatctgtgaacatgaaaaatgccatgatgaacaatgcaaacacataatgtttgttcaaaacaggttattagactcgatgccttaccctaaattttctgtttcattactctagagacttagtaacattagtggaattcagggtgctgtaagaaatacggagagcgaggagactgcaggaacagcccgtgggaagggggaaagagataacggggagaaggtcgggaggaccggacaactttaagtgcccatccgcccgaagacttggaaagctaagtaagtaggaccccagagccgttcttctggcatcccctggcactcaccattgtctcaggatctcagcactagaaaataggtatcgttgagacaggaagacaccaccaccaccaccatcatacggttactcaggcaacaaagccccgcccactgtcgcacgaggcgtgggacgccaccgccccacctcttcgtccttagtggctgggagtaatctcagctgcgttcatccaatcgacagacccgcccctccacgctgtcgcctggggctacgagacgccattattctgtttccggcagttttacttccgtttgtttaacagctggcccggaagtttaagtgaatatgcggcttgggctccaaaagttgctgtacggtattttattttaaagtagaaatctgtccgcttttcacttacggaggccttacagtgtgtgttctgtgttacttgagtttatacgcactgcagaatttgtttaycctgctcttttggaaacgtattccggaagcgaaaccctgagtaatcggaagtggttaggagtgagagagctgctggatatgcggagggactgggcgggtcggcttccgaatggaagaggtctgtgagaagttaacctgktgataccgatccgaagagcctatcaagtgaagccccctgaaatacggagaataagaatcttagaggtaaatccgaggacaagcaggtataactaaggatgttggaaagggacggaggtctggytggagctcggtggccagtagctttggatttagggaaagattgttccgggaagactttttcagacagggatgaaacttaggtttcgacttccccggacagcaaagttgacaggcttgtcgcttcccggcctatcgctttcatacctgctcactccccctacttacttcttcaccccctccgcttcatttggcatttgccagcaggcactcgctgtrcctgtacgtttcgcagagcagctatcaagggcagtttcagggatcgttactcttacgaagggttttttggatacctcttttcggagcagtagagtgtaagtgtagaaaagtttgtgactgttaagaaagttagtcgtcgggttcactaattgaactgagttgtatctagtactgagaacgatctttttttgtrgtgaaaccagttgtcatctagtgtacagtttgtcatatttatatcattgcagtagcatcaccttcttatatgttctctggtaaatctgagtctgtactgtaagacaatgtatacatttctgaaagcatgggctcgatatgtttctctttttacttttggagctacactattttaattttaactttttattaccaaaaaagtataaattatgttatcttgagtaatattttttgtcgtttgttaaacatctaaacagaagctcctttttgatatgtgtgtrtgtgtatacaaattgtgtcggtatgtctcctaagaaagtaattactttaaaattcctcttgtcatatggatgacaaaaccaccacagtaacttcattccctttgcttggctaaaattcaggacatacttctgacaatttagagtgtattggtgaggatggtgaaacggagtatttagaagtaaaccacccctaatttttttttttgagacttttagtagacataacaatgccttctgtgagaatgggatataagggacatttctctttctaaatgcatgcgtactaaatacagaagcaattaaaatatcataacttttaaattggaggtactctatgtgtttatatgatatttttaaaattatttcatatgcatacatttctaggttgttcagcagaagtcttggagtgcattttcagtggttaaggtgaaaaaatgactactaaaaatttagaaaccaaaggtaagtggcttttttataattgtttttaaaacatgacatttatgacgatgtgaaggaacgtttgagccagataactagatctcatggacccccttgggaatcatttgttatttcagatccctttatgtttattttttagtgcagtgtttatatttcagtactttagatgtacaagtgaaatttaacatcattagttagaatttattaggtgactactcttaaacatttaatgttaatgcaaartttttaacagctatattccctatacactagaagattacgatttaaataagaatacacattttaaagatttaagtagatagacaaagcaactagggtgtatcaaagatctctttcatgttgtattagtttgctggggttgctgtaacaaagtaccacaaactgcatggcttgaacaacaaaatgtattctctcagttctggaggctagaagtccaagatgaaaatgtcaacaaggctrtgctccttcggaaggcattagagacactctcctagcttccagtggcttgctggcagtctttggtgctccttgtcttgtagacgtaccacccttatctccgccttcatattcacatggcattctccctatgtgcatgtttctgtgtctaaatttaccctttttataaagacagcagtcatattgaaaaaaggaacccagtctactcctgtatgatttcatcttaactaattacatctgcagtgatcctgtttccaaatgaagtctcattctgaggtagtggggggttagtacttcaacaaataaagatttgggggacacaattcaacccctaaattgctaaatayagtagtcactttttagtcctagctgatttgtcctctctaatatttaatactgttgaccattccctgccttttgagatacgttcttttgatgacttccatgacatcacttttattttcagtctactctgtagcctttcactgtccaatgcggtaattacatgtggctatttgaatttaaattaatattttttaaaaattaaaaattcagtttctcaatgacgcttgccaaacttcaagtggtcggtaggcaaatatggcgagtagctatttcaatcattgaagaaaattctgttggacagccctgctgtagctgtatcttctctctttctttttcagcctcttctccttcttatttatcttttaaatatcaacactttccaccactgtttcttttctactctcatgacttcagtaattatctatataaatgacttccaaatctatctatatccctaatctccttctttatgattcatacccttatagactactgcctactggccatcttcacatagctgtaggcaacaattttaacatgtcccatagtgaacttctcctgacccagcttattctttggatgggttgagttctgcatgctagaaccatcagttaaagatggaaaactgttttctagatgccaatttttcagcaaactgacctccagccacaaaccctctctaaaagcaggttgaaataagtttaagaaacaaggaagaaagatcatgctaataaatatttaattgaatttaattcagctttgcaacagcatttcataagtcaccagaaggcttttataccattagataagcaagtcagagactgtaatgaaagtaataaactggggattaatgggaaataagagcagttaaataattaatgtgaaagcaaccaacatggtgcttgtcaaaaagcaaaaactaaatacaatattatgattagtcattagaagtactggcaagttctctgtgaaattaaattactttttaatatttattattacttgtttttaatgaggattagagttataaggcactttaacaaacattattttgtgtgatcttaattatccagtaaggaaaataattctattagccatatttctatttaatctgtcatctgatgttagtgaacaaaagttacttgtattgcatggcctgtgaaaaggtgtacttggttgacatttgtcagttgtctgtgcttcctgtaactgcctcaggagataagtacggttgtttggtatagcaacagaacttcctctcagaagacatttgagcagcactgtcatcataagagggttgtatcatggctgctagtgctgtttctgaaagggaaacatacagtaaatagtaacaattagaaacttaaaatccaaagcttttcttggatgtgggattaaaattgaaaataaagctattaaagtcaactagtttagtaatagtagaccaaatagaaaggtctgagacatttaaatatttttgattccataaaatagtctaacactagttctgtagaataataggtgttaggtaaaaaagatattccatgagcagataaatttgataaatgctgtattaaaagagaggctatactatgggacctctcagagtcctatagtataactttaatactaatgtacaytgaaactctgyagagatgcagtatgcaacattgcccacacttatttgaccagggatctctatccatagagcctgtggtaagaagaatgcttagattccacttcagtaaatctcgatgttactcttaagtccattgtatgtaacttattttactaatttaataataactaaactttattaggtgatatgggtgacatttaaaaagactmttgatttaaaattaccacatgacaatccctaatttgtttaactgtatcatagctgaatttgtatatgttctggaaagtctttcagactataaccaagttaggaattaatgatttagggtagaggaaaaaaaataaagcagtttttaaatgggttagtttttggatgttaaaaatgaaacactctaggtagtgtattaacagactaatgagcttcagtaagcatttattcattttctctgtgacaaggaccattttattagttcatgacrcaaagattaggaggcggtccataccctgaagagctcccaacagtctagtctacaagagaaacaaattatttttaaaatatatactaccatgtttgcattactctgaaagcaccaagggatgggaggaggatgaggttaagtgctttgtccaaggtcacacaatacatggcagtagggacttaagttattttaactcaggctctagtgagttagatttcttttcactaccccattctgctgacttagagtacctctcatcatagattgaagttttatgaataaaagagaaatatttgttcaatgacagacaataaatttttttttgcctcaatattctagagcaagggttggcaaattgtggccctcagcctcctgagaatatctgcaatcagtttgataatagtggacattaacactatttaagccaaacattatcctgaattaaaaaaaaatctgttcttcccattattagacctatgttatcaaaaaattgttttcaattattgttgttatagtttgaatttcatcaataaattttttttctcttattaaatacttacatggtatcctcaattttaccttttggttcacaaagcctaaaatatttactctctggtcctttacagaaaaagtttgccagctcccatcctagaatgttagactagtgaccttctttgttctttccctacatttcaccaatcctggtaggcaatacgaatgagcaaaccttagatatgttttaattcattgataattgatcacaggtggaagtaatgatgatgaataatttaaggattgttttgttggttcccttcaaatagtggggaagaataaggattggtgtttttcttgacttaagcgttactcataattatggagctgttaccataggtccttgtcttcccaattgagagaaggtaattattcgkaaatgtgtcctggattgtgcctactgcatatgtaataaaggtttctaggtatgtcacaaggaaaaatcgaattacgaaagttaccaggtgagaaaatgttaagccctggctcttacggcctgtttacctatgcacattagctagaatcatagttattactgagcgggagctctcacgtaatatataatacaactttgatattcataaatgcttgagtaagtagaacagtttaaataaagttaagagtaaattggggtggaaacaagttggttgaacttcttgattttccaacaaggtattttgttcaaaaagagatttctgttaaatacctattaatggttctttgccttttaaatttaactttaatcattttgtaatttgttcttgaatctctgttacttaaaattccaactcaaaaatgttacagcttgcctagaaattttatttgaccataatggaagtatcacacctgttttttatttcctcagcctcagtgggcctgaaccatggctgtagtgcgtgtttttattgttgatggtttttattaatttatagttaatacatgattctgtgttacttcttaaatgccagaatgtcttattgacaagattagacaagttagttaagtttagacaaacttaaaatcagattttaagaatacaggtagctgggtgtgatggctcacatctgtaatccaagcactttgggaggctgaggccagagaattgcttgagcctaggatttcaagaccattctggacaacatgatgaaaccctgtctctacaaaaaaaaaaaaaaatacaaaaaaaatacaaaaaattatttggtcatggtggcacatgcctgtagtcccatctacttgggaggctgargtrgraggatcacctgagcccaggaagtcaaggctgcagtaagctgtttttaaatgattcagtggaagttctccttgtcagtgctaccatgctttgttttaactaatttaccaaacccagcatgttaggcctttatttcactttctgaagtattcctttgtttatctttttaaaagtagagtcaatcccaaggcccaaggggtgtttaaacttagtttacatttcatatggaaatgacacgattttattctaatgtaaaatgttttgtaaaatagaacacattaattatacctcagctatgtttccacctcctgtctaattaacataactcgaggttcccagaacatttctacatgggaaaaatttgaaaaaagtaaatctgttacttgaataaatagtcctatagtctagcaatataactttaagatttacataacagaatgaaagtcagaattgtattttatggcattaaataaattaactttatttctgtcyatatcaacatccaaagtttattaggaatttatttaaagaataataaaagcaataggacctaacatttaatgagtgcttactgtgtcaaataccattctaaacagtttacatgtattcttatttatttttaagtacaatataaatcataggtattgagcatgcaaataaataaatagtaaggatattaggcatagatccacagatacactggtagagtgattttcgaaggcatttcggccgtacagatcttcaccaaacccattaattttatgcttgggaatttatttgaaaaaataactcagaagttaagaaaaatatgtaggcataaaagtgttcaataaagccttatttattatagtgaaaaattgtaaagagtctaaatattcaacagtagaataagaaagtaaatgctatattaacttgaagggaatatattctagccataaaataaaaaatatgttaagcttacgaaatttattactgttacaagtataaaaggaattctgttttaagtctttgttttaggagattacattacacacacacatatatatataaaacatatatataaaaaacatatatacatataaaacatatatatataaaacatatatatatatatatatatatatatatatatatatatggtctggctggacagtgatgaattcactgaagaccaatcagtagttcatgattgtccttaatgtttctatagacataaaatttctattgaaatatytttataccacttacctgcacacttattatatattatcctgtaatacattttatctttttatatgtatgttctgtcccctaaattaggtagtaaatttcttaagcatagtggtcttacctcatagaatgtctagccttcattaggtacccagcatcatgtttgctgcccgtgaccactcagagttcatcattataaccattgttactgatctgtgtgctcgtcttttgtccctccccttgttatcattcatttattgtttataacatatatacatatatatatatatacrcacacactacatgcaaggcattttattgggaatacagtgcactcaaaataaattgaaagccactagagggaatgagagaacaataaaagaatttgggtatgatatggtgaaagtgaggtataaggatgtttaatctgacaatccagtgtagtttcacttgtgtaagcaggacataaactgttaggcctaagaataggattgaatcttttcttaataaatttttcggtgtaacatatatgttgcttcctcttactccaagagttcacaaaacagatgaatctcttatgatgtagatggtttcaaatatgcatctatatagctgacatttattttaactaacattattgagtgtctacagtatgccaagcatttcatcttattacattttttcttaccaaaattctatagcaaagttgttatgatctccgttttgcaaattaggaaatagagattcatggaagattaaattatttacccagggttatactagaaagtaaaagtcagaaccaaatattctgattccaaatctcttgtctactgaaggaaagtttaaacatgtatcttttgttgacacatgattgttttgaaaattactttttctctgattttttttttgcattctttttagtgccagtaattttgaatatagrgtatagcatgtattagcattttcttggcatttcttcttggtaagtagtttctgttttgtttcctttttgttagtcaccgttacttcatccccaatccgaggagcaggagatggaatggaaactgaggaaccacctaaatctgttgaagttacctccggagtccratctagaaagcatcatagtcttcagagtccatggaagaaagcagttccatcagagagcccaggagttcttcagctagggaaaatgctcactgaaaaagcaatggaagttaaagctgtaagaatattagttcccaaagctgctataactcatgatatccccaacaaaaatacaaaggttaagtctctgggacatcataaaggagaattccttggtcagtcagagggagttatagaacctaataaggaactctcagaggtaaagaatgtattggaaaagctcaagaattctgaaagaaggttactacaggacaaagaaggtctttcaaaccagctccgtgtacagacagaggtaagaagagccttaatcgataaaatgagtactactctttacrtctggaccttttaaacgtgcatgttagaaaactacatttctttatgggaatgtcattcatcctagcttgtcagttctctaaaatgcttcctcttaaatttctcattctttctcagttctctagggatactttatattgggaacttatactctaaacctcattgaagatggaggtgtgaggtgctttggacaagaccaccaataagttgtaaaagtaggttacaattataaactgccagaccaaagattgaccaagtcaggcatagtaattgaccagcagtccttgttttaaggatccgtaaattccaagtagttttgcttgtgtatacgggatacttggaataaagagaatggcgatataacttactgtgtcttcattgtaaatgaaaaaaatctgtagcccttaagtgtgttgctttaatctttgcatcttagtaaaaattgccttgccccttcccttgtttctctattagaccatgcatcttttggctagatacaagtcttcataagtgagaccatggttagtgtttttatacaaatatatttttaaataactaatttctcattacaaaatgtagtacaaatttatgtgtaaaaattttagaaaatacagaaaaacacaatgaaaatagtgccacctgaatcatttcatccagctatacgtgcataaccatatacattgagttcatttagtgtcacaacccacttttttcagttattaatgttctgccatgtcacagaatattctattacagtgtcattgttaatagtaacagtgttcttcaatagctataccatataccaataactgttattggatatcttttaattttttgctcttttcagtaatgatgtaaagaacatacttagaaacatactggattactttgctttattttttaaaagtaaattcttaggatgcaatacactaacttataaatgtttaataaaaaacataaaacattctctgtcatattttttatcaaaatatattggttttgttttaattttttttcctttaagtgttgactagaagcaatttgttattttcataattctttttactcttactacaagaggctcagtttattaccacatggactgtggatatagatgtatggagagaagtagagagagatggtttgtatatcgtatggaacttaaatatttaattttactttttgatagaaacttcaagtcacggaggtccaaaattacacagaaacacagtctctttttgttaattttgttacattaaagttagtgatattactttgagcttgttrtattgattacgttctcttctaggtaaatcgtgagttaaaaaagttactggtggcttctgttggggatgatcttcagtatcactttgaacgtctagcccgtgagaaaaatcagcttattttagaaaatgaagccctaggtcraaacacagctcagctttctgaacagttagaacgtatgtcaatacagtgtgatgtatggcgaagtaaattccttgcaagcaggtattttctacagcaaatagtatttcacttcctagtttttgctccatcaggtttttgatctataacacaagaaagtagattgtagtgtgaaaatttctgactaaggtcatcagagtacttcatttaagatgtggactctctctcctctggatagtcacacagtctccctaaatgaagaagtgatataaggatcatcccttattcctgagttctagtttactgtatagtaaaaatataatgtttaagactgaaacaaaactgtaaactcagacatctagtaaacattaaaatcacaaaaagccaaactaaattatttttccccattcaaatatttggactccccaagataatattattcattctaaatgcgcttttctcattgttcttttaactatataataaagcttcccaacgtttttctctctatgcacaaatagaaaattataacatttttatgacatactggatgaggctactctcatatggcagcaaaaaccctggggttctcatccaggcctctcaacacactggtggttgggaaactgctatatagtatgattctttgtctatttatcccctccctgcctcaactgatagttactagataacaagatctggatgttatccatctgtgtatttctggaacttagcaaaatactttatagagtatgtttcataactgttgatttaaattgaatcatctggagatttctcataaaacaaccaaaggtttacaggttgtatttgaggaaccattgattttgatgaatacatttttaggaaaatgttttttcatgtcttaatatctctgacactttgtagtagtagttcactctctttaacagtcttttgtttatctcctaattgtgctagttcattatgctatttggaaaaatgaactatttattcacttagaatgaaagttaattgagttaattctcattgtacattttaagaggcaaatcatgaatatattgtacaaatttttgcaatatgcaactttttaacatcctgatcaacaccaatagtaacatttcattagatttttaaataaaaattaaatatgactttattggtattttaattgatgtaatcttctaatgtcaacattgttttcattttgaggaatttggtagtaactgcagtctcagacttaaattttaattttaaatttttcagccgattaaccatacttgaacattttgcttcaattccatcaatagaaaactggttaaataaaattttgtgtatccaatcagtagaaaacatgaagctaatttttgaaaaaagggaatgagatagctgtatatgtgctaatatggataagtctctaagataaattattaaatgaaaaactaagatttagaaaagttcgtattcagtatctctttttgtaaataaagtggataaatttatttttaacacatgtatatgttgaaatatacataaatttttttttgagaagtgtaaaaaaactttgttgactgcatataaaaggataggtatgctgggcatgacaaaagactttatataaatctttttatattaatatttttctgggggcaaagaggtaattgagtgaagaagataatttagttttgtttgtctctttaagtttttctgtatttaaaaatatttaataattttttctttcaaattttggtcaatctagagtaagattgagatgtactccaaaagtcattatataggaaagttgaataactcttgcctttgtcattgtctaaatgaatattttaactgaatccctttaatgaactctaagctaataagcatttttaatgctctttagctaaaatttaaaaactgtgaagtaactatactatgttaaatctttgttagcttctgaaagtgacagtcacaaagtagtatattcaattttttacactgtattattgtcagcaaatttatatgtaagattttaatctttttcagggtaatggcagatgagttaaccaactcaagagcagctttacagcgtcaaaaccgtgatgcacacggggctatacaagatctcctaagtgaacgggaacagtttcgtcaagaaatgatagctacccagaagtatggcacttgtttacattctgaactcttctgctttctcctgcaaattaagttattgtagttttgktttttttgtttgtttgtttttgttttgggtgtgtctacatttgataacttactgagcatatacttttagtagcattttaaaatagatgytctgggagggaagaggactgaaaaaatagaaggcatgcttttcacattcttaattggggaaataattagttatatctgtagtagaaggattctctggatttaaaagcaattgctggtaatagttgtagtcgtacagttttcggtagaagccaaggagtgtacctgtctctcctgtggaaagagatctttttgaagacttcctacagtattagagcttgttttcatgtccatatactccagaactatcaaaattgatggtcttccttaaaagccttttgcatttttatatagttgatttattacacatagaatcagtaagtgtcaaagagcaaattataggggaaattagaagaatgaaaacacaagaaacgtctaaccagtttaatcaggaaaaaaagagaagatatacattaccagtatcaggaatgaaggggggggtacaatatagactctatacacataaaaaagataatacagaaatgttatgaacaaatccatgtcaataaattcagtaatttagatgaaatggacaaactccatgaaagacaaactaccaaaggttactcaagaacaaatagataacctgaatagccctaacctattaaagcaaatataatttatagttaaaaattaaatattttccagtaaaggaaattccaggtctagatggattcactgatgaatgctagtaaacatctaaggaagacataaaaccaaacttacaaaaattattctagaaaacagaagagaaggaaacaatttccagctcatttcatgagaccagcattgtcttgatatcagaaccattagccaaaacccaccaactaatatctctaatgaacataaatgcaaaaatccttaacagaatttcagtgaatcaagtccaacaatacagaaaaagttttatacattttgaccaagtaaagtgaatcccaggaattgtagattggtttagcattcaagaatcaattaatgtaactcaccaaaaaagaaaaaccgtatgaatatccccatagttgcacaaattatgtaagtagttcctatactaaaagatgagaacaaagaaaagtactgtttgttaaatgattttcatacaacaacctagtagattaacatatgctttctgtagtctaacttacttgactaagacatccgaatttatggaactctgagagagaaagggatcagagaaagatgttatataatttcagaaatatttgtattacctatttactattattaatttttacattttgctctcttactatgtccggtgttcatgtgtgttctatgcagattattggaggagctcttagtttccttgcaatggggaagagagcaaacttactcccctagtgtacaaccccacagcacagcagagctagcattaacaaatcacaagttggcaaaagcagtaaattctcatcttctgggaaatgttggcattaacaatcaaaaaaagattccatcaacagttgaattctgcagcaccccagctgagaaaatggctgaaacggtaaaatattttcttttgtgatctatggaacttctaacactgtccttttactgaaaggtgacatatcatggaaagcrtttggcattaggaattaggaaatgtgggatctaaaccactcatgctattgagtgtgttatcttggagaaaattatttcctcttctgcgctttaatattttctaacactactgttctatttttaaggacaaaaaaagtaattgttttgaaagaggtcctatgttttagctattaagtcactgataatccttttcatgagttcattttgatataaaaaccactgygtagaatttttaatgtagattaaattagtagattcatagattacttctgatctaagaaattacttaatttccacatatagatggaaatgtatcaaatactacagtacagatagtatagtcctggatgaattcagggtccatgcagctggcttgtcaaatactcatctcacatrtctgtgacaacaaccaagttcaccttcgttacaactctcatgtccccatctgggtccctgcctgtcgccataaytcttgcactattaaaatcttcaactcaacatctctgtctctgtgatctgtgatctcaactttttttctttccaactctgattcttcattctgactccctggatgtgaacacatctttgatcatataattgtttttattcccttggtccctatatttttttatgtatctcatcagctcactcttttagtttctcttcccacatagctttcctagactctattcataagtgccttactgccttatcttcctctccgagtatgctgcaaaccccagtcctgtgtcagttcagctgtttgcctttttatttcagtacccatcaaatactacctcacattcagcagatgactttccttcctaatccacagaagaaaaaggggacagaggcagaaaactgcctgaaggtttcattagatatctagaagcctatctgtatggcagcatacatttctctcagaggaaaaggtgtccttcctcttctcctaagcatacctcccctctaggccctggcttcaccctcaacagttattccttctctctgttggctctttccttttggcttaagaacatgtccaagcatcattcatctaaaaaagaaaaatcttccctctattgtaagatgtctggatatggctttatcaccttcctttcacatccaagaatcttggacaagttgtccagacatgtttgtacttaaacaccatccattcctcaattcctaccrtcacttaaatctgtagacttcctgccccactattctcagtaagtactcttaaaaaggtcatgaacatttactatcatrttatactgtatcgagcattccttcctggaaactcccttgacctttgtaacatcactctttcttggccctgatgctacctctctgagctcttcttcatagacttttttcctcctttagatgttcatgtttcataggaatctgtgttccccttttcaaaatctcttcgttcctaaacaccatactcttgaaacgattcactacttttgtgaccattgtttctaagtttttgagggggaggggcatcctcttcctgtgacccctcttgagctttctttacataacatactttctctattctcttggtgttattctgtttaccatagctttatgcttgtgacttttccatctcagacttttttctgagtctgagagatttatatccagccaggtatttccatctacttgttccacagatggctaaaaatataayctcttttctccttgcttttgcatttgtacaaccccccacccctaaaaatctcctccttttcctgtattccctatcttgatgaattatacctactctatagtgctgttttcagatttcgataaaaaacacatataaagcctgcagcagtttccaatatattgtaatttctcaataaatggtagctatcgtttttactatttccttcattcccctagtcctgttgattttacagatcttaccagtttttttctaatttatcccctcccaagttcaaacacctgacttccagcctagcccactgcagttgccccctcactgatatccctgccctccttcttagctgctcctgcccacccactactggcagagagttatttcagaaggccaaatcagtcatcaaacagttcccagtctccctcattattgaatcagaattcattcatattgtatagaaggctttttataatctttcttccatctccccttctcaagaatcatttcccaagtgtcactacccactgcacttaacattccagcagggtttaaccacttttcatgatgcacataggccattgtatctcatgcctctgtacatactttttcttgtctggactaccctccccacacctcttttgttgcccaacctctgtaccacctttaagaacctgccttctctgaatcttgctggcaatctgaagtgttccttctccatccttccattgtactttgcacttatatctgtaactgctctttacygtattaaattataatagttttattttccatccctctcccaaattgtaaactcctaaagggctggggactttgtgtttttatgtttcctcaaggtctggcataatcccttgcacatactaagtgctcagctatttactgaatgagtcagtacctaaaattaatcatttttatccaaaattttgtttctccttttctattctctttgttgggaaattgtgtcactgcctacttagttgctgccagtagcatttggtatagttgaccactccctctttctcgaactaytctttccgaggtttatataactttatagcttacaggcttttctcttttatccaaccattttatttcactatacaatgttaggtatcctcagggcttgatttagatccccttcttctcccagacctttatccaccacattctcctatttaacaaaactgacagcccttcttccttagtgtctcttaaacttttcagtcccattgcttcaaggtgccatcatttcttagctagattattacaataacctccctttttctgttcttatgtctgcttatgcatactgcttcccccatcccccacactgtgtatagaatgatctctctgaaaggcaccctgcataaaatccttccccatcactttcaggctaaaatacagaaacctttctgttcatattagtgggtcagtctcctgctcctgaattcccttagcattttgtttctcgctctataaagacctataatgtaataacatctttatagtatttgagaacttattttctcctctaaatttataagcaatgttaaggtaagcccttcatctttgcttatcctctaataccaaacaaacttccataaaaatagaaggatctcaaaaactaaattgaaaaagcagtctagttgaaaaatagaggtgctaaagtaagttgatggctcttaaatgatgccaggacattcttagagtagtgatggctctttgggtttggtggtaacttagaagggaaaaaaaaaatctgcaggaccacatgaccgctagggaaacaggcatcaccaaccattccagaaagctgctttgaacaagccttatataagaaagagagaaagcacttttcccaattcatttcagaattctttccaattgcagtgcttgctacctttgtaccataacccaaacacatcatgtggtgatgactgggaaaataggaacatgagaatcaagagctgtgagccaggcacgttatccctgcccttaactggagaaattttttcagctcaagagttcctgttttgggtctcagtaaaggagacagattaggaaaaatcagagcagaagaagaattaggagagcattgtgttgtggaacccaggaaacaaaaagtggctgtaatcataaaatactgcatataaattagaaaaagagaaatgaaaagccattgatactacagataaaaagttatcaaggattttgaaatatcrtttccatagaagaataaaaacaaaatcctgattctgagcagttgaatgaaagattgaagaggggaagtagtaagtccattttggttaaggaaaagaaattgacatcacttaatgatataattgacatgtaaaaaaactgacctcctggggggccgaggcaggcagatcacaaggtcaggagatcgagaccatcctrgctaacacagtgaaaccccatctctattaaaaatacaaaaaatgagccgggcatggtggcgggcgcctatagtcccagctactcgggaggcagaggcaggagaatggcgtgaacccaggaggcagagcttkcagtgagccgagatcgcrccactgcactccagcctgggcmacagaghgagactccatctcaaaaaaaaaaaaaaaaagacataatgatataacctcattttcttctatgttttcctgctttcctaccaatatctgtaaaacattaacrtcattatttaaaaaaatatgtaacctagataatatagtaatcagacatcattgttaaatttacagcttaaggaagtaagttgtcttttcaatcagattagtcattctgtttttttagtaatagttatatattaatgaagtgaaactttataggtaggtatacatcaatgaaatcttaggcttttaccatctatattgcatacttctgacattatatcttattttccttaggttctaagaattttagatccagttacctgcaaagagagttcacctgataatccattttttgagtcttcaccaaccaccttacttgctacaaagaaaaatattggacgatttcatccctatactagatatgaaaatataactttcaattgctgcaatcactgccggggagaactgattgccctttaacagtcaatatgttggaggcatgctaaggtacttccttattacccaagagtcattattatttgggagctggggttcttacaatgctagaaataatatcacttcctatttacataatgtatacacccaaagatattttatgtactagactccagattaccctttcttaataaatatctcagggtaaggaaaraaaraaactgtatagatatatttaaaatagagaatactttccaagcaatacatgatacttttcctaaaagactctaaaagaaaaagattctgtaactctcttttagcaccaaattattgtttatcttgctggatattttatatgaacagtgttaatttagatgcactaaagcaaaggtaggcaaactacaaccatgagtcaaacatggccacacccattcatttgctattgtctaagctggttttgcactacaactgcagagttgaatagatgcagcagatcctttacagaaaaagttttctgacctcaattctaaagtaattgtagtagggagctggaggactttctttccctttatggtaattttttgagctacaaaagagccttgcagaaatgggtgaagggattaatcttttaaaaataaatgctatatattaggaaaataaaaaatattttagagccaagttaacaagtacttcagcaaaacatgctagttttatgcaggggattctgtattccaaatggatacaatccgacatatataaaagaaacagattcttaactattgactcttatttagcaaatgcaacagacaagaatatccaacttgatatttataaaaggtagactttttccaaaagtgtataagctcaaagaaaaaatgcaamctgtcaattaatatatactatgtaatatatattattgtgtatttatgattagccatcataaatgcccattgcttggcctttaagaataatcacaaaatatttatattaaattatacaaatttgttgcagaagtgcctgtgagagaaatcttcaaaagacaaacctggtcaaataataataattttaatgtcaatgattttttttgtctgactcatctgagttatatttagttttcaagtggcaataaatttatctaccttctttattgcgactattccttttttcccccagaattagtgctttggtttaggtctttgtctagcttaactacttccaattgattcttcagccttttcttttaggtttacttactataaaagtctcagaagaaagcataaggggaaagcttcgtgacattgtatttggcaatgatttcttgaatatgacaacagaagcacaggcaacaaaagaaaaaatagataaattgaatttcatcaaaatttcaaatttttgtgcattaaaagatgcagtgaaaaggcaacacagagaatgggagaaaatatttgcaaatcatatatctgataactgtctagtgtccagaatatataaagcactcctacaactcaaccaccaaaaaacaacccaataaaaattagcaaaggggctgggcatggtggctcatgcctgtaatcctagcactttgggaggctgaggcagtcagatcacctgaggccaggagttcaagaccagccgagccaagatggcgaaaccccatctctactaagaatacaaaaaattggcctggcgcagtggctcacgcctgtaatcccagcactttgggaggccgaggtgggtgggtcacctgaggttaggagttcaagatcagcctggccaagatggtgaaacccccgtctctactaaaaatacaaaaaattagttgggcatggtggcgggcacctgtactcccagctactcgggaggctgaggcagagaattgcttgaacctgggaggcggaggttgtagtgagccgagatcgcgccgctgcactccagcctgggtgacagagcgaaactctgtctcaaaaaaaaaaagaatacaaaaaataagccgtgtgtggtagtggacgcctgtatacccagctactggagagggtgaggcaggcgaatttcttgaacctgggaggtggaggctgcagtgagccgagatcgcgccattacactccagcctgggcaacaagagtgaaacttcctctcaaaaaaaaacaaaaacaaaaaaaattagcaaaggacctgaatagacatttctccaaaaaggatatatagatggccaataagcacatcaaaagatgctcagcataactactcattaaggaaatgcaaattaataccacttcacatccattaggatggcagttatcaaaaaagcaaattataaatgtcaaagatgtggagaaattggaacccctatgcattgtttgtgggaatgtaaaatgttgaaaacagtgtggcagatcctcaaaatattaaacatacagttaccatatggcctagcaattctgcttctaggtagattcccaaaagaaagcagaaactagaataggtatttgtacaacagtgttcacagctgcattattcacaatagccaaaaggtggatgtaacacagtgtccatcgatggatgaatagataaacaaaatctggtatatacatgtgaagaaatactattcagccttaaggaatgaaatttgatgctacaatgtagatgaacctttagaatattatactaagtgaaataagtcagacacaaaaagtcaaatgtcaaatgattccatttatatgagttcctagaagagacaaatttgtagagatggaaagcagaatagtggttatcagggactggagagagtgtagaatgggaagtttttatttagtgggtatagaattagagattgggatgacaaaaatgttctggagataaacagtgatgatggttgtacaacaatgtcagtctacttaatgctactgcattgtacatttaaaaaatatttaaaatggtaaattttacacgttacaattaaaaaactaaaaaaaaattatatacacttttgtaaccacaaactcgtggcacacttctgcaactgttggtttaacagtgtcaataacaataataaagataagagttagtgagctaaatttaaaaaataaaaaagatctcaaatcagcaatctaacataacaccttaaggaaataaaaaaagaactaaacccaatgtgagaagaaggaaggaaattaagattagagtgcagacaaatagagaatagaaaaacaagagagatcaaagaagtcaacagttagttctttaaaaagaaagaccaaattgacaaatctgtagccatactgactaagaaaaataaaacaggtaaaactaaaatcagaaatgaaagtggggacattattagtcaccttacataaagaaaaactgtacaccaataaactaggtaaactagtttacagacaaattcctagaaagacatgtattagtccactctcatggtgctacaaagaaacctgagtaatttataaaggaaagaggttttcaaaaagggagaattattctgaggctagaccatgtgatgcttttacagtgcacttaaaaaaaattttttttcccacacaagagatttctaagtgtctaaattacactttttcttaaaaaacccagagtagcttctgttgcaatagctattaatgaagaaaacagaattcagtcaactgagaagaaaaaaacttttgctcaaaaagacaaggtcctaagaaataaacaaaaacataaaggccttttaaatacaagcatgcacacatgcacacatacatttacatatcttggatgttagcttttaattaagctgacttaaccattgagctcctaaaaattatattttccttcccagaggcctctcagcaggaatggacccaataccttccatttttaagtttacatggtatcaaaaggagtaagacagataaacaagtggagacaaattttggacaacacaaggggaagtgcactcgggcaaaacagattcaaaacctgatctcaatcaaaatgcaaagcgggtgtataaccaagccttattattgcttcccgtggcagtgccagacaaatggtttaacaagcctagatgggaaaacaataggctcccagcataccattcagttaactcaccctttgagttcgtccgctcctgatctccattctaacccagcattgtaagggttgtgcacttttgagcacaggacagccttcaagggggtccctgggaaaatctcacctgcagctgctgggatccccctaaagactgtctccttgcaagccactggccactgaatgcagcaccattccagtctctcctggctggcacgccaaattttgttcccagaccaaactgaggtttgggctgctgtttctcgtggcccaataacgagatgcaaatgaactggggaggaagggagttttcatttctgcaaccggttacagggagaaggcctggaaattatcaccagaccaattcaaaattacaaagttttccagagcttatataccttctaagctatatgtccatgtgtaagtgtgcattcatctaaggatgtaagtgattaacttcttttaatctataactaaggtctgagtcctgaaggccttcctctggagcctcagtaaatttacttaatctaaatgggtccaggtgctggggcagttacccttgtctcctgctaaatcacggaggtttggggagttccttcagacccccgataaacttgtttgtggaggcctggggagtttcttcagacccacaataaaacttgttcaatcctaaatgggccctgttaagaattcctgtattattttgtcatgctttaaggcccaggaaagacctaggcaaaactcttgatgggcttttgtggcatcccagcctttgtataaggagactgacttttaatatttaacttaacccttcagtcagtagtgaaacagtcgttatggaggcctgcattagtgagacctggcctgccacaatcctgtgttcatgtattgaaagactgtattattaagatggcagtactacccaaagcagtctacagattcactgagagccctatcaaaattccaacagcctttttgaaaaatggaaaagcttaccatcaaactcatatggaattgtaaacgccgtgaatagccaaaacaatgcggaaaaggccaaagttggaggactgacacttcccaatttcaaaacttactataaaactacagtggtctaaacagtgggctgttggcacaagtacagatgatactaacatacagatcaatagaatagaattgaggcttcagaaataaacccatacatctatggccaactgactttcaacaaatgatgctgcaataactgaatgtacacatgcaaaaaaaaagttgaacctctatgtgatattgcgatagaagaaatacatattttggtcttgtaccagtttcctggcacatagctcctaaaacccttgcaacatcccaagtccccaagctgtgagtatctttgtatgctaatgaaatgactaatgtctgggggatctggatggggggaagttgccaggaggaaccaaccaagtaattagagagtagacctccaggggagggggaagtcctgaaggttaagttgattaccagtagccaatgatttaatcagtcatgccttcataatgaagcccctccataaaaacccaaaaggtttagacagctttctaggttgctgaacatgtgcaggtaccgagagcatggaagttccacgacccttcctccataccttgccccacgaatctcttcaatctggctattcctgagttgcatccttttaaaaagagaaacagaagtgtttctctgagttctgtgagcgattctagcaaagtactgtgggaactgtaaccaggggacctattatttgcaattgatgtctgaagtggggggcagtttcatgggactgagcctgggtgtatggtctgcattaactctggttagcgtcagaattgaattgtagaatacctacttggtgtctgcagagaacggggaaattgcttggtcttggggaaaacaacctaaacatctggtgtcagaagtgatgtactgagtattgagagtatacaaggaaaaagtttgttttttcttactctacctcacgccatatataaaaattaagtaaaaacgaatcaaactggccaggtgcagtgacttacacctgtaatcccagcactttgggaggctgaggcaggtggatcagctgaggtcaggagtttgagaccagcctgaccaacatggcgaaaccccgtctctactaaaaataaaaaaaaattagctgggcatggtggcgggtgcctgtaatcccagctactcagcaggctgaggcaggagaatcacttgaacccgggaggtggaggttgcagtgagctgagatgtgccacggcactccagcctgggagactgtgagactgtctaagggaaaaaaaaaaacaactttgtctcttttttttgagatacggtctcactctgtcacccaggctggagtgcagtgatgcaatcttggctcactgcaacctccacttctggggttcaagcgattctcatgcctcagcctcctgagtagctgggactacaggtgcatggcaccatgcccaactaatttttgtatttttagtagagacggggtttcgccatgttggccaggccggtctcaaactcctggcctcaagtgatcctcctgcctcaacctcccaaagtgctaggattacaggcgtgagccaccgcacccagccagaagtttgtcttttaaactttgccagaatgcttacagtgactgtccattctccatcacacttgtatgcttacctttgtccttcaccccttacatgctcttacatgtatcagaagtactattcctctacacactggattcttgtatactcttaaatatcacatattctaccaaggaatgtaatctttataatataactgagagaaaggattttgcaaccatacagatcagtctatgtgaacaaaatattcatgtctatatagtttccttctctgcagaacgacactaatagggttgtcatatgattacattatttatataaagcatttataatacattttaaaatgttttaagctctcaataaaagttggctaattttgtaacatacctacctaaaatagtattacacataattgctattttatcatttcaagttttatttcagattcggggatacatatgtgcgttagttacatgggtatgttgcatgttgctgag

SEQ ID NO: 98046 - DNA, 13305 bp, Homo sapiens
ctgcctcagcctcccgagtagctgggattacaggtgtctgccaccacgcctggctaattttgtatttttagtagagatggggtttctccatgttggtcaggctggtctcaaactcccgacctcaggtgatccgcctgcctcggcctcccaaagtgctgggattacaggcgtgagccaccacgcccggctgggcacttgcatttcaaatactgctctataacaagtcacattttcacaaggacatccctgcactacaaatgcatcttctttcccaagaggcagaacttaaaagggaaaaaggacttgtctaacctgaaaatgtatcttctcaggccagctcaattagggcaggcccattcctgtaggcttgtcctcctttgcttccattaaggaacgcttaatgcctgggaagagtgagagtgactacaaacctctggcctacgtgcggatccacagctcagcctaaactgcctttgtttccaatggtcaggggcctccaaacacactaagaccatactttgtctggccataaagactttaagtgtgctgacacattgtttcatgtatcctattactaattcaaccaagggaccttctttgtctagacaattctcattgacagggcttgaaatgcgcaggccattctctgggccactagctgtagaaagaataagactgaacacacctctcctactgaagtggcatatattcagtagaaatacaagaaacctttctggtgttaatcatataactgctccttaaatttttttatactccagaagatcctcccccgattatgaattactccaacttcacaactgtaagaaagcacaagtaatgaactccatacatggttccttgtgaaagaacaaggaatactgcttaagaggttgaattactacaaaactggtatcttgctctattctattggttctgaaacttcagtgcacatctgatcacctggtagacactcattaaaacccaaatggctaagaccctactcccagagtttaagagtcagtaggtatgggtgaggcccgagaatctgcatgtccaacaagttttcaaacaatgcagttctgctgatcaggaaaccacacattgagaaccacagatgacacctgaacaatatgtgtttgaaatgcttgagtccacttacatgagggttttctttctcctctgctactcctgagacagcaagaccaaactctcctcttccccctcagcctactcaacaagacaatgaggatgaaggcttttatgatgatccattttcacttaataaatggtaaatatattttctcttccttacaattttcttaatatttccttttctctagcttactttattgtgagatcatagtatataatacatataacatacaaaatgtgtgttaattgactgtttctgttatcagtaaggcttctggtcaacagtaggctattagttaagttttcgaggagtcaaaagttataactcgaatttttgactgcataggagtcagcatccctaaccctcgtgttgttcaagcgtcaactatactgctttattcaaatgcttccatttcaatcagtaccatcaggagctgaagtccccaactaatttaatctaaaggcagtgagctccacagactggattttcagtattccactaaattattccacttactttctaaagtcctgatttaaccatcctagtattagtatgaaaacaaaccctgctcattgtgctctgcttgtcacccaatccgaaaaagtaacatcagaattaaatggcttgttaaacactgaagtaggagaaaggattaggattctgacacacagtaaaacagctgcaaaggcagttaactatatctgctatttggtaaatgctcactgaaaggtagaaactataacttagagtgaagtatcaagcttttataaacatatattaaaaaatactgttctggtcctttaaaaatatcctgtaatcttggctgggcacggtggctcactactgtaatctaagcactttgggaggctgaggcagccggatcacttgaggccagaagtttgggaccatcgtggccaacatggcaaaactccgtctccactaaaaatacaaaaattagccaggtgtggtggtggtgtgcctgtaatcccaggtactcaggaggatgaggcaggagaatcgcttgaacccaggaggtgggggttgcagcaagcccagatcgtgtcactgcaccccagcctgggcgacaaagggagactctgtctccaaataataataataatcatcatcatcatcatcatcatcaccctgtaagctttataccttaacctgtggagtatcgtaattgaatgaagcaaaatatagatctttagccaaataagatagtaaagttcagatagatcaacttctccaaaggaggttatgggtcacctgcattagtcagaatcatttgggattgttgaagatacattaaaaatgcagattttcagtaccttccactatagaatcaacttcaaggtgtacgagtaggaatatgtattttcaccaatcatccccaggtgacttttaggcatatcagcttgagaaaaacaaggaaaacttactgttaagctctcaaaagtctcccacttgatcttcaaccagctggggggagaaaggagtttgcacttcacaactgaaacatttggtaaaagcatctgtattgaccatacaggatgaaacagtgctcttaattttttttttttttttttttttgagacagggtctcgttctggggcacagtagggcaaacatggctccctgcagcctcaacctcctaggctcaactgatcctccttcctcagcctcccaagtagctgggactgtaggtgcacaccaccatgcttggctaatttttgttatttttttgtagagacggggtcccgacatgttgcccaggctgctttagaactcctgggctaaagcaattcacccactttggcctcccaaagtgctggccacttcttaataaggaaaacacataaatacagactactacagaatgaaatattaaaagaggataacaaaagctcaatgcaagtcagagaaaagtggttacacttctggcttggggttacgtggtaatgcaggcagacttccctagaaaggaaatggagtatctgtgactatgccatcaatactcaaacaggctctgagatgtttagaactctcaaggagttcacaatacctagtgccttcctaaaaatatgtagtaaaatggagaagtattgagtatacctagctaaaccttatgaaattctaaagactaagaggcattcattcattccagggtataagaaatactacttaaacagaacctaacatggtctttttttttttttttttttttgagacgatgcctcgctgtctcccaggctgaagtgcagtggtgccatctcggctcattgcaacctctgcctcccaggttcaagtgattctcctgcttcagcctcctgagtatctaggactacaggcatgcgccaccaggcccagctaatcttttgtatttttagtagagatgaggttttttttaaaaatcaaatttccaataaatgcacttcttagggacttctcagtgtggggtgcctggccctggagcacttgtggtttggaaatcaagtgtaacaagccagtagttataaagactaacaaatttgtgttccttctcctccctttcctctcctggttaagtggaagcattaaaaattaagaaatagatcctgagccacaatcaattcctaagaagctactgtttcttcatttctggtattaaatagtaagaactacttacattgcatccattcctgcaaaaatgcactgactgtatgattaaggcacagtaagtctaacattttgtcccgatcacttttctagtattcaaaccactgtaagtaataccactatgtactctgcatctttctctgaagagctttaacagcttttatgtattacccatatcaagatacttcatggattaggaaggggcaataatatttcaatagtttcataaaattagtttcccaggactttaagtagagtttattctctaagattttagttcttcaaatatgtgaagatggtgattttaaatactttatttcaatcaattcagttcaaggatttaaattatttcaaatacttgaattagctattgtcacatgatttctcacacagaatgtgaccatctctagccattccgacaacctacctgctcaggaaatgtgaaaactatttttcttttttttttgagatggagtctcgctctgacgcccaggctggagtgcagtggcgcaatctcggctcactgcaagctccgcctcctgggttcatgccattctcctgcctcagcctcccaagtagctggactacaggcgcccgccaccacgcccggctagttttttgtatttttagtagagacggggtttcgccgtgttagccaggatggtctcgatctcctgacctcgtgatccgcccgcctcggcctcctaaaatggtggaattacaggcatgagccattaccaagcccagctgaaaactatttttctaaaattcatgcaacatggatgtctgatacaaaaagataacaggaaataaatacacagaacttaaatctttttgcctatttcaggcaaaaaagtttaatgggtatataggtatacaaaaaaaaaccattttttgtaacattttaagaaataagagtttggaaatctttggaaatccaaggtcctaggtctccaatttctttaaggggggaaaaactcacgattaggactaaatggagacgtcactctcttgcactgatagtgaaatattaactgccagaaagtacctccagtccccattcatgttgtatgacagcagcctttgtactgaggcctaatgaaaaatctcaacagaggaagtgactgtatatacctacaacgtactaatttcaaagttcatcctgataggcatgtgggtttgtcttgttcatctgtgtctagtcacaatattcactttctgaatgtttgtatgaatgaatatggcaacttaaacttttccatttacaattaaacgtgaaaattttagcttcctaagtagatgccaaatattgcaccatcccaagtgtgaaaggagaaagttaatcactgccaaagatgatgatgatttttttttttttttgagacagggtctcactctgttgcccaaaacggggtaggtacagtggcatgctcacggctcactgcaacctccacctcccggggcttaagcaatccttccacctcagccttctaagtagctgggactacaggcatgcaccaacacacctggctaatttttgtattttttttgttgagacaggtttttcccatgttgcccaggctgatcttgaactcctgggctcaagtgatctgcccatctcggcctcccaaagtgctgggattataggcatgagcctccaggcctgccccaaagatttttaatccacaatttaaggtatgagaaacaaacaaagtggtgtgtatgcagcaagccttgtcactggacaactgaagttgccgcaaagtcaaagcaagtcagtaccctcctgagccagcctttctatgatttacagcaatagtatcatactcaatgctccctagtgacccctccagcttggttaaaatttcacaatagatatatgtgcaaatttaaagaaagtaaagatgttccctttgtacaaaagcctaataaagcaatttctgaaaaaggtgttgttgttgttgttttttagcattggcaaggaactaaaaattctgttctaagcttcacctttcataaagtaatcctctcatgctctttaatcctcaatgttgtaaggtaagtattaaacctactttataggtgaagaactaaggctctgatattaacttgttcaaagacctagccattgagcagaagctcaagaactcgaatttaaattccctttaagtctctattatggggtggtggggatgtagagggggttggaggccgggagactattcgcattctgtatcagaggaaaacgaaagaaaaagagaccaaagctttgaagacttttaaatccaaccctattgtgggcacattccttgtatactgagggcaatggagctacagagcattaacaaatactcatcttcccagatttttttccccatattttatgagctatatttttcctgatatgtttatctttgaagactctttaaaattaggccctattccataatttctatacaacaaaattatgtcctcctgcctacttttaattgaatttaagtctgcgcctgttgtgatgcttctgtgataatccttttgctgaatggcgtaagatctctactaagatccatttggcttaaacctaatgaacactagtgaacacatccttaaatgacttttgtttatttcctttaagtaacacttccaaaaaaacaaattcaaggcaattcaatattcagcattagctagacttatgagccattactgaaatttctactgactttatcaaattttttcatggaatctcccaaatgcctatactcacgcataactgttaacacggcatttggtactaaattctcacacataagctttattatattatttaaggtattcttattcccaagaattactatttcaaagaaaaccaagttggtcactttaagcaactatttgaataaatgaaaaactgaagtaattctcaggtgctttgagagttctctgtttaatttaaaaacgttttgggggagaagtaaaatagtggcctttgaaaaaatatgctgacacaagacatattgaattttgtggttttaaaaaattaacaaataatgaacttggcattttattaaatgcatcgaaaagggtcaagttatttttaatagaaaatccataattctattaaatggttgagaaattagtcacatcaatagacttctttcatttctgagcccatcttctgtactgctacaagttcctttggcaatgaccactttgctgtaaacattcttagaaaagtaggaattaggcttggcgcggtggctcaygcatgtaatcccagcactttgggaggccgaggctggtggatcacgaggtcaggagatcgagaccatcctggctaacacggtgaaaccctgtatctactaaaaatacaaaaaattagccaggcgtggtggcgggcgcctgtagtcccagcaacttaggaggctaaggcaggagaatggcgtgaacctgggaggcggagcttgcagtgagccgagattgcgccactgcactccagcctgggtaacagagtgagactccatctcaaaaaaaaaaaaaaaaaaagaaaagtaggaactagatatacaattggatccttctcagcccaaacctagatatgaagacaccttttactttacagtgaccgctttgtaactggaagacatcagtgtaggctctgctgattcaattaggtaaagactcaacaacactagttacatgttacaattcactgtgtaaatgtcaagaagatttaaaactttaacagggaataccaatgaaagacagactccccaacatcaatcactatttcaaacctaacattcaaaataaagatccagttgagaatagaggctgtctcatcaaagtttacattttacaatgaggacagagaggcaccttcatatacttatctaattctcaacagtttgtgaaacataaatattatccttgcttatggataagaaaacaaggttcagtggtcagatcatgtttcataggaagaacagggacttatctcgatttttcggaatcctacaccaattttctattttaccacagctgtctcctcacacccccactcttcccctagacctaacattccacatacaaagggtccaagctatctctaacagcagataatcaagggcaggttctgacatctgtactagaagcttaccaattacagcctgagtggggtttccagaatctggaccaaggcagcatgttatcaaaaaggggacatgaaaaggcataaagggtaaaaagaaaaaaacgtttcctttcctggtctctggttctccccataagcctatgcaatctatattatctttattcaattcagatttaatgcacataaaaatgtggtgcctaataagttttcaaaattagttcccttcatcccacttctgctgcttggcaagagctcacatagtcaactacaaggaaacaaaggggctaccttactggagtcaggttaagtaaaaggtcttagccaatgagatccacaaatgacaatgatcctgaagcctcctagattagtctcctgcacaatcagtaatatacctacaaagctttataaatctgggcattcatacatatatgatagcaagattaacatttggacttctactaaggggaaaaagggtgtattattctggtggaggactaaccttcaacaaagaactttttttctataaactccaatagccaagaaaagtcctaggcatctatctttgctagcgtgtgctaagaaaaacaatataaagaataatgggaccacaagctggctgggtcggtttcgttcttaaaatataggaaaacgtcagaatacccagggatctgttaaattcttttcccaacatcatcatttacaacaacaaatacaggagatctgaagtccctaaaaatactgattgctttaacatcttttgttggagcttacctaggtgtttcttaggaatgctaatgaactgtgttctttaggctccttgaatccacagaaacaaaaatgttaatttcaaaggctcagaggggaattaattgcctggtagagatgcctccccaccccaaatctgatgggaagggtagaagggagatggtaaattaaaacatttattacacatttcagaaaaatttagcagacaggtaagtgagtgaaactagaagcttaagacaacaaatgaaaaatgaatacctaccaaaaagaaattaagggtcaggcacagtggctcatgcccagcactttgagaggctgaggtgggcaggctgcttgagcccaggggttcaagaccagcctgggcaacatggcgagaaacctcgtctctacaaaaaatgcaaaaattagcccggcgtggtgacatgcacctgtagttccagctacttgggagggtgaggtaggaggatcgcttgagcccaggaggcagaggttgcagtgagctgcaatcacactactgcgctccagcccgggcaacaaacagaaaccctgtctgccccccaccccgcccaaaaaaaaagtaaaggaaagaagttaaaattaaaagttgcctaccttccttggaatttctttcttactaaacgttaagagacataaatgacacacataaagacagttaatacaaacttcgatacagatagccaaagttgatattacgatctatatactccagagatatgcatgagataccagtaacatcacttctctcccagtgtgaaaaatatctaggatctttcctatacacacagaaaatgttcaacaatatctatttactattaaatcatttcagcaaactatcagccatttctcataacgccaccaaaataccatcaatatctaacagacattcctctacaagcttccccgcaacccccaatcaaactttgtccaccctgccctcatttacatccctctccacccttcccaggccctatgctatcaacacagcacatactgtccacatctagataggcaggtggcagggagggtgggggttggcaaaatgctaattattccaaccctggcctctattttagattttctactgcagctattggcctggagccatggggatggaaagctgctgctcaaacttgagatgtatgaggcatggaaatagggagaaaagacagttccaaatattactactcgaagtttaaacacaatctgaaagcttcctttaaacacaatacccattcgcctcttaaggactagtttggaagtctctaaactttttaccttaagaaatccatgtgtcaactgtttgcctaaatgcccttattatccaaagttaatggtttcaaaataattaagggatagtcagataatctaaaccatacaacacagaaaattcactcaactgactctcacctccacatccaatatattttactattctttcaatagggtttttttttttaaacctccaggtccaatgtcaaaatactcatttcaaacatttccacagcttcattcaaactaattacatttgaattcattttcccaagcaaacacagtttactggagttcgacacagtttcacatgggaaagatgcaatccctcacaaaacacacttctgaggaaacgactttggatttgaagaatatcagttttactttgcactaaaaagatggcaaaaggcaaaagttgataatgatgtgtcatataaatatgcattcatgtccaactaatatgaaataacatggttttagtataatctgaaacttctaaaatgatatgtattcagaaagcacaacagaatcattttccataccattagcagcagggacaactgttactatataattaatatacaacaaagctgtatattagaaggcaaacatttttttgcacctccccaccccacacatgcactgaaaacaagcaaaacaaaaaaacctcacagcccaattttggaatataaactttaagacatgttatttaataatctgaacaaactaatgaatgtctttccaactctctcaattccccatctttatgctgacagcaaggggaaaaagtcagactcaattcctttttttttttttttttttgctgctattggttaaaatgagatttggggactgaccttggtttcctattttccattttactctatctactgaaccaaagaaaagcaggagttggtgaccgttactgctagctatattatttagtttgcacctttcaagccacaacgtatttctgattcttttagtgatgcctggattttcttgtttttactagaaacatccaatccgagcctaaaatttgtttgtgagatctgatatgctggtaaactaaaaaaacacatattgacaagcaactttcttttatgtcaaagcatagtataaaaatcctagcggctcactaattctaaaaaggtgcctcaaggagtccagttgcaatgtaagggaagaaaaccaccctggagcataatgcttaagtatttcctgattgagtctgaggatgctgcagatttcatttggcggtaccatcacttttcagttttaaaaatgtagtggcaattttcagatagccacatcatcagctatctgaaattcccccaccgcaatcagctatgctaccgcccatcccaacccatacccaacagacagaagtacaactatctattagcatcagaaacaattcatatttaattaccttcatccaatttgattccattaagccaaccagaatcagcacaagatgatgtcaaaccatgatcctatatatcacttcttagactaaagactgatggagccaagtattgtgctttgctaagggggtcaaatgggggagaactccctatctccatagcagacaggcaaaaacttcaagacctctgaaacagcagaagaatcgctaacactttaacctggtattaccattatcaattctacagatagctacgcagcctgtacagtactgtaataatgactcagccccactacagttagttctaccaatacttaggaagtcttttcacttagacttagatatggtttctgctccaaattcctaactcactgtcaacattttaaatataaataacagagtctcccagcagttgagtatgggtcagaatgttctaaattacatgcaaagagctacaattttaaatattgcgaagaatgagctccaaagtggggggacgggggggaatcttttatatcttaggggatgagggcaggcaaaatgagagacgtttgattttaatatatgaacttgtacagttaatctgtaagatgggttaggccctcttaaaatcacgcttaaacaatctcttaatacaaagttcaataatgacatgtctgggcataattaaacattgatttctactttttttaaagtttttttcatagttacataaatcaatcactggttaacaatgtattacttgagatagcaagcatagttaccaacaccacatcttccagacaatattcacaaagaataattacaccaatgtcagaactttatggtggcagattctcttcaaaaagcatgtttagataaaaagcaaatgacaaattatcaaatccttccttctctcctttttcagctctgtaagaaaatagagatttgtggctttttattttttcatgctagtatcatatagtatcactctagcatagtggctcagctcatgggatttagagtggccaactcacagcccttgggcaagctagtaaatacactgaagcctcagtttcctcatctacaaaacagaaataacaggacctaactcacaagggtccttccaaggattacatttaattagatgatccatggaaagagctgagattcatgcctggcagtaagtattcaataaatattagctattattgctattaaatgtgagccaacacattctaaaagtcaacatacgcagattacttcagcctctataaaaatgtcagtaaagatcaataacctagccagctcacaatcattcacgtgacttaggtgagaaccatgtaagttaactttctcacaagaaagggctaaactttgtttcattacttacattacctactcagcccagcctgacagccaaaagaacacattccatattaaagatcccaccttcctctagcaaggtcaaaaggacttcttacatcctcacctgcacatcctttctttgctcctgtatcccaaagaaacatgtctatactgtggctttctaaactgcaggcctcacctcctccctcttttaaaatcgtgataggttggttaaacgtacttaagaaacactccaacccctgacaattctctgcgcccagtcttccacaacccccagctcagaagtcacctcctctgagaaatttccccaccctcagacaaaattaactcccctatacttcaaagcattttgggtacacatatgccccagtagttaccttataattaactaattatgtctcccccaatagactgaattgagagcaagggagtgttatggttacaggatcagctctagcaccaagcacagtggttggcacatatctggtgctcaag

SEQ ID NO: 98047 - DNA, 17222 bp, Homo sapiens
gacctttgtccttctctccactattatcctatgaccctgccacatccccctctccgagaaacacccaataatgatcaataaatactaagggaactcagaggccggcggggatcctctgtatgctgaacgccggttccctgggcccccttttttctttctctatactttgtctgtgtctctttcttttccaagtctctcgttccacctaacgagaaacacccacaggtgtggaggggcgacccatcccttcagtggacagcgctgcacaactcaaaatgatactgtatggatacacttaatgactataatgatcctcagcttttaaacactaattccaaaactcctaaaatgaactgtttggaaccaatatgatcacttcaaactaaatgttaattttaccaaaagcccctaacatcgataccaaaatatatcagagaattcaaaagcattcaattatggtcaaaccatctggaataaagaagacagcactggcaagacaagccttggcataccttagacagaagatacatatggagatgaaaaacagggagaaaatgaaggattaagataaccctgatttcaactccaagaggaatcattttgtcacagaaaaactaaacaaagtccctctatttttaaactgggtgactgaagtggaaagagaaatgagaacacatttggggaaatcagggattgaaatctcaacagcattgaagctaactttccataacaaacaatttccaaaaataaggctggcacaaaactatgctgggatttgtaccaggcgtgtctaaaggcgctagtcgctgtgactagagaggctgagcagagaatgagacctagacagcggaaagttcagaatgaaagaaaatctagggtatttctctggacaactaattcacattttagagaaaaactgggacactcactctccctcccaagtaaaatgattaactaaaaatgaattccccgggttgctctggggcagcagaggtccgccctgggtgctaatgctaatcgccaccccagtagggatccaccctttgccagcagcccgctgggaacccagacagcgcccactcacggtgggagcagctagtgtctgaaggcattcgaagcaaaggcaaaatacacgaagatctctctctccgaagctaaatgtctaaatacgctctcgaaatcgtaggacccatgggtggctgaccttgaagttattttctcagagctcggctctgggtgcaggcccgagagcaatttgcgttagaagtactagaggaggtggggaaaacagaaggggcgagagccgagggcccctcgatacgaagtcagtgaccccgaagccctacggagcgcaccggagcggctgggggggacgggaaaaggggtctctaggatccccgagcgcttggcctccacacccatgggtcctttccctgcccaggcacaggataaacagttatcagcaaaacgtgaggggccagttcagatctccggagggccgcaggcaccaactcccagtcccactgaagtcacctcagcaacagcgcagccatcttgggttccggtctggacggaagtgacgccaggcggccccgccacccgagggcggaggcgcgccggctgggggtcggggttgggggtgtcatgtgacgagagtctctttaaaaggctctggagcttctccgctcagctctgcctagctggtttgctggttgttttctggttttttagtctcctcctccgcctcctgcagccgacttctaccggaatttgccaggatttcggcagaaacgccgctggctcaaaatctgcagtctacgttccacctgcgtacatattcattttgtatcgcactcccaaacagcaaacggcggacttgtttagattcttccttaaggacttcgcagtctgttgcgttccccctgcctcccaggtcggcctaaaaacgtggtggttggccggttgagaccccgaagagaaaagatactttgggttccctccctttctaatacgaagctttaaccagacagatacataaattgtgacctaagttggggagtgtgtagaggggcctcgagaagaccttgcggaccaccattcccgaaaacgaggagcctcatctaaccacctcgattagaccccacaattcctgggtttgagctgccacatggaccaggcgcccactagccgaggacaatgctcccttgttcgttgtttcagcgctatgtgggtgacacccacagctagaagaacccggagtgaggggaagaacacgctttgatttatatatgtgtatatatatatatacagttttagggaacccaagcacaggaatcaactgccgagcactcaagactgaagaaagaagaagagcaaatgataaaggaagggaacagagcacaaaagttcttgactcttgtggggagtagggtggagaggagtaaaagggacaggctagagcaactcctatttctacaaaaaaaatactcaattatattaatattcagatcttatgtatatttagcatccctgcacttcaggatttaaatagcacaaattcacttatttctgcatcagatgaataatactactttgcatttctataatgcttgacaaagcacattcgtacactttaggattgaaagaggctctctaatccaatctactatctatgcagggatctcctctgcaacacccataacagctgatcttcaagactctacccccccatattcaatgatgggtacctcaaacaacaagttttatttaatgaacaacttattcgttagttattatatttaaatacagttttgtgctatcgaaattccagtcattgacttggctctctggagcttcacgttaacaaacccaaggaatgcctttttcactcagatcttttttggtttttctttttctttttctttttcttttattttgagacgtagtctcactctgtcgcccaggttggagtgcagtggcgctatctcagctcactgcagcctctgcctcccaggttcaagcgattctcctgcctcagcctccccccaagtagctgggattacaggcctgcaccaccatgcccggctaattttctgtatttttagtagagatggaatttcaccatgttggctaggctggtctagaactcctgacctcaagtgatccaccggcctcggcctcccaaagtcctgggattataggtgcgagctaccactcccagcccactcagctctttaaatattaataatttcatttagcatgtagttatggactttttgtcagtccgtgaaaagttctgtaggggattcaaagatacagatgtttgtactgtccccaagaaggttatagccttagcaggatcaataaagacatgcaacaaagaaagtagcaacaacccattgaagagggtgttgataaaaggggtggttagataaagaggaaatgattgcttacagttgggaggtggagttaggtggaaattttggaggggagagttttgggggtttttttttttttgtactttgaattgctgttttatagaaatgttgactacaacatcctgtaaacatttgtcaatgatgatggttttgcctatggacttcataagcaatcccatatttagaattccacaacccaaatctaatactaatgaccatacccaccagggctgtggtctaatgagatgccaggaaggtaccaggacactgtccttcacctgggtgagcctgcagtggtctcatagcaggaataacaatgaccaccccacttacattaacttctagaggtcaggcacggtgactcacacctgtaatcccagtacttagggaagccaaggcagaaggatcacttgagtataggagttcaagatcaacctgagcaacacagtgagatcctcatctctacaaaaaattgaaaaattagctgggtatggtggtggctgcctgtggctcagctaatctggaggctgaagtgggaggatcgcttgagcctgggaggttgaggctgcagtgagctatcattgcaccactgcactacagcctgggccacagagcaagaccttatctctgaaaaaaaaaaaaaaaaattttaaactagcccagcatgctggcatgcgcctgtagttcccagctacttggaaagctgaggtaggacaattgcttgagcctcagaggtcaaggctgcagtgagccatgatcatgccactgcattccagcctgggcaacagagcgagactgcctcaacaaacaaaaaaacctcagctctggttatgtagacatccccatggctaactccaccccaacaccttcaggttctcatgatgtaccaaattgaattcaccttctttcacctgtcatttaaggcctttcacaaactggtttcgactttcctgtccagtctcatttctgactatgccacttcaagtttccccaaatcaagtcaaagtggatggcacaagatcggccctgaatatatccaacacttcagaaacctacatctcatatacatacacacacacacacacacacacacacacacacacacacacacacacacacattctgtctctccgtctcacctctttgtccttgcttttgctgttctatcttctggtaaccctccctatctccctttccaaaatgacagtcatccttcaaggctgattcatatctaacattgcctcctagacacaactattcttccctctgaactatttatttgtttgattatttatttatttatttatttttgagacagagtttcattctgtagcccagggtggaaagcagtggcacaatcatagctcgctgcagccttgatttcccaggttcaagcgatcttcctgcctcagcctcccaagtagctgggactacaagcatgtgataacatgcccagctgattttttaaaaaattttggtagaggcgaggtcttgctatgttgcccagacaggtctcaaactcctaaactcaagcaatcctcctgcataagcctaccaaagtgctgagattacaggtgtcagccactatgcctggcataaacttcatttattaaagtttattttgtctttaatctctcatataacttagtcttcctgatattgcagctgtgtgtgcccctcttttgtactcccagcattttgttcattactaaaggaagtgtcatggcttattatacttgattgttgatgggtttgtcctctgatcttcccatctccacctccccaaaccaaattttcaactccttgctggaaggacttaatttttattcctctctctattacctgcattctcatactttacatattgctggcacttaatacaattttgtagccttgaaataaattgaaatggacttaaacagcagcatgaagcactgaaggacttcttgacaaacggaaaggtcaggggcttcttgcctggaaatagtccagtggagaaaaacttctgtctgggaagaatcgcacaggatgaagggaggtgcggggaaaaaaactcccataggacttggtcatctcaagaagtctgtaatgcagcccacattagaggagataacaggggatatcctattttcagagttctctgggggaaacctccctctagttcctagggctgtgaggcagcctctctcaggcaaggaggctgaggagaaatccctttttatggcctttaaattgaggttccatatctatccctcagagaagtgtgtctgtgtccctgtttttgtccctctccctcaccaccccccacaacattccagcctggggcagggggaggccagtggacacaaagccctctgtgtatggggtggtatgtgtccccccacccctccacccagactatacaatgccccttctgctccctgcactctgcccccctccccaccacctctcaactgcacatgccaggctgcaattggttactggctgaggacagccccctcatgctggggccctaggggattttaagcaggttccaggaaccccccgttcagttcctggtcccccactttctcaaccccacagatgctccgggcccctgcccctgccccagctatggctcctggggctccctcatccagccccagccctatcctggctgtgctgctcttctcttctttgggtaagtggagccactctactctgggagtcttgggactcaggtgtctctcagcaatccccacagcctttgctgcactccccactgcaaccaaagaaagaacaagcaggagcaggaaggtgacattatattcagaaagaaaaaatatgcggctgggcatggtggctcatgcctgtaatcccagcactttgggaggccaaggtgggataattatttgagccccaggagttggagaccagcctggacaacataaccagactccatctgtaaaattcaaaaaaaaaaaaaawatatatatatatatatgaaaagaaaaaaatatgcatttagagggaggaagtagaggttttattttaaaagaaagggtaaaagagagtgtagcaagcttccctgagtggtggscatggctggacccaggttggaaatagtagcatgcccccagagccatgctaacagcctggtgggaagcagtgttagattacataaagaaataggctcaaacacctgggtttggttcccactcgtcccctagcagtgcaggaggtgccttaaccttagtttcccagaaggaaaaagagagtgcgatctaagtaaggagcccaggtttgtggtctcagctcctcagattttttgtctctctatggctcctcacctgttgtgtgggtgaatggagtgaggttctatgagattctgggatcttatccctctaaagctgtcttccttcataagctgaccagccctttccttgccccctggcagatgttgggtgagtaagaggtcaaagcaggattattggaatggccccttcccttctctgaactgccctgaatcctagtgcaatgagtgagccataggcaagtgggggtggtggggaggacatcaagggaaagggggctggccagaatgcccagggttctctgctgtcagctgcttgagccctagactcttctgggttgtactgggctatttgggggtaccctgagaaaatgttaaagatagagagttggagaagggcatagtgagggaaatagggggaaggaatcttgatgtataaggaagagggagagttgtgtctcaacacttgttccactcatagaaccattgagcacagctgagaagggcaatggttgatattgtaacaggaggaatagaagttagagccagtgaattatctcccttgttaaacaagggggattcccaagaaggttctaaggtggaagttccagaaggtaagtacatggtattgcatgctgaggtgagagattcaggacagttggggtgggagtaggggtggcatgagccccccagcgttggtcagacaatggaactttgtttggttgccacctccccctcctgtagaacaaaaaggtctacagttgcccctccctggggccagcccacacacatagtctctctggaatgaccttccttgtgtgggtaagtcttggggatggcactgggccacagtggccaagaggaaggtgaggacagttgaaccatagagggctcacatgtagggtcatctgagctgtaggcttggggtgttgctctgcacccagctgagaggggtatgaggcccttcccttcctgactctccagtcaagagcaagctgtatggcaaccagggattcagcaatgaggacagttgtgccagggaagaagacttatattttctagttatcttcatttttttctgcaagaaatctgagtttgctgtattgtgaaatccaatgcagctgttaaaataagattgatatctatgaatcaacagggaaagctcctccagatacgtaagttcttaagcaaaaagacactagaatacaatgcaatatgtatgtggaaaaaaaaactccacaaaactatttgttgtaagtatgtgtatatyttgagtttattgagtttatactgagtttgattcatattaaatggataacttgttacatcttggaagggaatacaggaaaggaatttgttgggctaagtgtcaaaggagacttttgttttatttctattgcttgaatagtttataagaagagtacaatatgtattacctgtataatttataataaattttaaaaatttagaacactgcatctaaaggatagcttaaaagttagatactgacccaaaggagaagtgagacttaaagacagaacccaatctctggaagtcctcaagagaattctgttactgctgatttcatcttctctacagacatgctaaagagcttgacagacacagcatttatgctcatctgttcagttagtccccagagacttggggctcagaatttgttgtttcttttccaaattggcctctgacctgtgactcagcacttgatttcctactgatctcacttcctctgtatcccttactgggcccataggtgcatctgattccccactttgtgcttgcagtgctgtccccggcccaggccatcgtggtttacaccgacagggaggtccatggtgctgtgggctbccgggtgaccctgcactgctycttctggyscagtgagtggktctcagatrrcwtctbcttcacctggcgctaccagcccgaagggggcagagwtgycatttyggtgagtgcctgggggaatcctggggttggataacagaaagtgcttcaaagaacaacaaaaaagataacttgggctaaggagggggaaatcctttttgagccataaccccaactttggcaaggtaaatgacagtctttgtcaccctgactacattgtcctcccttctccagcactaccctttccagcccaagatcccttaccctgaggctggagcgaagcttttttttttttttttttttttttgcttttttctttctgtaacaaattatggagctaagctttgacagctgtgttctcattagggtcctctcacatgcttcccctcattcctcatagatcttccactatgccaagggacaaccctacattgacgaggtggrgaccttcraagwghvcayccagtgsgtagrggaccctcgctggaagratgrctccaytktcatacacaacctagactrcagtgacartkgcaygttcacttrtgasgtcaraaamcytccarrmmyagtgggcaagacctctcaggtcaygctgtatktctttgaaaaaggtgtgagaagggatggggacaagggtatgggaagcagtttgggaggggatcagggaggactgacaggttgggggaagaggcaaaaagcccggcctaaggacctttattcaggctctgggagcgtgggcagaaggcagttttagctgggagtcctacatcctcaatgcagggcatacactcggactaggaaccacagatacagggccctgctcattctcccacttcttttcccacccctcctagtgccaactaggtamggggtcgttctgggagctgtgatcgggggtgtcctcvgggtggtgckgttgctgctgctgcttttctacgtggttcggtastgctggctacgcaggcaggcggccctgcagaggaggctcaggtaaggggcggagcctagctcccctccccctctccccactatcccccatctgggcggagactactccagtgggtgggagggccaaggggaagaggaagctgtgtccgcggtgcaaggggttccggcgaggccaaacgtacagcagtctctcttcttgcagtgctatggagaaggggaaattgcacaagccaggaaaggacgcgtcgaagcgcgggcggyaggttagcgggacttggggcctagacaagatgggaaggagaaccctgggagccgccgggcagcagtgaggggtgggatgggaacagtcaagccccagtcgctcsgtgactgatgtgtgcgcccctcccccagacgccagtgctgtatrcaatgctggaccacagcagaagyaccaaagctgtcagtgagaagaaggccaaggggctgggggagtctcgcaaggataagaaatagcggttagcgggccgggcgrgggatcgggggttaggggtggagtccgccaaaggcccaaaggtgatggtcatcgagatggagctacgaaaggatgagcagagcccggagctccggcctgctgtcaagtcccccagcagaaccagcctcaaaaacgccctcaagaacatgatgggcctgaactcggacaagtgatcgccacccccccaccccaggccctgccagagcagggggacctaggctcctcttacccccgtctaggtgctttccctctttgctcccccgccctgccctgccctcacctccctttgagatgtaagtttcattccagaattcattccccaggcaattgtattctcccccaccttcacccctggctttctgggagcccaggagctaatcctacccctcacctgccccgggggctgtgtgtttggtgcctgtccacctgagcactgagaagaaagggactttgataccctctgcctcaagtccaggccacctggcattcccatctcctgcatcccccagcctgtccccctggctgtttcctctcccgtccctccctcccctctaccaggtggcccagctccatactctgtccccccagctaatacccagagcacccagatcagactctccttcagggtttatttaggttattattttttattttttaatccattctttgtttgtttacctgtgctcatcctctgcccttacacccatgactgaggaccaatgacgtcatgtggcttttgcaattcacgccccccttaagtccttaatgaagagccagcccaagtagaggggcccctgatcctcacacttcagtatagcattggttccccctgaccactttggagcactgttctgggactccaggtcttgaggagagagacagagagagagaatggatcctcataggtcagggagtgggggagggggcaaatgagccttaagaaatggtttttaaacaaccaaacaaaaagcaggaaaaacaaatgggaaatgggggggcgggggggaggaagaggctgcactgcagccacaggggattcttaggatttttctacattctgtatatttcttctcaaacctccaaatgtccttaaatgtttaataaacactgacatttccagaagctgctgccttgtctagaatttcctagtcctcctgggaataattcctgccccttatcccatccccaaccttccatacttggcttcagttgtttagtttgtttttttggggtgggcttatatagtatactagaaagaactctgaaatagcctcacaagacacattcataccttcagcaaataatcagtgagattatactacgttgtaaactctgccagtctctgcttttacatgagttaaaacgcagaatctgtcttcaccaagatctgaattttaaaacatcccagccactctctagctgtgtgatccccaggacagttacctgactttggtaagcttgtttatgtacttgtaaacaactgagataatgatatctgccctgcttaattcctagggattttataataatcaaatgagatcctgtgtatggaaaactttgtaaactgtaagttgatatacaactaaatattaaggtgttcaatatttgtttctagtgcttgcctaaggtagtacactttacaaattagcacaaatcccattcacctctctaaacaatcactgctttgttttgttggtacatgattttacttctgtttacctattaataggtatactattaatacctcattagctagtttgttggtatgttgatttaggtataccattaatatcctggtatcctgaactgattgtggaaaaacatatacgtatcattttcccctggggattactgatggcacaaaaaaacccaaagtgcccacaagtaatttcttccccttgttaagaagctaaagatatgattaacaccagctttaccaaaacccagagtgcttccatttgtttgaggggtgtcttcaatgtctttaaaaaaaaatcaatctgccttcatttaaatataaaagctaatagagtatatatagccttttgttggggggaagtgggagaggaaacttagtcacaacccagtaataaagttgggaatatcttaagcccaagattccttattagttaagatgctaaactgtccattattcattagatagttgcagctgggttccctgcttaaacttcccagactgtcaggagagtcaaatgaggttggatgtggtggctcatgcctgtaatgccagcactttgggaggccgaggtgggcagatcacttcaggctaggaggttgaggccagcctgaccaacatggctaaacactgtctccactaaaaatacaaaaattagccgagcatggtggtgaacgccttctaaccctggctacttgggcagctggggcacgagaattgcttgaaccgcggaggcggaggttgcagtgagccgagatcatgccgctgcactctagcctgggcaacacagcgagactatgtctcataaaaataaaaaagaaagagagagagagagtcaaatgaaatattatgctacttatgagatagagtatagctcaaagcttctcatttaattacacttttgttctaaaatttatcagccacctgcattttgctagctcagtttatccaattattttaatatttcttattccatcaagaatcctggtaccctgggacaacattttgcaatctcttgcattaggcattttcacaagcattgcacacttaatgtgggtttttccaggactgtgcccattttccacaatccccaacaaagtaagccacatcccccctttctttcctctgcagtaaagcattaaataaagtctagaataatgattcagataaagggaaatgacattgttatatgggaaactttgaatcccatctaattattactttgaaataaatcgttcacaatcctcagtgcgttgttaataatagcaataattttgcccaggcatgtgagcactttgagaataatttaaagcctttttcagtgttaaccataaaaagaaaaagattataacccaatttatgaatacgcagacaaagagtctaaataaaatatttgcaaaagagaattccacaatgagttaacaaaataataaattatgaccatgaagaatttactctgggaatgaaagaatagttcagtatcaggaaatttactaacaggatgtgtcatatcatcagggaaaaaacgtaattctatcaagaggagatgtaaaaaaaaaaagcaattgttttttagtagctattcctacaaaacattctaagtaaaatagtaatagaaataaccataatggacactatttttcaaaaatcatttaaaaagcatattaaatatgaaatattgcagccattgtcattaaaacaaaagacagtacttacattatcgctaaaaatattcagtattatatttgaagaatttagctagtgtaattaaccaaaaacaaggaacaatctgtatacatagatgagaaacttatctttatttgcagataatatgattgtgtttctaggaaatccataagatgcaactagacatgtattgaactaagaagtcaatctggtagtgtgattataaaataaattaatttcagtctataactagaaatctagctagaaatgaaaataatagggaagcccactgatgacagtaaaaagaacagaaacagaaattaacaagaaaggtacataacctgtatgaaaaaaattataagatttattaagtaacaatatgtgaaagttgtcagaatcaagatggagacactcgtgttaaaaaagaaaaacagggccaagcgcagtggctcacgcctgtaatcccagcactttgggagctgaggtgggtggatcacttgaggtcaggagttcaagaccagcctggccaacatggtgaaactccattctactaaaaatacaaaacattagccagacatagtggtgctcacctgtaatcccagctactcagggggctgaagcaggggaatcgcttgaacctgggaggcggaggctgcagtaagctgaggtcatgccactgcactctagcctgggcaacagagcgagactccgtctcaaaaaaaaaaaaaaaaccccaaaacaaacaaaaagacaaaaacaaaacaaaagaaaaccctgacaaacagaaccagggagggctatgaagaaacaggttctcatgcataaatacttgataacaaaagctatgacaaaagaatgcaaaatggggacttaggggaaagggtgggtgggggtggtgagggataaaaaaaactacaaattaggttcagtgtatactgctcaggtgatgggtgcaccaaaatctcacaaatcaccactaaagaacttactcatgtaaccaaacaccacctgtaccccaaaaacctatggaaataatttttttttttttgagactgagttttggtcttattgcccaggctgaagtgtgatgacgtgatctcagctcactgcaacctctgcctcccgggttcaggcaattctcctgccttagccccccgagtatctggcattacaggcgcccactatgcctagctaatttttgtatttttagtagagacggggtttcactatgttggccaggctagtctcgaacccctagcctcaggtaatccatctgccttggcctcccaaagtgctggcattacaggcgtgagccaccgcgcccggccataaataaattttttttttaattctatgagaaataaacattaaacgtttttgaaatattcccttccccctcgttaaattattaaactaaatgataaatctatttggattaggctataatcaaatggctttctgatctccttgcaaatgaattttgcctactatattgcagccaaattttttctttatctttgcatgttctcacttataagtgagagctaagcatcgggtatatatggacatgacaataggaacaatagacactggggcctatttgaggggaaagaaagaggagggacgggctgaaaaagtactcattgggtgctatgctcactacctagtgacggcataatttgtaccccaaacctcagcatcacacagtataccaatgtaacaaacctgttcatgtaccccctgaatctaaaataaacgttgaaattaaacaaacaaaaaaaatgcaaaaactgcaaccttgcacaaatgctgttcacgaccttacacaaaaattacatctacaaggacatctgcccaacaactgtctgtcaaacctccaactggcattgtctttattgattattgtagcaaaggataattattaatatttcaaaacaattatgtgagcctcctcattttgcctttaaaaacctttgtcagctgggcacattggctctcgcctgtaatcccagcactttgggaggccaaggcaggcggattgcttgagtccaggagttcgagaccagcctgggcaacatggtgaaactgccatctctacaaaaaatacaaaaattagccagtcgtggctgggcgcggtggcttacccctgtaatcccagcactttgggaggccaaggcgggcggatcacaaggtcaggagattgagaccatcctggctaacacggtgaaaccccttctctactaaaaaatacaaaaagaaatagctgggcgtggtggcgggcgcctgtagtcccagctacttgggaggctgaggcaggagactggcgtgaacgcgggaggtggagcttgcagtgagccaaaatcttaccactgtactccagcctgggtgacacagtgagagtccatctcaaaaaaaaaaaaaaaaaattagccagtcatgatggtgcgtgcctgtagtcccaactactccggaagctgaggcgggaggctcgcttgagcccaggaggtggaggttgcagcgagccaaaatcgcatcactgtacttcagccggggtgatagagcaagatcctgtctcaaaaattcatttaccactcagttcagtggtaaatgaattgattatttaataaaatatattggcattggcacagttgacttatacgcctggaagaaatcaaagtaaaaagttttttccctcacatcctatacaaaaataaaataaaaattttaaaaagacaaatattagaaggaaataaaaatatttgtttaatctccaaatggggaaggtctttaggcaagacaggaaatccggaaatcataaaagaaagtgataaaaagttcaatctcccggggctgtgggccctgaagatgtggcgctgtgtagcagccgccgcctcgtaaggcctgggcgctgtggcctgggccctgtggcctgggccctgtgccctcctagaggagcaggcaggtcccccagacttgaggtgggggctctgccagctccagcaccacccttgccccgagtcttttaacctgagtgttagcattttaaagagaccctgcaggagttctggcctctgactaactgccccaccccagcagagacctggtcgagactgtaactagtgatgtttgtacaaccaaagactctattttgtggtttaaggagaataaagttgactacattaaaaaaaaaaaaaagaaactcaatctctctcttttttttttgagatggtgtctcgctgtgtcacccaggctggagtgcagtggcacaatcttggctcactgcaaccttcacctcctgggttcaagtgattctcctgcctcagcctcccatgttgctgggattataggtgtccatcaccatgcccggctaatttttgtatttttagtacagatggggtttcgtcatgttgggcaggctggtctcaaactcgtgacctcaagtgatcctcccacctcggcctcccaaaatgctgggattacaggcatgagccaccatgcccaacctagttcaacctctttaatggcaaaatacattataaacaaagacaaaagacaactggtgatgatggataaaacacaagacatatgaaatgtctttctacacattttttttttgggggggtggggcagatggagtctcactctgtcgccaggctggagtgccgtggtgagatctcggctcactgcaacctccacctcccaggttcaagcgattctcctgcctcagcctcctgagtagct

SEQ ID NO: 98048 - DNA, 16071 bp, Homo sapiens
gctcgcttgaacccgggaggcggaggttgcggtgagccgagatcgcacattgcactccagcctgggcaacaagagcgaaactccatctcaaaaaaaaaaaaaaaaagaaaagaaaagaataaaggcagtgagaaacagagatgataaagaagaaacagaaaatctttctgatcatgttctatctttgaaattctagtatcctttgaagcccaaactatacttcctacctttggaatctgttaaatactcctattaattataatttccccacttccccttttttgtttaaggtaacctgaatgagtacttcttacttggcagtcttaagccaataataatgctaaaataattgagcattcattatgcatcttgcaccctattagcatgttacatatatttaatgctcaaaactaagattatccccattttacatgtaagggtactgagacccagaaagattaacttgtgtaaggccacacatttaggcaaagccagaatttaatccaggcaatgtgactctagtacttatgctggtggttgccttcacgtaggtccaatgtacacatcgcctatagagtacaggttaaacttgtacttcaatagcagataatctcagtccaaataaaagatttcctaatggtttagtttcagtcatcaaagaatttaagtgaatggaaaaaagtatcttaaggcatacgtaaaggatggggcctttaaagagcccttccaactttggaagaagtaaatctggtcctagtaaaagaccatctgctgtacctgaagtcaaccagttcatctgaagaaaggctaaaattcaatacacttttattagaagcttaaaattgcctgttactactgatattacaatttcctagtgaaatcttttttttgttgagacggagtctcgctctgtcgcccaggctggagtgcagtggcgcgatctcggctcactgccagctccacctcccgggttcacgccattctcctgcctcagcctcccgagtagctgggactacaggcaccccccaccacgccgggctaattttttgtatttttagcagagacggagtttcaccgtgttagccagcatgctctcgatttcctgaccttgtgatccacccccctgggcctcccaaagtgctgggattacaggcctgagccaccgcgcccggcctgaaatcttaaatattagaattcacataggatcaagccaggactccaccttggatttttttttttttttttttagacggagtctcactctgtcgccaggctggagcacagtggcgcaatctcggctcactgcaacctccgcctcccgggttcaagcgattcttctgcctcagcctctggagtagctgggactacaggcgcgcgccactacgcccagctaatttttgtatttttagtagagacggggtttcaccatgttggccaggatggtctccatctcttgatctcgtgatcctcccgtctcagcctctcaaagtactgggattacaggcgtgagtcaccgcgcctggcctttttttttcttttttttgagatggagtctcactctgtcgcccgggggatggagtgcagtggcgcaatctcggctcactgcaacctccacctcccgggttcaagcgattctcttgcctcagcctcccgagtagctgggactacaggcacgtgtcaccatgcccagctaatttttgtatttttagtagaaacagagtttcgccatgttggtcaggctggtctcgaacttctgtcctcaactgttccacctgcctcagcctccgaaagtgctaggattacacgtgtgagccactgtgcccagcgtgtaccttggattttagattacagagagacaaataatctaaaacgatcacctttctctctagaacagtgggttagaggatccagaaacagacccaaatatgttagggaatacattaaaaatggcatttcaaatcagtagaggaaaagaaaacttattaatgatgccaaggcaactagttaaggcaactgaagcataaccttgtccacattcactaaaattccagaaggaacaaatatttaaatgtaagaactgaagctaggggtaaattatttttaaaatattggaattcacaaaaagccattcaaagcataagatccagagcacagaaaaaatgagtaatacatctgactactacataagtactaaaaacatgtccatggcaaaaaaaaaaaaaaaaacccacagaaaaacaacaacaaaacagaaaaaccaccaacaaaatgaaagtaagtgacaaattggagggaatatttgcaacatatttgacaaaggactaatttccttaatatatggagttcaaacagattaatgaacatgatcaacaggctgggtgcagtggctcaagcctgtaatcccagctttttgggaagctgaggtgggcagatggcttgagcccaggagttcaaaaccagcctgggcaacatggcaaaatcccatctctacaaaaaaaattaaaaaatcagctgggtgtggtggtgcatccctgtagttccagttattcgggaggctgaggtgggaggattgtttggacctgagaggcagaagttacagtgaaccaagatgatgccactgcactccagcctgggtgacagagggaggactggtttcaaaaaaaaaagtcaacagcccaatagtaagtggcaaaatacattaaaggccattttcagggaaaaaaattaaaataaaaacagtttatacacatataaaaacaccctaattaaagaaatgcaaatttaaaacaatgatataccatgttgggtgggtgtggtggctcgtgcctgtaatctcaacacttccagaggtcgaagaatcacttgaggccatgaattcaagacaagaggaacaatatagttaagaccctatctcttaaaaaaaatttgtttttttaaattagctgggcatggtagctcatgcctatactcccaactacttgggaggctaaggtgggaggattgcttgagctcaggatattgatggaaccactgcactccagagcttaggcggcagggagaccgtctcaaaacaaaaacaaaaaataaaattatataccatgtttaacctacagcttaacaagcaatatgatataatggttaaaactgctggctctagagtcagaatacttgggattaaatcctggctctactcctcactgtgtattctccagtttccttggttgggttgagaactaaatgagaaaatgtagtaaagcaattagaactgtgcctggcatgtatatagtaactgctcagttaacattagttctactagttcaatcaattagttctattagttcaattctattagttcaattaaaattggtttaaactgaaaaaaaaagaaaaaacgatgatgttgaaaagaaagcagagaactaggcactcatacgccatcatacaccactggtagaagtacaaactggcacaatgtctttcagtggtaatttgacattatctacttattttattttatttatttatttatttttgagacggagtctcgctctgtctcccaggctggactgcagtggcgcgatcgtggctcactgcaagctccgcctcctgggttcacgccattctcctgcctcagcctcctgagtagctgggactacaggcccccgccacacgcccagctaatgttttgtatttttagtagagatggggtttcaccatgttagccaggatggtctcgatctcctgacctcgtgatcgcccgcctcagcctcccaaagtgctgggattacagatgtgagccaccgcacccggcctatctacttattttaaatgcacaaacccttttgactttgcaatgtactttaaaacatttatcctacagatcacatatgtacataaaaatacatacatacatattcataaagatacatagggatttttcattacagcaatgtccttattagcaaaagactataaataaactaaatggtcatccatatgggtctgaacaaactatggtgcatcccaaaatggaatattatgataaaaacataatccccaagatagtcaaaaagcaaatcaaaaagcaatgtggacagctctctcattagtgtttgtatgcagagaagatttctggaaggagacacaagaaatgagtaacagcagttgccctgaggagcaagactgagagttgaaatcaaatggagatttgcttttcactgaacatcctgtaaacatgaaattttttccatgtacattactttttcaattgaacaaaaactggttaacttttaaaaatgagtgcagtcatcatttatcattacattcctatcagaaaggcagagggaggcataccaactgaagacaaattctaagagaaataatgctagcctatcattgcagattaaagggccaaaatggatatcctagagcaaagatagtccttggtccttaaagaactcttctctagagagtgataagaaccacagggactaagctcatgagttatctttccagatctcacattatccaggtattaactccagagcctataaaacaagagctgttcttccctccatctgcagaagcataggagtgctcttatacttggtgtgttggttaagatgaggattttgggggaagaaggaaaagagaagggactgatggatatactttatttattttttattttttgagacggagtctcacgctgtcgcccaggctgaagtgcagtagtagcatgatctctgctcattgcaacctccgcctcccgggttcaagcaattctcctgcctcagcctcccgagtagctgggattagaggcatgcaccaccatgcctggctaattttttgtatttttagtagagacagggtttctccatgttggccaggctggtctcgaactcctgaccttgtgatccgtctgcttcggccacccaaagtgctgggattacaggcatgagccaccgtgcccggcctggatatactttataatggtctcctggtcctaatgatatctttgggcaacttatttcttagtttttccctttcatcttgacaccttatatataaattcactttacaattcacaaagcacagttctacttacttattaattctcctaaccacctcatagatgggtattacaataccattttatgagtttcagaggggtttccttgtcccacacatattaggcttatgtcctggcagccccccattgaactctccaaacctgatcctttccactctgtgattttctctcttcatccctgctcaatctccctgcaccagcacccgattccattttattccagtcaacactaaacgcctgtgttcttaggtgctgattctagacagtgacagaggaaattttttaaggaccaaggacaagatatgtttttccttctggggacagatttgagctagttgctttttaaatattgttcctttgttattctgcctgataagacaaagtagtgggccttataaacaggatctcaccaggattgaatacctactatgctatgatattgtctagacactttattcattttatctcacttaccctgtaaaagcaggctctattatccccacaatacaaatgagttgatagaaatttagtgaagacaagacagttgtttaatgtcatatagctcctatgttcccatgttgaataaggattcaaaccccagtatctggctctacagcctgtggtacattacaccatgttgtccaacaagcatagctctcagggttacatggtttgttaaagtggttaaaaaccccaatcaaaggcccgtggaagttcttaagcaggggtaggttatgccagaaaaaaagtagtggctattcagctaattttctcacatttactcagtctttcccgtctgtaaaataaaaatgaatctaagttccagagaaaacaaatgggggcagtgtgagccaaggaagtgaataataataagcagaagagaaaggcagcctctgctcattggtagtcccaggaggtcggccttctgcagttgccaagcaacgagtgtaaacagcacaagatcatggccactaactacagtgccaaccaggtaagttcccattctccatttctttaaygtttacttttgtttttcagattctatctttggactgtcccctctcataggattctgatctttgaacagatagctgagagtggagtgagataataytttacctcctcagggatagagagagcccaggggygatccaaaggtatctctkggttaaatttgtagggtgtaaaccagaagttggcaattttttttctgtaaaagggcggagtgtaaaaattttaggctttgcaggccaagtggcaaagtcaaaaatattctgtagctacttgcataattaaagaaaaacatttttccataacatttttgacaaattcaaaatataactgagtacaattttttgtactactaatgaaaataatggaattttgggggttgagaaaacatttcacttaactgggattcaaagttagtgttccatttgactgaatcaattgtaaatgttcatctataaaaatcacccttactctcaggccatccccaaacaggcagcaatatggatatggcccataggccatagtttaccaactcctgatctagaccagtgctgcccaacaaaaagagtgcrasccacaaatgtaattttraattttctagtagctacatgaaaaaattaaaacataaaatttaaatatattgaatttaacccaataaatccaaatattatttcaacatttaatcagtatttaaaaaattataatcagacattttacgttctttttttgtactaaatctccaaaacctgctgggtgttgtagctcacgtctgtaatcccaacactttgggaggctgaggcacaaggatcgcttgaggccaggggtttgagaccaccctgggcaatatggtgagacctcgtctctacaagtaaatttaaaaattagctggacatggtggcatgcacctgtagtcccagctacctgtgagtctgagggaggaggatcgcttgaacccaggtgtccaaggctgcagtgagctaggatcatgccactgactccaacccaggtggcagaccaagatcctatctcaaaaaaaaaaagaaaagaaaaaaacttaaaaattcagcatatttcatatttacaaagcacctcaatttgaactagtcatatttcaggtgctcaacagctccatgtggctcccggctccatgctggacagcacacatctagaccaaacaaattacacccttgtcatagtgacttaaagcctacatggttggtcaggcctttggtcttcaaatctaaagaattgtgcctagtcttcatttcctgggtttggggccttgaagtctcatagggctacttatctttctctccacagtatgaaaaggctttctcatccaagtatctgcagaactggtctcccactaagccaacaaaagaggtattccatgttcagtgcacctacaagatagcctcatgctctccctgtcaattaactccttttagcattctctaaactcccatatccttctctgaccaagctccccaaatacttccctttttcccctcacaaacctttatctctcccacttgtaccccagagcatctcttctcatgaaggctacactcaaattattgccaacgatcgtggtcatctactgccttctgtgccccgttccaaggtgagatactatcttcactcctatcaagaaagkcaaataattaaggcacagaactgggagatgtgcagtctctcacagccattatygggaaaattaaagtttaatctaattcatgttgtaatgtgagagcccctgaacttccggccagcttacccagcaggatagagttgtgtttagcacccttcagaagttcttaaattgatcaatgatctgtataaatgaaagccttcaggtgatgacatttgtgcagtgggtactcctttgccacactcggcctaaggatgtggaatttaagttggcagagtaaaggggatgaaaaaattaggcctgcaaagcctaaatgagggagggggataaggaagggtgggaagattatgctttcagtcttgtttcataaccatgcattcctaaaggtaaagaaaggaaataatacaraggtctaagtcagttactgggagtgagaagccctactgaggaatcccttttcatttttaggcaaatccttggggttccttcatgggcacctggcaaatgcctctgaagataccccctgctcgggtgaccctgacctcccgtacaactgctggtgctgcctccctcaccaaatggatacagaaaaatcctgatttactcaaggcctccaatgggctgtgtcctgaaatcttaggcaaggtatctattcttcccatctaacccaaaaccctgtagtctcaatttcttttcaacctcaaaaaatgtctattgttatgccaccactatcccagcatgggggacctctaaccaatttgtcttatcttgactagtccttaatcaccttctgaggcctgaagggatgggctaaggacatcatacccccaacagtagaaaatgatctaatctcaaggtgggggagggtggttagagaaatcaaatttaacttttcttatttgaaacttgatctactgcccatggtatggggagaaagggagttagaatcctgaggtgcattaggaatgatccgggcctgaccagagacatgactatctctccsactcttatcactgacagccccatgatccagacagtcagaagaaactcagaaagaagtctatcacaaagactgtacaacaagcacgaagtccaaccataattccaagctccccagctgccaacctcaattccccagatgaactccaaagctcacacccctctgcaggtcatactccaggtccccaaagaccagccaaatcctaagagcccacctggaagtccaygtatgctagaactctgggcagggcctaatctagctgaggtccagaaatacaaacctggaacttcatatggaccaagkggccacacactgaaaaacccgtatagcgactsagtgaaataaacaagagcccccagtcagaactgtgaaacagggaaattttggggtgggagtaaaagcaaatttggaaaataaacttttttttgttgaatcttttactgatctggattttccattcttgctatggctgcctcttgtaacacaattaggagaaggaaggtaggagaaaataaagtagggaaaagaacatacagtggtttgggtggaacacatttttacaagaattgagtcagttatactccagaaatgaccaagagaaagttggtctgaatcatggaaaaagggcagaacctcaaagaaccagtccctcaaccctacccactcattttttatcctgagcatggacaactaacaactacaaaatcagaaatagaattgagtagagtatgtatatgtgtgtttggagaaggtggggaagaaaaggtagggaaaaccaaagtagaagatactatgcttgtgtaagactttctatctaagcccaagtacaaatatagtttgaaaattgaagatattaaagtgattggaagacagagaagaaaaagacagtaagtagaaatttaaggcagaataacaaacatgatgctctgtcacaccccccacccacccactaccatgcttcaatcacccaaatggtacgaaaccaccaaaaaattcaactgccctacccattttccagcctctaacagctgtttatcattgaccccattttatattttcctggcactggctgttaaatttaatgcccttgccaaacctttcccagtcccaatgacaaagtgttctgtcatgatcacttgtccctcattccaaggacaaagtagagaacagctggtttaaaatggaggaaaggtacaaggacttcccagggcccctctagtaaaaagggaaaaccaatcattacttaaagccaaatactatttgggaccctgaatgaagactgttaaaacagcgggtccccaccttaactaaggtcttcctatccaattgacaccagccagttaacatttcccctcttcgacccacagctttaactggctggccaacaactcgaagtgacagatgagataagtctcttattccagagttcccaaaaactatcaaaacagcatgcctgctaaagcctggcctatatggattttaaaagcagcaagttttctcattaaattatacatttttgccaggttttcaacaatcccttcttttttaaaaaaaaactctatgcttcattcaccccaagcctataacctcaggtcatcatcccctagctgtcaccaacactggtcctctgtgcccctcaatgaatcataatttgctgaactgtaccatgaagcttataatcagtccttaatgggattttggtgcctataacccaaaagcactctacatgcgtcacttcttttctttttctccttccttctctgaggcttttctgtgatatttaaatctctggctaagttctatctgattccctgaaaacttttccaatgatgagatgtaggagaactgtttccctcctggtaaaggtcagattgcggggagagggaggatgtaaatgcctgagacccgagggaagaggaggaaattggttccttcccaacagccattttcttggtttctctagatttcaaggagagtcaaagataaaatgagtatttaattcagtttcagaaaaaaagggtacattacttcgatgagaaagcataaaattaagaggcttttctggaaatccaagaaaaagaaataaccattaatatgttcaatgataattttctagatcttcctcgtgtccaaagctatatattttctcctcaaaagcagctgctccaagaactaactagccctctttatctccctctagctgggacagactaattcccctccacccccacctctcttctttcaataacactgtgtaggtgttaatggcctgggctctcaccaatgaagagaattgtcctttaagccagcaacccacaggcagtggcacccaaagcctcaccaacccaccccccaacccggcccatccccagggcagaagccacagagctggcattgtttccactgtctcaggaagaaggagccaaaagctgaccctcagcacaaatcaaagcccaatatggagagagaataactgcttctaggccgagagtaggcaagctgtgggcaaaaaaggggagtttttgcagccacctcatctttagaaacaaggggaaaactagacccttttccactattatggtctaccaggtactctactgctccaaggagatctgaaaatacaaaaggatctaaacaaataaggagaacttttcccaggctggagataagaatgacaaacagaaagatgggtgaatgtaataatgtgtaggaagatgatgctgggagcctcctttcttcacatggctgccagccccatagaggacaacacagtaagaaccaggacaaccactccagactggtatagctggggaatcttcaggccttttcctaggtcccacatctgtggacaaagcaaaaaaaaaaaaaaggaatttcagtaaataggacattaacagttcctgtctcagaaagtaattctacctaaaggaatagatatctcctctcagcatgattctagagaaaagcgcttctacccttatgccccacctttacccttctcaaaacccacagtatggaacctattatccacttattccaatgacagaaaatcaggttctattgtgtggtgatggtaggaggaatgttctctagaatgccacaggccccatacggtatacaaaagcttccagaatgaatagatacaacttttcctcaggaccacacatctagattaatgtttctcaaggtgtattcttccaaacacttgctctcagaatgttgaaagccattgtatgggccaaaaaaaaaaaagttctgtggtcatacaaagttcataaacatttaactgcaagactttctaaacagttttttttttttttttttttttgagacggactctcactctgtcgcccaggctggagtgcagtggcatgatctcagctcactgcaagctccacctcccaggttcatgccattctcttgcctcagcctcccaagtagctgggactagaggcacacgccaccacgcctggctaattttgtttttgtatttttagtagagatggggtttcatcgagttagccaggatggtcttgatctcctgatctcgtgatctgcccgccttgtcctcccagaatgctgggattacaggcgtgagccactgcgcccagcctcttacagtttactaatgcacactgtgaatctccaaaagagagatataatatgcctgatttcctagatacagtcaatctcagaatctttttatagagggaaactctatttatcagaggactagtattctaaaggatactctgagatctagaacactatttctcaattttgttttgactgtgactccactaagaaatacctttaaaactggaacccaatagatatgtatatataatatagcaaaagttgataaaacaatatttaccattactaagtggtgccatatatatacaagtatatatttatatattttatatataaataaacttcattaaaaaacatatattttctcctttttgtggagaacggggtctcattatattgttcaggcaggtcttgaactcctggactcaagctatcctcctgcctctgcttccctaaaagctggcattacgggcgtgaacttctgcacccagccactccagtggcgccatcttggctcacagcaacgtcagcctcccaggttcaagcgattctcttgcctcagccctgccagtggctgggactacaggcgcatgccaccatgccaagctaatttttgtatttttagtagagatggggtttcaccatgttggccaggatggtctcaaactcttgacctcaagtgatacaccctcctcagcctcccaaagtgctgggattacaggcatgagccaccacgcccagccccagcctatattttctattctatttaaatttctttttttgttggtagcatgccactaaattggttttctaccaattgagttaaaacccacttttctttttaatactaaaaaatagagatagactcttgttatgtcttgcccaggctagtattgaactcctgggctcaagcaatcctcccgcctcagcctcccaaagtgctgagattacaggtgtgagccatctcacccagcccctaccccaccacccacccccacttttttttttttaattttttgagacagggtctcactttgtcacctaggctggagtgcagtggcacaatctcagctcactgaggccttgacctcccaggttcaagcaatcctcctgcctcagcctcccaagtagctgggactacaggcacccatcaccatgcccagctaattttttgtatttttggtagagatgaagttttgccacgttgcccaggctagttttgaactcctgagctcaagcaattcacctgccttggcctcccaaagtgctagggttacagacatgagctaccatgcccccagccccacatttaacaaaacactaattttgactctcttgtgtcttagggatattaacatattaatattatattataagtcactaaatgagcccatggggcaaaagcagtcttcattttccacacttcccacatacatggcgccttaacacacacatacacacatacacccacagtctgaatgtaaaactgcctaaattaggagtcagttcagagaaaagatggaagcccagaaaaaaaaaaaaaaatcaagatgagaagatgcctccacctcaaccctcaaattgcttctaactaggagattaggagtcaagcagattccacaaagagttgttttgcttaaataaggacaatgttttatagagagtgagtcctactgggtagcagtagtaggcagggatattccctagaatgccacagaccctataacatcctactctttcactcctcactcccccattagatcttctggcaagtcaactatcaagttcagaggccaaaaactgcagactgtcacagaaaacacaaaatcctgtcccacactcacagccagtacttgctagaagaaaaaataaaagcagacttaaggacccttaggttcttcacttccctcaacaaaaagattaccatcacaggcaagaaccagggcagaaaagctctaagttctgcaattttataaaacctcccctctcttacccccatattgagacaaagacaaatatagggcaagtctctgcctgagccaaaatatgaacagaggaagctgatcagctgattttctttacagagctttgttctgtggaataggaagtcattaatggaaatgtcctccctctctactgcctccccctcagggaagtaaaaagtcattttaaatcaaactgaacactgccccagggaacagttgatacagacacttaatttaataagtaatttagtctctcattttttttattccattaaactgtctattggaccagactgaaatccagaaagtgcttgtctctaaggctatgatttggaagtaataaaaagtcaaattaaggcaaaagcatccatctgacagttgactcagattcagaagtaatgaaaatacagaaagaactgaattttaattgccttcttggaagcaaaactagggagactacaaaatataaaatcttttcttttttttttttttgagactgagtttcacttttgtcacccaggctagagtgcagtggcatgatcttggctcactgcaacctctgcctcctggattctcctgcctcagcctcccaagtagctgggattacaggcacatgccaccacccccagctaatttttgtatttttttttttttttttgagacggaatttcgctcttgttgcccaggctggatggagtacaatggcatgatctcagctcactgaaacctctgcctcccgggttcaagcaagtctcctgcctcagcctcccgagtagctgggattacaggcatgtgccaccatgcccggctaattttgtatttttagtagagacagcgtttctccatgttggtaaggctggtctcgaactcccggcctcagattatccgcccgcctcggcctcccaaaatgctgagattacaggcgtgaaccactgtgcccgcctattttttttttagatggggtcactctgtcacccaggctgaagtgcagtggcacaatctcggctcagtgcaacctccgcctcccaggctcattcgatcctcccacctcagccttacgggtagctgggaccacaggcgcacaccaccatacctggctaattttagaaaccagttttgagcagacgatgaggtcacataggaggcaacatggacagtttccaatctattaaatgattcctgccatgtgcagtggctcgcgcctgtaatcccagcactttgggaagccaagagttcaagaccaggctggccaacatggtgaaaccccatctctactaaaaaatacaaaaaaaaaaaaatttgctgggtgtggtggcaggcacctgtaaggctggccaacatggcaaaatcccgtctctactaaaaataccaaaaaaaaaaaaaaattagctggccgtggttgtgggcacctgtaatctcagctacttgggaggctaaggcaggagaatcacttgaacctgggaggtggaggttgcagtgagctgagattgcaccattgcactccagcctgggcaatggagcaagactctgtctcaaaaaaaaaaaaaaaaaaaaagattcctaacctcaatattgaaacctggaattcttggcacccagtttctattaaagttggcccaattctgtccaacatctcaaaacagaaatgcaatataatgtgtagataagaaaaggtaatctatttgagtcctgtcagaagcactactctgggtcaacaggaacggaagaatgaaag

SEQ ID NO: 98049 - DNA, 38421 bp, Homo sapiens
  misc_feature (1)...(38421): n = A,T,C or G
taactaaaatgaggtggtacgtcacaggtgggtgtgaggattaaatagtgacacagctagagtttttagcatagttactggcagcagttgttaggatttctgccccagaacatcatttctatctgtattcagtcccttattaaacctttattcctttgagtgtgaaaagctttcagtcctcagcagccccacattcaaacataaccttcctgggagggatgagaacttgggtcttagaattggcatcttgaagtctgctgagaataggagtgaaggagggatagggcagaacttgacctccaggaaggaagagaggggatccccctttgatgtgctgtgcctcacagttttgctgggggctggtcagcttaaagccagctcacctggccgggcgcggtggctcaggcctgtaatgccagcactttgggaggccgaggcaggtggatcacgaggtcaagagatcgagaccatcctggtcaacatggtgaaaccccgtctctactaaaaatacaaaaaattagctgggcgtggtggtgggcgcctgtagtcccagctactcgggaggctgaggcaggagaatggcgtgaacctgggaggtggagcttgcagtgagctgagatcgcaccactgcactccagcctgggcgacagagcaagactctgtctcaaaagcaaacaaacaaacaaacaaacaaagccagctcacctgcctgtcttgtaggtgacctctggcctgctctttcttgggttacaccttgggttttagcgctgagtggcatcttagagtttgggcctttttttcctctctttttttttttttcttttcttttcgagacggtgtcttgctttatcgcccaggctggagtgcagtggcgtgatctcggctcactgcaacctccacctcccgggttcaagcagttctcctgcctcagcctcccgagtagctgggattacaggcacacgccaccacgcccggccaatttttgtattcttagtagagatggggtttcatcgtgttggccaggctggtctcaaaactcttgacttcgtgatctgcctgcctcggcctctcaaaagtgctgggattacaggcatgagccaccgcacctggcagaccatttttttttttttaaactttaaagagattatcaaacgaatgcctaggtctttcagaattgtcaatggccagagaaagggtactggctatttttctcctacggtccctttccctatgagaactcactaattttgcagttacctctgtacccgttttaatattgagattaacaagagagagaagctgagtctggcttataagataaagacttttgggagtctatgggccctgctctgtcccagctctgcctcaccttctattggtggacttcagctggctgcaccctctgggaacagtttcacctcaaaccccaggctcccagtgcctgacccagggagggagaagcatcttttatcctgagttttctctaacctgccttttccatgagtgattgatacctgaaatttccacatccttttaagacagactgttaaaacctgtaggttaaataaccggacacagtgacacacacctatagtcacgctacttgggagtctgaggtgggaggatcagttgagccagaagttcgaggctgcagcctgctgtgatcacacctgagaagagcactgcactccagcgtgggcaatacagtgagaccctatatttaaaccaaacaaccaaaaaaacttctaggctaaacatatctgcatctgtcacagtaacaccaacacagaagataaacacagaccactgtggtagcgtggttcatctcattacatgctgctacatgattaaaagtgatgggcatggttttctgttttgcatagacttagagcctgtacattctttctatgaagatttttcccgtgggatttccccccatttacccaataattcattcataataaacagttgttgaacctagataaaatacacctctgtctcttcccatttgcctataagtttcttgccaagatgtgatacagcagctcaaagaatgcttgccaagtcactaatagtctttgctctctctagttcagtgactttccgatactgtgtaacattcagggcactatgtgaacttgtaagtgtgaccatactgcatgttttatggtgacctggtccagtactgcctttgttaaagcatctgtcatcagtaagagatgataagttttttgcacaacagtgaaaaccccacctttaagcatatgattacgcttaataaatattttattaaaaggagaattaaagacctaaaagggaagaagttagactgttctagttctggtactgttgaggcactgatgaggataaatgatcatgcagaggtctcttcataattgaccccaatggagtcatcaagcatttgagcgtcaacgatctcccagtgggccgaagcgtggaagaaaccctccgcttggtgaaggcgttccagtatgtagaaacacatggagaagtctgcccagcgaactggacaccggattctcctacggtaggtttttttccccaaaagcagtgaggtccatgttctctcagcctcgagagctattgacctgaaatatccacaaaagggagcccactcttgaagcaagcgtgcagatgatatgcaaatgggtgaagctgctgtggggtagagggggtggggtggggagccaggaaccaattatcagagacaggcaggcctttttttttttttttgagacggagtcttgctctcgcccaggctggagtgcagtggcgctctctcagctcactgcaagctccgcctcctgggttcacgccattgtcctgcctcagcctcctgagtagctgggactacagggcgcccaccaccacggctaattttttgaattttagtagagacggggtttcaccgtgttagccaggatggtctggatctcctgacctcgtgatccacccgccttggcctcccaaagtgctgggattaccggcgtgagccaccgtgcccggcctagagacaggcaggccttaatgaaactttcatctttatgttttaaaggaaatctttaaaagtttaaagaactttaggttaaaaattgggagattgccactcacttttgggactattattatggtaaagtcacagttacctaattaagcttttgtattttcagatcaagccaagtccagctgcttccaaagagtactttcagaaggtaaatcagtagatcacccatgtgtatctgcaccttctcaactgagagaagaaccacagttgaaacctgcttttatcattttcaagatggttatttgtagaaggcaaggaaccaattatgcttgtattcataagtattactctaaatgttttgtttttgtaattctggctaagaccttttaaacatggttagttgctagtacaaggaatcctttattggtaacatcttggtggctggctagctagtttctacagaacataatttgcctctatagaaggctattcttagatcatgtctcaatggaaacactcttctttcttagccttacttgaatcttgcctataataaagtagagcaacacacattgaaagcttctgatcaacggtcctgaaattttcatcttgaatgtctttgtattaaactgaattttcttttaagctaacaaagatcataattttcaatgattagccgtgtaactcctgcaatgaatgtttatgtgattgaagcaaatgtgaatcgtattattttaaaaagtggcagagtgacttaactgatcatgcatgatccctcatccctgaaattgagtttatgtagtcattttacttattttattcattagctaactttgtctatgtatatttctagatattgattagtgtaatcgattataaaggatatttatcaaatccagggattgcattttgaaattataattattttctttgctgaagtattcattgtaaaacatacaaaataaacatattttaaaacatttgcattttaccaccattaactgttggatcagcttattttgggctctcctttccttctcagattatcaacaaacatttattgagcatttacctcaggggccacaaagagaataagatgctggttccgcactcaaggaactcggtttaggggcaagacagatagggaaacattttctcgttgtttcagtaaatccttgagtgcctaccccgcaccaggtgctgttttccaggcacaagagcgaacaacggacaaacccctgcttttaagctcttacattctagaggggaaacacctcatacatgtagtaaaagtagagtgtttggaaggaaaataatgtggagtgaaactgctgaagcggagttgtaggtgttctagatggggttgtcaaggaaggccttaagggagagcctctctggatcaattttctcattgtaaaatgaggacaataattgtacttatctcagggttttgatgagcatcgagggagagaaaacgcgtagaaagtgagagtattacggggataagagacttctaggcagagggcagggaaaacacaaaggccgtgaggcaagagtgggctcagagcggatgcagatttactaggaggccggtgactatggctgtggtgggggtcccagagtgccttttggccaggccaaggactttaggttctgttctggggtggggaatgtcaggaaggatttgaaaagaagagtgacatcaacttgttctaagagaatcactctggctcctttgttaagacgacatagcagtccaaagtggggaagcaggccagcgggctggctttgtgacatcctggagggtagagacaacagaatagaacagcacgctacatactgcactggtgcttagatggatttctgcggcataagggtagaagtggagggggcaccttactcaactcggagggtcagggaaggcttcctggaagaggagataaacccctggaggttaagaaaagtgagctaggcaaactgagcaaatacagaagcagagtcatacaggcctgaaggacgccatgagccaatttcctgttcctggaggcgcagggcaagggaaggaattggcccgctggaggttaatggccaatactgagcacttctgagggctcagtgctgtgttagggatgttttatctcctttgatcagaaacaaaaccctgagataggtacaattgttatcctcattttgcggatgggaaaatagacttcgagatactgacttggcgagggtcacacaactagatgatgtgctgggtcccccagtcctggactccggaggccccctgaacgacctaggcacacttgtggcttccgtgaatttaagtgcacacagcccccgcctggccctgtgctggggaagggcaggtgggaggaggaagggaaggcaggtttttctttacaaatggtacctatttggtagtcaacaaaaggaactggatttgccccaacactggaagaaaaaaaaaaacaacctgttgggctgagggatagtgcactgtgcccagggccctatacttggtttgatgctctggtgttactctcttgaaattctcagtaacatgaataaggggcaccgcatttgacattttccctgggctgagaccatgatgcagccggcctgactgcgcaacaccatgcacactggaattcgtgggccatcggagggattttcgagggtaatgaccaggggtagggcgcggcagaagcgcagggtgaggttgcggacggcctcactcacaacctttccgggtcttcgcattaggtactgtgatgacgggttccgatagtgaccccttggggcctggagacggcccggctccccaaaggtgcggagcagggcaagcagggttgggaggacgtggcccgtgggagagctgcgctcgccggaacagtgggcgcgcaagggccccgaggcgctgtgacacgggacgtcgggcgcgcgggcctggggcgggaactgcgggtgcgcgcggcccggggcggggctcgccgcccggctcctcctccacgcgcggcctggcggcggcggccactctaaccagcgcaaaatgtccctggaacaggaggaggaaacgcaacctgggcggctcctaggacgcagagacgccgtccccgccttcattgagcccaacgtgcgcttctggatcaccgagcgccaagtacggcccgggcccggcgcgactaggggcagggagggggcgggccggsccgcgtggagtcgggctgacccgggtgaccttggccaggccacgtgggcgccccctgtctccgtttcctcctmtcggagttgtgccgggaacgcgcaccaccggccttcaccccttagggcgcggsaggggacgcaggggaaatcgaagctgccagatgcccacgaccacaacgtcaccctccagattgccctctcggaggggcccagtccgcgcaggtggctgctccctactgcctgagctgtggctgagcagcagattggggagaaacaggctctcgcaccttggtaagctcagccactttcggtgagacccccgaggctttgggaagccacccttgggcaggacataagcaggacttatctccctgcagcgtctagggcagcaccgtccaatagaaatatgatgtgagccttacaggtaattaaacattttctagtagccacattaaacaagataaaaacaaacagctgaaatttttaacaatacagtacatttagcctagcaggtgcaaaatattaacatttcaacatgtaatcagtaaaaaacattgctgagatattttactcgcttttttggtacagagtgttccaaatccggcgtctgttaccttcrcagcacatctgggttcagccgcatgtggcgaattggagagcagggctttagggggttctctttgaggcctctcctaaagtggggtccagccctgttttttttttaggtggggaaattgagaagggrcggtgagctcaggttgctccagcagagccaaggcttaaagccagaaccactacaaagtttagagtttgctggagcaaacctctttttccccagtgtgaccccagctgcaccattgagcccttaatggggcgtccatcctttgtcactggagtgaagccttatagcaagcagagagtgaggccacagactcttgagatattctaggccattgcttcgaggtcgtatgtgagatatgaacgtaagaccatttgaacccccaaagtctgggattttaaccctcaagggcaatttgatactgagaggttaagggcacagacttctgaatcatttcctggctgtgttgccttgagtacattcaggagtccctctaagcctcagcttcctcacctggagaacctggagaggttgggaggatcccaggagatgatgccagtaaaaggcagatcacagaccctggcaggttctcagaaaaaaaaaaaaaaagccaactgttagtatttatatctttatttttctgctgccattaacctctctgttgcttttctccctcctaagtcctttattcgacgatttcttcaatggacagaattattagatcctacaaatgtgttcatttcagttgtaagtattgttttcagagctaatgaatttcacattttattttgaaacttgaagtctgtgtgtcccttttttttttttttttttttttttgagacggagtttcgttcttcttgcccaggatggagtgcagtggcaccatctcggctcacaagaacctctacctcccaggttcaagcgattctcctgcctcagccttccgagtagctgggattgcaggcatgcgccaccatgcccggctaattttgtatttttagtagagacgggggtttctccatgttggtcaggctggtcttgaactcccgamctcaggccctgcccacgtgtcccttttaaaagcagttgaaataacagaatctacatatattattgtgtttattccttctaaatgagcttgtcagattggaaggggtaaggaaaagcgtacatctgaccgtgtgccgtggctcatgcctttaatcccagcactttgggaggccgaggtgggtggatcacctgaggtcaggaattcgagaccagcctgaccaacatggtgaaaccgacgtctctactaaaaatacaaacattagctgggtgtggtggcagacacctgtaatcccagctattcggaaggcttgaggtgggcgaatcactttctgaacccaggaggtggaggttgcagtgagccgagatcttgccactgcactccagcctgcgtgacgagcgaaactccatccccttcccccagcaaaaaaagaaaagaaaagcgtacatctgtttaacaggtaatatcaggcccaggccaggtgctggggattcagagagaatcaaacaaatcttccacgtgatggaggacagactggctaaactggtcacatcctgggtgacaagagtgaaactccatctttaaaaaaaaaaaaagaagaaagaaaatgtaataaaattagaagcaaatataaccagatgtttacagttgttaattctgggtgaggggattatagtgtgtagccattctttgtaatttttgtatttattttttctcaaattaagaaatggaggctggctgtggtggctcatgtctataatcccagcactttgagaatctgagatgggaggatctctcgagaataagaatttgagaccagcctgggcaatgtagcgagaccctatctgtacaaataaaaatagaaagttagccaggtgtagtgggttgtgcctgtagtcgcaactatttgggaggctgaggcaagaggatcacttaagcccagaagtttaaggctgcagtgagctatgatcacaccactgcactccagcctgggcaacagagtgagaccctgtctcttaaaaaacaataagaaaagaaagaaagaaaaagagaggaaataagactgaactgataagacatggaagtgggtgagggagaaggacttctaggtttctgacatgtatagccaggggatggtggtaaccattcagtgcgacagttgacatcagagagtgggggaggtgacagcaccattgggggcagctgctggagcatctaggaagaggaaggcataaatctgaatggcactcagggctatcctaatggatagagagcctagggcaccatgtggcttgaaatcaggcatgcagtcgaagtccagtgcatgctggtgagtgagctggtgattcctacctctggggataaacctgaacaatgttgagatcattacttgattacttgatatctgattttaggaaagtatagaaaactcgaggcaactattgtgcacaaatgaagatgtttccagccctgcctcggcggaccaaagggtatgtttcacgtgctcaggtctggctggttgccctcagatggttctgcctgcatggtctgaagtcaggtggaatttggccattaatctctgtctccgtctcttttctttcttttttccttcccttgggagccactgttctattggctattaatgctgtcattgttatatactgcccagaggaccagctttgcaaaactgggttagttttttaaatgtagttagaattmtgtcccataaaccagacagcaagtttcctcctacacagtggatatttgtggggattccctgcagctgattcctggagcccagtggcaaaccccagaattcagacagggctctgacgtcagaattcattctccactgcaggcagcgttcctgccgataggctcaaacggactgttccttatctaccttgcagtatgtggggctttctggagctcacaaacaccagctcctcaagacagcctatggagagctcacatatttaactttttctaagaatgtgctggggaccctgggctgacagcttggctctgttgcaagtaacttgactgatggcatggtgtgtcatcagcacacagcctgctctgctctgagccagaggcaagccggattcggggactcatctgagggataagttaggtgttggtattctccaagggtagagacaggactttttaatgttctggtccatttctctgtgtggctcgtctctttgcttgtcattagttcatttgtttattcatatgatccatttattttgatttgttctgtcaatgtggtaaataacagctctggccttcactctctgaaaggtagaacaaatgtggtcccagaaatgagacaggcaaagaaattctttgctgttgagccacctttaaaagctttttttttttttttgtttttttttgttgttgttgttgtttttttaaggctgggtgtgatggcttaaccctgtaattccaatggtttgggaggatgacttgatgccaagactgcaagaccagcctgggccgtatagcaagaccccatctctactaaaaattaaacamctagttgggaatggtggcgtgagcctgtagtttcagctattcaggagggtgaggtgggaggatcgtttgaacccagtagttcgaggctgttctgcagtgagtgatgattgtgccactataccccagccctgggtgacagagcaagaccttgtctcttaaaaaaaatttaaaatgaaacaaagctattcttttttctcctttaagatacargaagcttggaagcggagtcttgtaagtttcagccccttcctaatttttagtgtcctataataacaaaaccagacatccagctaaccttgcatctctccttttgaaggcaacagtgcatcccgacagcagcaacctgatccccaagctttttcgacctgcaggtgagttggttctaattttcagaagtgggttgggaagatgtagtttctaacacttagaaaactctgcctgccggatcacctggggtcaggagttcgagaccagcctggccaacatggtgaaaccccgtctctactaaaaatgtaaaaaattagttgggcattgtggtggcacgtgcctgtagtcccagttactcaggaggctgaggcaggagaattgcttgaacttgaacccgggagccggaggttgcagtgagctgagatcatgccattgcgctccagcctgggcaacaagagtgaaactcygtgtccaaaaaaaaaaaaaaaaagaaaagaaaactctgcctgccttgctttaattatttctcccccagcaggatttctttctttttttttttttttgaaacagtgtcttgctctgtcacctaggctggagttcagtggcacaatctcggctcactacaacctccgcctcccaggttcaagtgatttctcctgcctcagcctcctgagtagctgggattacaggtgcctgccaccatgcccagctaatttttttcctttgtgtatttttagtagagacagggtttcactatgttggccaggctggtctcgaactcctgaccttctgatccgcccacttggcctcccaaagtgctggaattacaggcgtgagccactgtgcctggccatgttatagtaattttatgtacatactttattattattgtcatttttagagacagggtctcgctctgttacccaggctggagtacagtagcaccataatagctcaaagcagcctccaactcccaggctcagctgatccttctacctcagcctcctgagtagctgggactacagggtcatgccgccacacctggctttaaattttttatggaggtgggggtctcgctacctctacaaaatagaggctggtctcgaactcctggcctcaacccatcctccagcctcagcctaccaaagtgctgagaccttgaccccccactttattagaaaaacaaagaatgagtggaaaaagtcctttgaggtctgtgccttctggaagctggggaagaggtgttcaggtgggtagtccccttctggccccctctgcctgggcaactgtgatcactgacacctcctctcttctcttcctgccagcgttcctgcctttcatggcrcccacggtgagcaagcagacatttgccgttaggagactaggggcttgggaagatggccactctcctyctaacctcagctgtgtccctccagctccggacccctgtcacatgactgcctgatagatggttgtggatccccactgataacccatggctgctgttcatacgtmcttgtccccactccctccccctccccacaccctcccagtcaggcatccgggcctctggaaggcccacagcttggcaaggtcatcccttttctgaacaccaagtatgcgcagagcacggtagaagcrgccagtgagttaggatgagctccctgcacaaacccctggccaccaagtcctcctctgacacagcccctcacctgggacctggcattgtccctgtgaggcttttctcaccttggcccttgggaggtgctttttggttttttgggttttttttgtttttcgagacagagtctggctctgttgcccaggctggagtgcactggcgcaatctcagctcgctgcaacctctgcctccctcgttcaagcaattctcctgtctcagcctcctgagtagctgggattacaggcgctcaccaccatacccagctaatgtttttatttttagtagagatggggttttgccatgttggctaggctggtctcgaattcctgacctcaggtgatccacccaccttggcctccgaaagtgctgggattacaggcgtgagccaccatgcctggaccgttttttgttttttaaaatagggtcttgctctgttgcccaggctggagtgcagtggcacaatcatagctcactgtaacttcaaactcctaggctcagtggatccccttacttcagcctcctgagtaggtgggaatacaagtacttgccaccatggcaggctaatttttttatttttaccagagtctgagtcttgctacattgctcaggctggtgtcgaactcctggcctcaagggatcctcccagtttggcctaccagagtgctgggattataggcgtgagccatcactcccagcctaggaggtacttgtccacaccacaggctcctgtctgctttccctagcaaatgtgtacttctttttttttttttttttttttttttgagacggagtcttgctctgtctcccaggctggagtgcaatggcatgatcttggctcattgcaacctctgccttccagattcaagcgattcttctgcctcagcctcccgagtagctgggattacaggtgtgcaccaccacacccggctaatttctgtttttcgtagagacggggtttcaccatgttggccaggctggtcaactcctggcctcaagtgatcctcccacctcagcctcccaaagtgctgggattataggagtgagccactgcrcccagctaacaaatgtgtacatcttagctaccctgctggactaaggccctggagacacggcctgctgttcgaccctggatgtccttagagctgctagtttggtgtttggcaggtgctcactcaaccttgtctacggaccggcagcccctgtacccaccaccatcctctcctgccccagctccttgggggctcaattctccctctcccctggaaagttctttgctactgcaagttctccttcyacagcaacacttgtaactctgttccactgtcttcttaaaaggtatttttgtcaatgacgccactgaaagggatcaagtccgtgattttacctcaggtagccattcttcctgtttcacgattactaaattctgttatgcttgaaacgaaaatgcgatccatttgcccctctyggcaggttttcctctgtgcctacatggcagcgttcaacagcatcaatggaaacagaagttacgtgagtattatgagacccagagagtgtggggttttgtgttattccttttggagtttgttgtatgtgtttgtttttaaattatctttgctggataaaactgtgatatttgctaawtaagtacttttgtttctccttagacttgtaagccactagaaagatcattactaatggcgggagccgttgcttcttcaactttcttaggagtaggtatttttagaatctgtcaaatcttctttattcctcagaatccaggaagttttatttattccaattacaaatttatgttccaatttaaacaatttagaaaatatgactaggaaataaaagtcacctgtaattgtattatcccaaaataatcatgttaatagtttaagtttctaagcatatacatggtactgttgtctttttatttttttctattttcttttttttttttttttgagacacagtcttgctctgttgcccaggttggagtgcagtagcatgatctcagctcactgcaacctctgcctcctgggttcaagtgattctcctgcctcagccttccgagtagccgggactacaggcacgtgccaccacacccagctaattttttgtattttttagtagagaagggatttcaccatgttggccaggttgatctcaaactcctgacctcaggtgaactgcccgccttgacctcccaaagtgctgggattacagccatgagccaccacgcctggctggtactgttatctttttaaaaattgttatatgaattgtgtgttataaatatgttatataatttgtgtattgctttggatgtcaagacactgtaatggtgaaagatggggagatgttggcrtcagacaagcctgggccctcatcctggctcaaacctttaatggctctgtgactctcaacagcttccataccyctctctaagcccctgttgactccttagatgaacagggagaggacctccacgttgcaggaatttgaaaaatacctgaagagcactggcagtggtctgacttgtaataggaactaggtcagggcgacctctctgctagtgagtaggttccgctgatttttcagtcccatgaaataatgatttttctctcttcttttctaggtaatccctcagtttgtccagatgaagtatggcctgactggcccttggattaaaagactcttacctgtgatcttcctcggtgagcaggaagggctggaggctgcagtctgggtggggtgtctttgtggtctgtgagccttccttcatctccagaggcacctggctcccttggcacattgtgactgatgacaggtggcctttgcagcccggcaggcccccaagcccaaatcaggtctttggtttgagaggtgacactttctgtagatacccacattaatggctaaagaatgaacacaagactggaaacacaaattacattttttttcttgagacggagtcttgctctgtcacccaggctggagtgcagtggcatgagctcggctcactgcaaccctccgcctgctggatttaggcagttctcctgcctcagtctcccaagtagctgggattacaggtgtgcgccaccatgtccagctaattgtttttttgtatttttagtagagacaggctttcaccatgttggccaagctggtcttgaacttctggcctcaagtgattcgcctgcctcagctttccaaaatgctgggattacaggcatgagccaccgcgcctggccctacattttaaagattatctgtgtaaacgttctacttacattattttacttaatcccgacaacaacttatgggtaggaaatattattcctatttacagaggaggagactgaggcacagggaggttaagtaacttgcctagagttacacagcaagcaaatggttagtatagagattccaacccagtggggtgacagagatattagctgaatattttgactctgccagcctgcaagtttactatgtcacgctccaaatttgggtttgggaatcatagcagtttgaagagttggcagactgatgtcagtggtgaaattgaggaaatggtgttatagaaaccttacaactttggccgggcatggcggctcacacctggaatcccagcactttgggaggccattgcgggtggatcacttgagatcaggagtttgagaccagcctgaccaacatgatgaaaccccgtctctactaaaaatacaaaaattagccgggcgtggtggggcatgcctgtaatgccagctactctggaggctgaggcaggagaattgcttgaacccgggaggcggaggttgcagtgagctgagatcacaccattgcactccagcctgggcaacaagagtgaaactctgtctgaaaaaaaaaacttaagcaaagacgagggaggaatatgtttccaagatcccagggtttctcctagaatccggtaaggaagcaggggtgctggaagctggtcccaggctgtggtcaggatccaagactgagtggccagcagttcttagcctacttccacagccccaggagagcacttggttggcccagcctatggcaggtgtccacctgagggtcaagaaaggccagctgtcagagaaagaggcttgcagggggcagacacccaaagagatgttcctttgctggaacaagactcacccccgtcttgggtgttctttacttctttacatctayagtgcaagccagtggaatgaatgtctacatgtcccgaagtcttgaatccattaaggggattgcrgtcatggacaaggaaggcaatgtcctgggtcattccagaattgctgggacaaaggtaagagacaggatgaagctatagctgcttgccttttgggcaacgactagacttttctgtttgaaagccggtgacaaattcatgtctgccttcaacctttctttacccgtctttccttagcatgctgagagagaaatttctcattttgccccctgataagatggggcattagtctgggttctctggagaaacagaaccaatgggatatatgtacataatctttctttctgagacagggtcttgctctgtcgcactggcctggagtgcaatggtgcagtcttggctcactgcaacctctgcctccctaacacaagcggtcctcccacctcagcctctcaagtagctgggaccacaggcacacaccactgcacctggcttatttttgtatttttaatagagacggggtttcaccatgttggccaggctggtctcgaactcctggcctcaagtgatccacccacctcggtctcccaaagtgctaggattacaggcatgagccaccatgcctggcccccaattcctttttgaaatctctcaaaagaaaagcatgcacctctgtctccattgtccctcccattcactcctgagttcaagtgatcctcccaccgtggcctcccaaagtgctgggattacaggtgtgcaccaccgcacctgggcagtacatgtctattaggagatttgttctaaggaattggcttacacaattgtgggaatctgcagggcaggcctggaggctggaaacttggacaggagctgctgctacagccttgagacagaatttcttctttgggaaacctcagtttttgcctataaggcctctaactgattggatgaggcccacccacattgtggagggtaaccttcttttctttttttttttttttgagacggagtcttgccctgtcacccaggctggagtgcaatggcgtgatctcagctcactgcaacctccgcttcctgggttcaagcgattctcctccctcagcctcctgagtagctgggattacaggtgcgtaccaccacgcccagccaatttttgtatttttagtagaggtggggtttcaccgtattggccaggctggtctcaaactcctgacctcaggtgttccgcccgcctcggcctcccaacgtacggggattacaggtgtgagccaccgcgcctggtggtaacctgcttttcttaaagtgagctgattgcagacgtgccctgtgtctgcagagtacccctacagcaacagctagatgagtgctggattaaataactgggtactgttgccatggtgacccgtgaggctgactgccacagacaggcatctgacaagtgctgggtacctctgagagtgagatcctattcttcaaatccaatatctgccctcccagtgtgtgctgattgggggccactcccctcccagcctgctctgcacttacagaggtcagtggacacccctttctggggttaaaagagcccctgcttctcccattcagcagatgtccttatagtcttcattgctaaggactacttttgtcaagaatggacttagaacattgaattctctgatccaaaactccttttcaaggcctcaattctgaataatttttactattagtttcttctttttcttcttctttctttttcttttctttcttttttttttttttgagacagggtctccttctgtcgctggagtgcaatggtgtgatcacggctctacagcctcaacctcccaggctcaggtgattctctcacctcagccttccaagtagctgggattctaaatatgcaccaccatgcctggctcatgcttgtgctttttatagacatggggtttcgccatgttgcccagtcgtgtctcaaactcctgagctcaagtgatctgcccaccttggcctcccaaagtgctgggattgcaggggtgagccactgggcctggccaaagtattcttttgttcagttcaacacagtgactactgagtgcattcagccgtgagaacctggtatagtctatggtcttttcattttgggtgtggacttttaaaataatatgtttttagcaggtgagatcttttttggtccctgtgaaatgactttagctgaagactttagttgtttgcaaatgacatatcaagcagagtggaacagccctgatatgaagtgaagggactaaccgggcttctggcagtgtgggatccagaggactcccttagccagccagggtatgtccttctactgaccagcatgttggtggcagggaagctcagaaaagatggttgttcattccatcggtaaatacgtcattattcagctcaccaaacatattactttaaatcctatcactgactgacaaagctgaattataaactatcagatacatgctaatggtatttccactagaccatctagtagcatagctccttacctaaatgaattatgacagagataaaataattataagtaacagagaaattgctgccagtaagaaaataggtcactagtttgaaatgaaggttctgggcctaacaaaccacccgtaagttggatcacttgcagtcggtcaggagttcgagaccagcctggccaacatggtgaaaccctgtgtctactaaaaaggcaaaaattagctgggcatggtggcgggtgcctgtaatcccagctactcgggaggctgaggcaggagaattgcctgaacctgagaggtggaggttgcagtgagccgaagtcgtgccattgcactccagcctgggcgacagaacaagaccccatctcaaaaataacaaacaaacaaaaaccacctgggactgcatttgcgctttcccctggggaaaaaaaaaaaacgcccgaaagagacattttttcaaacagctttattgaggtataatttacatactgtaaaatttacccatttgtaagaggatagtttgatgaattttagtcagtttaaaacagttgtgcagccaggcatggtggctcactcatgcctgtaatcccaacactttgggaggtagatcgcttgagtccatgagtgcgagaccagcctgggcagcatagcaaaaccctatctctacaaaaaaatttttaaaaaattagctaggcatggcggggtgcatctgtagtcccagctgcttaggaggctgaggtgagaggatcaactgagcctaggaggttgaggctgcagcgagctattatcacaccactgtactccagcctaggtgacagaaagagacccttgtctcaaaaaataaaacataggccaggcgcggtggctcacgcctgtaatcccagcactctgaggggtctgaggcaggtagatcacctgaggtcaggagtttgagaccagcctggccaacatggtgaaaccctgtctctactaaaaataccaaaattagccgggcatggtggctcatgcctgtagtcccagctactcaggaggttgaggcaggagaatcacttgaacccaggaggcagaggttgcagtgagctgagattgcgccactgcactccagcctgggtgacagagaaagactctgtctcaaaaaataataataataaataaatgaaacagttgtgtgaccatcaccacagtccagttgtagaacattttcatcatcctaaaaatgtcccaaatgcccacccccacccccacccccagccctagggaggcactgatctgcttctttttttttgtttgtttgttttgagtcagagtctcactctgtcgcccaggctggagtgcaatggtgcgatcttggctcactgcaacctctgcctcccaggttcaagcgattctcctgcctcagcctcccaagtagctgggactataggtatgcgccactgcgcccaactaattttttgtatttttagtagagacggggtttcaccatgttagccaggatggtctcgatctcctgacctcatgacccacccgcctcggcctcccaaagtgctgggattacaggcgtgagcccccatgcctggccactgacttgcttttctgtcttcttagtttttgccttttccagaaattatacataagtgaatcacactgtagttttttgtgtcttgcttctttcacgtttgagattcatccgtcttgtaccacatgttgctcatttgttacttttcattgctgagtagtattccgttcctggatgtgccgcattttgcttatctattctgcaggcggtggacgtttgggttgtgtccaggcttgggttattatgaatcaggctgctccgacattcacttgcacatctttatgcatatgtgtgtttgtatttctccacaactccatgtgaacttaaggtgttagtattgctctgacctattcataaagctggagaggagagtgagagcacatttttttaagttcgtttatttatttattcatttatttatagagacagagtctccctctgttgccaaagctggagggcaatggtacgaacatggctcactgcagcctcaacttcctgggctcaagcgaccctcctgcctcagccttctgagtagtgtgcaccgccatacatggctaatgttaaaaaaaaaaagtttgtagagatggggtctcgctatgttgcccaggctggtctcaaactcctggcatcaagtgatcctcctgccttggcctcccagagcgctgggaggtgtgaggcactgcacccagcttagagcaaatatccaatgagcaagttgttcccagcacctcctgcctgccaggcttggtgctaggctctggagacccacaccctgatcagtgagagccccgtctccccagcagccccagcctccagcggaaaggtagcctcaggcctgactggctgtctggagtccatctcaccagaagaaacttcatttttggcatgaggggcatgttagggtcaaagaaaagctttactggtctactttaaaaaaaaaaaggtcttttttttctctgaagaataaagtgtctgcaactgtgcataagcattcttctatcacttccctgtccctggaaggttattttcttcggctaaaatttcagaaactgcgtaaccagcaatatctgatggtaacagggcacggttggtccaatttcaggtgacgcgtggctgttgtttcccccgactggccccataagccactgctttgcacacagcgcctcctaatgacggcgtctcacttggagtgtcctccccacacatgggactaagggagagaggcgggcctcgccccactgatgtggacacacagcacactaacagccatttttcccttccggaagtcaagcaattttactttatatccctgagacttttattttattttcttttattttagagactgagtctcgctctgttgcctaggctggagtgcaatggtgtgatcttggctcactgcaacctctgcctcccaggttcaagtgattctcctgcctcagtctcccgagtagctgggattacaggcgcccaccaccacgcccggctaatttttgtatttttagtagagacagggtttcactatgttggccaggctggtcttgaactcctgacctcaggtgatctgcccaccttggcctcccaaagtgttgggattataagcatgagccaccgtgcccggcccttaagaccttattttaaaaacagccctcctcggcttcctctcttttgtgggggggaaaggcattccctgcagagggaaccatgcaagcgtgactgtcacccacagcagggcagaggtgcgagcagagagcaggggccgggtggtaggaggagcctgggaaggtaggtcaaagccaatcatgggaagctggaagtggaaggaacagagttcagggaaggacgggcgcaggtgtgcctgctcctcttgggtacacgatgtgctgtttgtggtgtgtgtgtcttacccaggggtgggttctaaagttaacatgttagctactcaggaggctggggtaggaggattgcgtgaggccaggaagtcgggaccagcttgggcaacatagtgagatcacatctctacaaaaaatcgaaaagttagccgggcctggtagggtgtacctgtgatcctggctactcgggaggctaaggtaggaggatcacttgagcctgggaggtcaacactgcagtgagccgtgatcacgctactgtactccagcctggatgacagagtgagaccctgtctctaaaaataaataaataaatgaaagtagtaaaaaagttaacgtgagctgtcttatagtcaaaatttcccttacaagtcccttaaagtgcccttgagggtacatggttttgtacatactcacccatacagtaaattgtatgtttaaatgtttaatgtatagagtaatgtacattatagaaaagattacaaaaatgttataacctgtacataacacaattttatagtataacacttttaattcgctgtgaaacgtgggtacggacaggcagccttgtgtgggtctcatgctgtgcccgtgccctcagagctgggcatttggaggcttccccaatggcaggtatgagagtcactgctgagccaggtcaggacaggaggccagtggcagagacttggcttggatgggaaatacggagcaaacctctgtggcaaatccagcatttccactgaggaaccatttggttctcagtgaagatctgtctagaagccacctttgcttgtacttagtggatagtttatttggggtggtttggcagacggtgccagctatttctggcacaaagtgcagccgaccgccacacacctgtacatggaaagttacgtggaaggcgtcccctccgcctctctccacgggcattctttttctaagtgagaagggtgggttactgttgcctgtctctcgcaggagttgtgggatccctggaaatcgtcttgctcctgtactaagtttcttttttgagacagagtttcactccgtcgcccaatctggagtgcagtggcgtgatcttggctcactgcaaaatccrcctctcaggttcaagtgattctcatttctcagtctcctaagtagctggtactacaggtgcataacaccacaccgggctaatttttgtattttttggtagagacagggtttcaccatgttggccaggctggtctcaaactactgacctcaagcgatctacccgcctcggcctcccaragtgcagggattacaggcgtgagccaccgtgcccaacctaagctgttttcttttcatttttgctaggctgttagagaaacgctagcatccagaatagtgctgtttgggacctcagctctgattcctgaagtcttcacctacttttttaaaaggtaagagacacggtcatatccccaggtagggatttgaaagtcaaatccttataaaacctgtcagatactgaccctggtggagggtggggagaagttggctcagtaaccttcccataaacacacatcacagctaagacaggcggattgattgtggcaggcgtggaaatccgggtgtacggattccaccgaatggggaatccagcccaggctctgcctccagttaccccgtgtccttggcgtgtccaaggaccttccacggccatttcctcacctctagaatgaggggcttggatgatttgcaggttcccctggctctcatgtgctgtgaatattgctcaagccctcctctctaaacccccattccaagtatgttttaaatgagcttcagcgactccgaattcagatccatcccttttaagaagccagaaatggcctacgaggcggaggacctgggcatccatcagggttcctgtggccaccagtatgagaaacctaacctgcaggagctcagacccgaggggagacgttggggctttagggccggaacgggcaaggattgcagtccatggcagcttgaacagaagctcccctgctgggcgcgcctccctgtcattctcgtgggtgtcgagtccttctctcctgccagattggcttcttcatattgatgcgggacccacttgctagtaactcccagctcatagcctcacagcctcctgatcagaggtggaacacagcaaaccccaggggaggcaggaatgtcttcccctcagggcagactcctggggaaggattctgtgggcctgagttaggtcgcatgcctggggtgcacatcccccccaccagtgtggcgaggctgggaatcgcctgctaggaccacacatggagcacatttccaagaaggagggatgggatggtgcggtggctcacgcctgtaatcccagcactttgggaggccaaggtgggcagatcacctgaggtcaggagttctagaccatcctggccaacatggtgaaccccgtctctactgaaaatacaaaaattagcaaggcgtggtggcgggcgcctataatcccagctactcgggaggctgaggcaggagaattgcttgaacccaggaggcggagattgcagtgaaccaagatggcaccattacactccagcctgggcgacagaggaagattctctcaaaagaaaaaaacacaaaacaaacaaacaaaaacaacaaaaaaacaggccttgatctagctgttcaggtacaacaaaaagaaaaaagaacaggccctgatccaggtgttcaggtacacacacacacgtgcacacacacacacacacacacacacacacacacgccctgattcagctgttcagaaaataagccctgatagtttaacatcacttgtgagccatgccttgtctcttacaggacccagtatttcaggaaaaacccagggtcattgtggattttgaaactgtcttgtactgtcctggcaatgggactgatggtgccattttcttttagtatatttccacagattggacaggtaagtgcccccattcctcttttctctcaaagttttttattttgcagttagaagaataaaataagttattcttcttaaaactctgcaaagtttataaaaatataaaataagaccaggtgcagtggctcacacctgtaatcccagcactttgggaggccaaggtgggaagattgcttgagcccaggagttcaagacctgcctaggcaacatagtgagaccccatctctacaaaaaataatacacaaattagctgggtgtgatgatgcacacctgttgtcccagctgcgcaggagactgaggtgggaggatcacctgggcccaggagattgaggctgcagtgagccatgattgcaccactgcactccagcctggctgagagtgagaccctatttcaaaaaaataaaataataaaacaaaatacaattggcttttgaacaacctgggggttagtagtcaaaaatccaagtataacctttgactccctgaaaacttaaccattaatagcttactgttgaccggaaggcttaccaataccataaaaagtcaagtaacacatattttatattttatatgtgttgtatactgtattcctacaataaactagagaaaatagaacgttattaagaaaatcaggccaggcgcggtggctcatgcctgtaatctcagcactttgggacgctgaggcgggcagataacttgagatcaggaattcaagagcagcttggccaacgtggcaaaactccagctctactaaaaatacaaaaattagccacggtagctgtaatctcagctactcgggaggctgaggcaggagaatcgcttgaacctggggaggtagaggttgcaatgagccaagatcatgacattgtactccagcctgggtgacagagtgagactctgtctcaaaaaaaaaaaaaaaaaaaatcataagaaaaaatatatttactgtttattaagtgaaggtgagtcatcagtttcagtgaggatcaaagtcttcatcctcgtcatcttcatattgagtaggctgcggaggaggaagagggattggtcttgctgtctcaggggtgactgagggggaaacagtatataagtggacctgcattgttcaaacctgcattattcaagggttaattgtaatgatatttatatttaattctatccctcaaatctcttggtgcagttttgggttctgtttttcttaacaatatttcataagcctttttttctggggcataaaaagaaatcttttaaaattacttagagaaattttaaatactccaaaatgttctataactacgccctctccagtggaactttctgcagtgatggaaatgttctataatagattggtgctgtccaattatggtagccatgagctacgtgtgctactgagcacttcaggagaggctggtgtgactagggaactgaattgtaaattaagttaaattttaaattaggtactcttgtgtgcttagtggctattggacagcccagttctatagataatttataatataatttatgatgagtcaggctgcttggactcagattccagcttctccatgaccttggtcaacttgcttagttttcttatctgttaaagagagctgaagataatggcatctctgcaaagggttgttgcttagtaggtagcaaggacatttttttttttttaagtcagaaagccaatttttttaatttccaaagctctgccataaattgctagcagatgtcaaagacattactgatgctagcagatattagcaattttttttttttgagacggagtctcgttctgtcacccaggctggagtgcagtggcgcaatctcggctcactgcaagctccacctctcgggttcatgccattctcctgcctcagcctcctgagtagctgggactacaggcgcccgccaccacacccagctaattttttgtattttttagtagaaatggggtttcaccatgttagccaggatggtctcgatctcctgacctcgtgatccgcccgcctcggcctcccaaagtgctggtattacaggcgtgagccaccacgcccggctgatactagcagtttcttggctaaacatttcaaatgttcatttctgtcactataaatatatatgtcctcaaaagcatttatatttatggaatgatcttgttcagaacccacgttttataggtttaggttgtaggatcattcattcaagcaactttgccagcacaacgtagaagtttcagattattttagatagttatgcctattactatgctatgggcgaggggttggggagcgaggcagcatctcagaataaaatttcaggccaggcacggtggctcatgtctgtaattccaacactttgggagaccaacgtgggaagattgcttgaggccaggagttccagaccagcctggggaatgtagtgagacctcgtctctacataaaatgttctaaaaattaggtcgggtgctgtggctcatgcctgtaatcccagcactctgggaagcccaagtgggaggatcacttgagccccggcgttcaagaccagccaggacaacatagcaagacctcgtctctgctaaaaataaaaatttggctgggcacagtgggtcatgcctgtaatcccagcactttgggaggccgaggtgggaggatcacttgagctcagggttcgagaccagtctgaacctcatctctcttctgaaaaaaattgtttaaaaagaaaaaataataattagccaggcatggtggtatgtgcctgtagtcctagctactcaggcagctgaggtaggaagatcacctgagcatgggaggtcaaggctacaatggggtcacagagtgagaccctgtctcgaaaaaaaaaaaattagtagggtgaagcggcacacacctgcagtcccagctactcagaaggctgtggtgagaggatcacttgagcccaggagggagagggaagagttcatccccagtggaggatgggaagggctgaatgggcacgtgaggctgcaaggaacaggcaggatgctgggggccaggtggcagggcctgcacagccaggccaaggagcagggcagcaggtaagtcatgcaaggttggaaggggcagaactcccagaggccagagtggaggcaggaaagggagtcagtctcacgcgtgacctcagatgccaagacttgcttgctggactttggaaatatcctgttggggccgggcgtggtggctcatgcctgtaatcccagcactttgggaggccgaggcgggcggatcacgaggtcaggagattgagaccatcctggctaacacagtgaaaccccgtctctactaaaaatacaaaaaaattagccaggcatggtggcaggcgcctgtaatcccagctactcgagaggctgaggcaggagaatggtgtgaaccctggaggcagagcttgcggtgagccgagatcgcgccactgcactccagtctgggcgacagagcaagactccatatcaaaaaaaaaaaaaaaaaaaaaaattcaaaacattagctggacgtggtggcgggtgcctgtagtcccagctactcgggaggttgaggcaggagaatggcgtgaaccccagaggcggagcttgcagtgagccgaggtcgcgccactgcactccagcctgggtgacagagtgagactccatctcatttaaaaaaaaaaaaaaaaaagacacaaaatatcctgttggctcaaggagggcatggaggtgcttagatgagataaggagttattactaattttgttaggtgtgacaatgacatagtagttttgtaactactgtcattactatatcaagtactatatcaataatgataaggtctttatcatttggaacttgtaggtgacatgacatgagaattgccttaaaatactcaaggaaaaaaatcctactgctgggtgtgggaggtgcttgatgaaatgagatctgcaaattgttaatagtgattcctgagtgagcacatgtgagttcattacattccttctacatttgttttttgtttgtttgtgtgtttgagacagggtttctcactctgttgcccaggctggagggcagtggtatgatcatggcttactgcagccttgactcccaggctcaagtgatcctctgacctcagccccccaagtagctgggactacaggaacgtactaccacacctggctaattttttattttttgtagagatagggtcccactatattgcccaggctgattgcaaactccccacctcaagcaatcctcctgatctcggctcactgtaacctccacctcccaggttcaagtgattctcgtgcctcagccactggagtagctgggattacaggtgtgtgccaccacacccagctaatttttgtattttttgtaccatgttagccgggctagtcttgaactcctggcctcaagtgatctacctgcctcagcctccctaagtgttgggattacaggcatgagccattgtgcccagccatcttaaaactttttaatggaaactttcaattataaacaaatgtagagataagtaaataacaataatgggccaaggatggtggtgcgcgcctgtaatcccaatcccagctactcgggtggctgaggcatgagaatgacttgaacttggagggtggaggttgcagtgacctgagatggtgccactgcactccagcctgcgcaacagagcaagactctgtctcaaaaaaaaaaaaaaaaaaaaagtttaagaagtttctttactgcttgggtgattaaaaaaaaaaataggttacattttctgctatagattagacattattgaaaaagatggactgtgaaatggttgctttcagaaaatgatttttttaacttggcttctaaggcaagaaaaactattaatagaaacattatgaatttaactatttttcagatacagtactgtagtcttgaagagaaaattcagtctccaacagaagaaacagaaatcttttatcacagaggggtgtaggcgtgagttttaggtgaatttatgtggttcctgcttgaaaaccttcccctctccaggttcggtttagagaactttgccacaggtcttctggggaccccaraggtgtctgtgctgacaaggcgacttcarattccatactgagatcgttcccaggctggcgtctctggggtttttaaggctggctggagaagacagsgggagggtgccccgtctgacacccctggggttgctgagggaacggttggagtggggatcggcctgcgaaaggatactgtgaaatcactaattaactaataaacctgtctcaagttgaggattygaagaaagaacacagagtccaccgtgcccaggacacaggtgttaaatggataggccgtctcaagcggaacacgtacccctggggcgctgtttacgccctccaaccccaaaagcaatcttgtttccttactcagtgtcctccattctagacagctacttaaaacctttgccgccctccgcccagtgcctcctttctcctctctggcaaaggaccctgcctcctccgccaggaaacaggtcagcagtggagccccccacacccgcacccacacccatccttcctccgtgtaatgccagcgtcctccaggctctgggcctctctctgcttcctcagggctgtgctctgtagcctctgtctgccaggtccttcccagaagtatgtaaactacttgtcggccaggcgcggtggctcacgcctgtaatcccagcactttgggaggctgaggccagtggatcgcctgaggtcagtggatcgcctgaggtcagtggatcacctgaggtcaggagttcgagaccagcctggccaacatggtaaaaccccgtgtctactaaaaatataaaaatcagccaggcgtggtgttgcgcacctgtagtccaagccactcaggaggctgaggcaggagaatcacttgaaccctggtggcggaggttgcagtgagctgacgtcatgccattgcactccagcctaggcaatagaacgactgtgtctcaaaaagaaataaactgcttgtcacctgcctcattagagacaggatcttgctgtcacccaggttggagtgcactggcacaatcagctcactgcagccttgaactcctgggctcaatgaggacccacctgcctcagcctcctgagtggctgggactacaggcgcctgtcaccacgcctggctgtagccagacactttaaaagagttgtccgccctcactgtctccaccccacctcccgttctgctaagatttctctcatccgtgacccacctgaatgtggcactgccacactgctgggcactcaggctggtcactgagctgcttacttggctgtactttgccatttggatgtcccagacacctcaaactcaacccatccgaacctgagatcagctctccctcccagtctcaggaattgacaccaccacctccccaggtgcaccagacaggatcactggaggcgccctctccccaccttaccagcctatgcagtagacagggcccagtacatggagtctggaacccacatatgcccactgctaccacccagcgcagtccaacagcatcccctgctggcactgmctggcccatctcctgcctactccctccggtccacgttccagcctgctcttctaaaccacacctgctgaacaactgtttttttttcttttgagacggagtctcactctgtcacccaggctggagtgtagagtgcagtggcgcgatcttggctcactgcaacctccacctcctgggttcaagtgattcttgtgcctcagcctcctgagtagctgggactacaggcatgtaccagccaccacgtccagctaatttttgttttgctttttttaagtagagatggggtttcaccatgttggccaggctgtcatctcctgtccccgcgatccacccaccttggcctctttaagtgctgggattacaggcctgagcaccgcaccgggcctgaaaagccttaaatggcttcccagtgcgtcaagatcaagcccaccttcctcaccacagcaagcctttcccatactcgtatcctgccactccctcccctccctgtagaccctccaggtcctcacatgggctgtggtctcttctcagggccttcacacagctgtttcctctggtctgagtagatgtctacttaatgcttcaggcctgactttgacattgatcactccctctgggaggccttccaggattgacagcactgaactgggtccccatctatgtgctccaataccactctgtttcacacatcacgcctagcactagccacactacagcagcctgtttgctgaccctattccccaagcggactgtgcgcagcaccgcgagagcgggagctgctgcccatcagggtagttcaaaatacaacacaggcatggcacagagtaggtacctcaacatttgagtactggactaatgcttccaacacaccctaccccacattaccaaagaatttatctgtggttttgtttccccaaggccagtatgatggttcatttccaaatttggtgaggaaagtttcataacagcctaaaaggacaaaatcagtaaatggctcagtttgaccataggctgacactaaccaaaattaaagttagagaacaagatgggcaacagctgcaggtggaggtttaaccgctaacagatgacagaaatgtgaaggcatcttccaaggacaggagactgaagttacagaggcagctccaggaaggcgagtggaggagggctagggcgggaggaaagggtgtgtgggggacggcttgaacttttttttttttttttttttgaaaccaagtctcgctcttttgtccaggctggagtgcaatggtgcagtctcggctcactgcaacctccgcctccctggttcgagcaattctcctgcctcagcctcccaaatagcaagtagctgggattacgggcatgtgccaccacacccagctaatttttgtacttttagtagagatggggttttaccacgttggccaggctagtctcaaactcctgatctcaggtgatccgcccacctcggcctcccaaagtgctggcattacaggcatgagccaccgcgcccttggccgtcttgaactttcagacaggtcttttaataattccctagcgccctcacagttgaaaaaaggtattttttccccattttctttggaatgagcagtattagagaaagaggggacaattcgtcacccacctaaaagtagttgaatatcaaaatatatcaattttatttctgcatcataaatttataattttaacaactttgatcattagctaatatagtaatacaaaaaaatgagaaaaaagatgttaatattcctcatttccataaagtgcagatttaattttcaattatttgccttagtaaacattgtcttatttcaggtactccctgccctcactcaaaaaaaagggagggtgtttaatttttattgaacaaatatgtaataccaagaaaaagatgaaagacccaataatgttttttgcaaacatgtttccaggtaagatttccaaggacatcagtactgagtgaaaaataatcctttacagtcaatatgaatgaatacactaacaagtacatcatttagatctccatgcttatttggcaattccagttatgaaaaaggtacataaatagtacaaacaattggcttgacatgtggccaaactactttcatcgaagttgctggaagcctttctctggttttggcccctgtaggaagttaatctcatattcnnnnnnnnnnnnnnnnnnnnnnnnnnnnnnnnnnnnnnnnnnnnnnnnnnnnnnnnnnnnnnnnnnnnnnnnnnnnnnnnnnnnnnnnnnnnnnnnnnnnnnnnnnnnnnnnnnnnnnnnnnnnnnnnnnnnnnnnnnnnnnnnnnnnnnnnnnnnnnnnnnnnnnnnnnnnnttcccgcagaaaattagcagtttggctcagaaagtagagttcctcaggaggaattaaagttcttcctagaagaatacaaagcaacgtttcaggcagctttctgaaaataaaccattagcttatgcctacacagcgagacaaactggaacgtgtaataatgaaggctttcacatttgttgtgatgtgctttttttctcttaccccaggacctctagctgttctgtaatgttacataaagtagttatagcacttcgtccagcactgacagcaggcaggaagctaatcagcgaggagaaaatcggaagtgtgttcatgtgtttcattgtttttcaggtcaaatctcaatacttgcaaataaatcattaaaaagatataacagtttctctgttattttcaggacttcatgtagtgagtgggtaatcagagtgaaagagggctttctatcagtcatcagtgatacgttctgtcacacagtcagattttcagcatttgttcggctgctgctagatgataaaggaagttttctgttgctggtggaaatcgtttttgctttagcgcctccaaattaaggactctcttttctccatcagccgaaacttctgaaaatggtgctaggttggtaaagatttctcttgtttttagagcaatatcctttaatagaacaggaaaatatatgcaacatgttagtatccgaaatttgaatatttagtctctagaattcttcctattttttccagactgtttataaactatgaaaaatgagcttggcgtggtggctcatgcctgtaatcccagcactttgggagaccgtggcaggagaatgtcttgagtcaggagttagagaatgcagtgagccatgattgcaccactgcactccagcctgggcaaccctgtctcaaaaacgaacaacaaaaaagataactcctttttttgttgttgttttcgagacagggtctcgctctgttacccaggttgcagtgcagtggttcaatcatggctcactgcagcctcgacctcccaggctcaagtgatctacccacctcagcctcctgagtagctgggactacaggcatgcgccaccacacccagctaatttttaaatactttttgtagagatggggtttcaccatgttgcccaggctggtctcaaactcctgggctcaagcaatctgcccaccttggcttcccaaactgctgggattatagatctgagccactgcatctggcctgataattctttttaaagaaaaaattaggaaaaatgaaacaaaattaacttagaaaaatcatagtgtgtggttttggttttttttttttttttttttttttacaattttagtcattttctgagtgtataattcagtggcattaagtacatttgcagcgttgcacaaccatcaccactatttccagcacgtttcaccatcacaaacagaaactctacccattacacaataaccccatttcccctcgcttagcccctgggaacctctattctgccgtctaactctgtgaatttgtctgctctagatagctcatataagtggaatcatacaacatttaccctttagtgtctggcttatttcattagcatggtttcaaggttcatccatgctatagcatgtatcagaattctattccttttctcccccccaacaaaagccacattcaaaacattccattcctttttaagctgagtaatattctactgtatataaagactacattttgcttgcccattcatctgctgaaggacactgggttgcttctgccacgttttggctactgtgagtaacactgctatggatatttccatacgagtacagtcatgcaccacataatgacgttttggtcaaccagggaccacatttacaatggtagtcccataagatgataatgctatatttttacagtatcgtttcttttctttttctttttttttttttttttttgagacagttttgctcttgttgcccaggctggagtgcaatggcacaatctcggctcgctgcaacccccgcctcccgggttgaagcgattctcctgcctcggcttcccaagtcgctgggattaacaggcgcccaccaccacacccggctaatttttgtatttttagtagagatgggtttcaccatgttggccaggctggtcttgaactcctgacctcaggtgatccgcccgcctcggcctcccaaagtgctgggattacatgcatgagccaccgggcctggccgagtccctgctttcaattattttgggtatatacccagaaacagcattgctaaatcatatggtaacttgatgtttaactttttgagaaatgctgctattgtttttttgaaggaatctcttcccaaaagtcctcttctgcctgggataagtaacccggcacctgccacgcaggctttattccttttgggtggctgaggactcactaaagcactcattaaaatcatgtcttctggccaggcatggtggctcacgcctgtaatctcagcactttgggaggccgaggcaggtggatcatttgaggtcagaagttcaagaccagcctgaccaacatggtgaaaccctgcctctactaaaaatacaaaaaaattagccaggcatggtggtgcatgcctatggtcccagctactcgggaggctgaggcaggagaatcgcttgaacctgggaggcagaggttgcagtgagccaagatcacgccactgcactcccgcctaggcaacagagcgagactctgtctccaaaaaaaaaaaaaaaaatcatgtcttctggccaggcgtggtggctcatgcctgtaatccccagcactctgggaggctgaggtaggcggagcacttgaggtcaggagttcaagatcagcctggtcagcgtggtgaaaccccatctctactaaaaatgcaagattagtcaggtgtggtggcaggcccctgtaatcccagtgcctgctacgtgggaggctgaggcaggagaatcgtttgaacccacgtggtggaggttgcagtgagccaagattgcaccactgcactccaccctgggcgacagtgaaactcaaaaaagggaaaaaaaagtcacgtcttcttccttgtttgctgacatcattaattcattcatgtatttttgaacccttacagcattcccagcactttcacttgccctccccaaggtctcatacgtcatactaagtcatctaggtagcacttttagtctgtgaacaacacagtaatgcaaaactcagattcacatatgttgctgatattgtaagaatatgtctttactctaatgttgggggtaggtgggcagtgaggattcccatggtaggaaagaagcggccccagagtctccagtgttcaggtcctcagggcaagatcagcccactcttcctgctcacagctggccaggccaccagcactgcagagaaatggcccctctcatctttccgctgacatgtcacctccttagagatctggcctacccatcccccaatattctccacctcaaccccttctgtcacagcacctaacatgggctgtaattatcttgtcatttattattttctgtgcatctactccactaaattacagactccatgagggcagggatttgctcaccactgcatccccactgccagtgcaatgcctaacaaacagagctcaagaaacactgagtaaatgaatggataaatgaagaaggcaccaggttgggccgaatgagtaaagcctgcatatcagaggtgcccccgtacccccaggtaggacaggtgcagatgggagacagtccttctgggccctccagccccaggttatgagtcaggcatctagataaggcaacgctggaagtgtatccttcaggagaggagcaaggagctgggaacaggccaaatgcaaggagctgggcgggctgcaggccaccacgtggaaagcacaagaaataaaacccatttgccatcccagtttggcaagggc

SEQ ID NO: 98050 - DNA, 118488 bp, Homo sapiens
  misc_feature (1)...(118488): n = A,T,C or G
tacaaaattaaaatgataaatttgttattcaaaattcatacaactaaagacaaaagaagtttaaatgattccattttcaaatgatagtttttatggtttgcagaatttatgcttgtaatgtgattaaattataaaactgccctaagatttttgggatgccctgtcacatatacacaggtaccgggtctcgctataaagtatatttctcactttggtcaagtcatagaagtttgaaagccagtgacacagtccaaaccccacagtttatattctagcccccctccaaaaagccttctcagatctcccagcagaattcatctcttccctgctttgcccccttagcacccgatttttatttgtactccagtctcatcacagcccaccctgtgtttatggactcctggaccagagaggccatgccatttccagctttttatcacctacaaagtctagcacaagttttacatatagcaggtgttccataaactttttttttttctcttggagacagggtctcactctgtcacccaggctgaagtgtagtggcatgaacacagctttctgcagcctcgacctcccaggctcaaacaatcctcctatctcagcctcctgagtagctgggaatacagaggtgcgtgccatcaggcctggctagttccacaaactcttgttaaatgagatgaggttggaagggttaaatgtggagcactggcttcactaaatgatgttctgaatgaacttactgcaagaaatacttgacttacaggatattctgccattacacattagcttgctgttttgactaggtctgtctgtgggtctaacaccctcattttatcaacggcgaggccagaatggttaggtgacttctctagcaacacacagctagtggctcccaggagtagaacccgatctctcaactcctagaccactactctgtttaccacactcatacccgtggaggttgagtagggaatttggggaccaggcctgtcctccctgagcctccccgactccaccctttgatccccttcctggcatttgccttcctcccactcaaggatacaaatgctttaaagatgtggagactggaagtcccaggcagccttagcttttgtgaatgtcagagtcagccatccagaacatgccctagctttccaggtggcctctttgtaacaatgtttctttctatttatcaggtgagctggtcacctccttagacgtggcagcaggaagcaagcagtccttaccacagcgatatttgctcaagttactcagaggagggctcaattacaagtttctttggaaagtgataactgtcaccactcttaccacgggcacaggtgtgtggagctagacatcatattggggagggggcaggttaatttcacactactgttgggggaaatggggctgagaggctgtttggccaaatgaccgtcctttcttcctcataagcactttctctccatcaaacacagcactcatctcaagtcctctgtactcatactgtgaacagaagagcaaattatcttctccaaagccctcctcccacccctgacccttttgatcacagaatgtgggaggtttttatttttccccgtaattacaccttcaagacacttcagcttttctccaagactcaagctgcaatactgtggcttattttcccaggaagatacgctgaaaattatttctgtagctagtctgtcaagttcccccaacatatcaaggttcattttatgtttgcataatttttttttttttgagatggagtctcattctgttgcccatactggagtgcagtggcgggatctcggctcactgcaacctccgactcctgggttcaagcgattctcatccctcagcctcccgggtagctgggattacaggcgcccgccaccacgtccggctaatttttgtatttttttagtagagacagtgtttcgccatgttggccaggctagtcttgaactcctgacctcaagtgatctgtctgcctcggcctcccaaagtactaggattacaggtgtgagccaatgcatccagcctgtttgcatgatattttaagcttaaattacccaaacatggattttctattgaaaaactcaacccaactttgctcaccactgtatacctagagcagcgcttggcatgtggtaggcacttggttaatatttgttgacttattccaagaaaaagtcaccaaaaatcaaaataatatgccaccaaacaggaggttcaacagttcacaggtttttcactggagaccctgtaggcccttccaggtggggcaggggtgtgcaacggtttatccctaggagtgcagaagtggagggagggttccaggtggagatgaggtgggattctctaatcacctagaagccttggtgacaacgagactgggcttgagggggagagttgggggaaaggacagagaagggacagggaagtgatgagaagggtggaagacaggaggggtattcccgaaggcctcttgggccagtcttcaaattgggaagggggcttaatgggagagactagaattgaatttttccttttctcctcatcccccagtctgctcttggctgcagaactttcacccggggccactggctactcaatgtaccatcccctgggctcagggtctgtgcccagcctcctctgctagccagcctgcccaatttccccattgctgccagaagcattgaagtccgtgaaacaagccagcccctgtcccactctcagacaggtcgtttttaatcctgtctcaatttcaggttcaccccacacccgctcccaagtcctgctgattcattccctgcctccgggttcctcactgtcctttctgctttcaaaaccttcatttgaaattgggcctttatcaactagcatctggaggatcagcaggagctgcctgccagcctcctttgcctcgggcccctctctctctttcacaatcaggacagccgtattcatattccttgagcactgtttgactgtggcagaaacacagaggggctggccgggttgcttcctgtttgctgctcaccctcaagcccaaccagatgcttggcactcactggctatcttttcttcctcaaagcctttcccttatattcttgctaagcaagccatatttcttttctttcaaattcttaccagagactcccctctttcaagaaggcttcctagactaaggtgcatcttgctgcctcagtttctaggtgttatttgttcccaagtttctctactacccgtgctttccttacgtgggatttccccactaactatcatggagaagggagaaccaacaggcctagacggtagaccacctagatcctatttccttctccttcccaatccttgagtcttggtccccaaacttctgtctccagaatgttcttcctgaccaatctacctggccttccaatccctgtcgcatctctctgccttgagatgtatggcaatgctattttgctagtctgttcttcattctctattacgtgcagagttgaggactgggttgctttcttccttcaaatctctacctaggccttaggaccaagttgttcagggtacgagagaataagctgaccccacagggctgtcaggtgccacaaaagtcttctaacagtccttctcctccctggagtgagctcacccttgttcaccacacaggccttttacacagcacaattacaacattgagctcgacacagagacaggcactgccctgcacttaacctcctgcttattcaaatcctcactctcgttcctatcaaatgagaatgaacatttgggctttcccagaaaggggcagaggactgtgtaaagagctgagttcacccaagctacggcatggacacacccaacctggtcttcagcatcccttccagggctgagatgtcggaacacatccgtgggagccagaaaatgttaagaagaataccatcaccattttaaatattactgcttaccatatcaaatcaagttacagttatcttctctgttttacacagaaggaaactgaagcacagggaggtcaagtaacttgaccaaggtcacacagctagaaatgtggcagaggcagaatttgcattcaggcctatgtatctccaaagcccactctcttaactatgacatcacattgtcttgcatttgactggtgcttggagctttgccaaaacacttcatatacaccttctcatttgctccccacccagggagtgtttatgtgttttggctaagattatatatcgaagttagtgacagggctgagtcagctgcctgccttcatgatactcactgcctccctgcactgagaggccctcagccctagggttagctgcccctcctggtcctgaggtctgttcgaggcaatggttgcatggactaagttcatgctcatatttcctgtccccacttcttccagctgaacttgggcaaatatgtttctgacctcacagggcacctgacacacatcagggcctccccttctctgccctgagttcttccatgctgctacaggtaggagtcagctgttccacccactgtaggactgtgggcagcattactgaggtgaggtcatcttgagcagcccagtctcctgcacacttccctctttcttttgagggtcttgtcctgttctctgccctggtgcccctggaagcaactttctctgattacctctgggttcctaaagtgcatggcaccattaaggaactggagctagggaaatgcctgcaatgctactggctcctgctaggcaattggaatcaaagcatatttctttctttctttctttctttttttttttttttttttttttgagacagagttttgctcttattgcccaggctggaatgcaatggtgcgatctcagctcactgcaacctctgcttcccaggttcaaacaattctcctgcctcagcctcccaagtagctggaattacaggcgcctgccaccatgcccggctaactttttgtattttttgtggagatggggttttgccatgttggccaggctggtctcgaactcctgatctcaggtgatgcaccagcctcagcctcccaaagtgctgggattacaggcatgagccaccacatgtggccggaaccaaagcatatttcaaacccctcacctgacctggttttcatcatcacatgaatttccctgtctcatccttcttaacctttcctttgatgggaagggagacagctcatctgtctggagcggagaatagggcctgtgtggtgcacacacatctctggtagaaggcgcaaaagtcctcgaggctctttggtgtgtccagaactatgaacctcacccagtgcctgtaaattgtgtgtgtgggcctgggggcgagctcagagcacagagttaacatcctttctgagagtgctgcaatgggttgtcggctgctagaaggggtctgctgtaagctttgtgggcaaactgaccaccctccacccccatacacagaagagccccatcctaccctctgcagacgtctgggtctgcgatgattggccctggatgcaagtaaaagctgtttctcctttttgtcagcctgggaatctgaacaactgaggaaatagggaagtcggtgacagtcacagtcatgaacacccagcagattccatttccccacagcaggaggcagatcccttcccacccccaaaagcccccaggctctggagggaattcaaccaagcagggctcagaccgacctccaccagcgaggcttctccttgctgtccccttctgctcaggcgcaacgtggcagggcaggaggaaacctctctgcaagagttgccgtaccagagcacatggggtggcccgatctggggagacggggcacagaaggaatgcagggcatgggtgggtgaggggaagagggtgtggagccctggctctggcttgtccccctctcacccctccaagttccagaggtctgggctcctcattcatctcgtaagcgccaaggtggaggggggtcctaccgagggaggagctacaggccaccgcgaccagcagagagcgaaggcaggagggaccagcctggcccagccccttcattttactgtcgggggtagtgaggaggaagaggaagaggcgaaggctggcggaggaggaggtgagagcgaggactcggcagaagcgagatccgccgaagggaagtccgagcagtcggggagctcaggggggccctcccggggagagggtcgcgggctccttctgccgcttacctgtcgcgccgaggcaaagccgcagccgcgccgcggggtggctcccgggtttccccaccggacggccgggagggtgggaccggggcgggacctcccccagctgcactaacgcgcccgccccgcccctccctggccaggtgcagcgggtcccgccgtgtcctcagcctgctgcgggcccgggaactcccggcggaccggcagaggggcgccccggcttctctgcgtctcagcccgccccgggggtgcggtctttgcggccaggctttcagcgcggaaaaagattggagggtcctagtcaccccaaagaggacaggcattagcagagccgcgggcggcgggtgcatggaaccggaatgtgctgcgcgccagcctggagcgctcggagcccggaggcctgccccggaggggraaacgcggcggggcggccatgggccccggggtcctgccccaggtttgcttctcatttgtgctccatccaacaagagctcgtattccgtgtgccatgaactgtgtcaagggctccaagtgccaggtatcaggtgaatcccagccccagcaaactttaaacctactatgattattccgaatgtaccggggaggcagctgctcacacagcagagggtgtttctcaaagtgggatcccccaccagcagcgccagtcagaatcacctgagaacttattagaaattttggccgggcgcggtggttcatgcctgtaatcccagtactttgggaggccgaggcgggcggatcacaaggttaggaattcgagaccagcctggccaacatggtgaaaccccgyctctactaaaaatacaagaaattagctgggcgtagtggcgggcgtctgtaatcccagctactcgggaggctgaggccggagaatcgcttgaactcgggagggggaggttgcagtgagccgagatcacgccactgcactccagcctggcgacagagcgagattccgtatcaaaaaaaaaaaaaaagaaaaaaagaaaagaaaagaaaagaaatgggccccaccgcagacctaaatattccgaaactcgggttgggcccggcgacttgtgttttaaaagccctccgggtgattttgtgcatgctcgaccttgagaaccctgaacaattagtggcagggctggaatgagaatcctggtaaacccgcctcctaagccggtgttcggaattaccccgccagggcccgtgctgctcagtggtcctctccggcgctgcctcgtgtgctgcaatcttttggggccttagcaacagagaaggagcgcgcatgactccaaatagccaataatttgaaaactttctatggtagaaacttctaccactagttcagtttctcttttgttttgatatttaaataaatttgtctttctttctttctgttttcttcctctttctgctgccccgcctccctccttttttcttttttctttctttcttactctctctgtctctcctttctctctctctctttccttctttctctttctttccttctttttctctttctttctctctttcttttcttttcttgctctactgcccaggctggagtgcagtggagctatcacggctcactgcagccttgacctccgggtctcaagctgttctcctgcttcagcctccacagatgcatgccaccatgcccagctaacttttttttgtagagagggagtttcgccatgttgcccaggttggtttcaaactcctgggctcaagccatcctgttgcctcggcctcgcaaagtgatgggattagaggcatgagccaccgagtccagccatgaatttgtatttctaagaccctaagacctgggagcaggagcatgagtgagtagatcctagcaagaagttctgacacgcactgggaaaggcagggaagccagccgggtgttaacaggtgaatgaagaaagtaatctttttttctaacctgagactccaaggtaggtttgatctattcagaaggtgagatgttctttgatggagtcaggagagaaggccagcagagtgtggagaagaagagttgcccagctacacatgatcagagtgacgtgaaggatggacattctcccaggagtagaaaggggttcatctgctcactcttggcatgatgcccgactcccctaactctaagcagccttccaccaactcccttcctttcacattccaggccgtgggctttaagctcctagagagactttctacagagcttccttgagcatcccttagcccatctgtagaccctctggactctgattccacctcactgccccagctgcttctattcttgtcatgtgccttacttgacagctgtctttctcagaatgagggcacttcctgtggaagattgtgggatgctgcccctcatgtctctcttcttggggctgaacactccctgtacaggtcggacctaccgtctttgytctgtccttcctccacctctgccctttgaccctcaggggttgtgtgatcctgacgtgagtcttgcaccttagtcaggacccaacctaacctgaggtgaatggcccctattccttcccaggacagggtcatggccattacccccagcctggtgctcctgagagggccgggcccagcttcccaagaagtagcagcagtctgcgttgtgtgtttcgcattccggaagcaaattactcatctgattttacttcagctgacgctgattttaaatgtgacttggaatcctcagaataattagctgcctaatttggaggttcatgagtccgcaggatgtgtgacccacccctaatgtgtcatgcactgagctgttctctcctaacaggaaggacggtgcaggcttcctctccaccaagccaggaaggtttgcagatgagccaccacagaatagtgactgcaatttctgcctccgctggtacaggcaactttcgaaaaatggttttttaggctgggagtggtggctcaygcctgtaatcccagcactttgggaggctgaggtgggagatcacttgaagccgggactttgagttcagcctgatacagcgagaccctgtctctacaaaaaataaaaatacaacaggcacgggggcccacttgagggtggagggtgggaagagggagaagatcaaaaactacctagcgggtattatgcttattacctggatgacaaaatcatctgtacaccaaaccctcgcaacatgcaatttacccatgtaacaaacctggacatgtactcctgaacctaaaagtttaaaaaacatatatgatagtgaaaaaatgaaaataaaattagctgggtgtgttggcatgtgcctgtggtcccagttacttcggaggctcaggtgggaggattgcttgagcctaggagttagaggctgcggcgagctgtgactgcaatgctacattctagtctgggcaacagagcaagaccatgtctctgaaaaaaataaataaaaaaaaaacgggtttctgtaaatgaaaaagttatacgtaaatgaaatggaaaataaaaatgaaaaagttatatatgcacatggtaataagtcaggcactatgaaaatgtatacagtgaaagctccatttcccacctctctagacattgtctctatctccagaaaccttgggtccaaggtcccgtgcatattcctgactgaaagttcccataagcgcttctgcaggacatgtctagattctgttaactgcaaagacccaggatgaccccttctcaggaagtcctatgaatttcttttttttttttctcacgatcttatttttatttcttggctgttttagattcgggttttgggtgttctgagtttcacttttcacatgagtgtgcatcaagggtgttccccaccataaggcaggaaacctggaggggagcagaacagtggaagtgtgacaaaggcagctctgtgaggccgttgacaccagccctggcctttatctagtctcttccttccacacggtccctggtgaggggatacccacctctggtggggcagagtgagggagacctgcccttcagggggaggtgctggctccacttagctaggggagtgtgcaagggatgcygtgaacttgccaaggaggttagwagggaggccagctggtcaacctccctctgtcctatcactacctctcatctcacccactctcctctaccctgagggaaacaacggagtctcccactccctccctacctctttgtttcttatctgtgaagtgcagttaatgataccyggggttgttaatgaagctcaagtgagataacacatgaaagtgtgagagttgggtcttctaaattacatctgctgctctactttcctgcatattcacatttactcctcatctcattcccatgctcaggagagaaacagttaaagcgagaaatattttagggaacccaagcagagctgctcctagttctgccataatcactcatgcgctacaattcacccatttctgtgtgcctcaatttcctcatctgtaaaatggatatgttatttttatgattgggttgtaagattaaataagcaaagtgcttaacccagcatctggtacacaataagcagtcagttgaaatttggatgttagccattataatattagctgtttttcttctttccttcctccattcctcccttcaataaaatgctgttaaagtgctccatgtgttagcctctatgctaggtcaggtgtggagatacaaggataataagtcatgtctgtctcatccagacacccatagtttgtcaggggagcctgatgtaaaaatgactatgaaggagcagggctaggactagggtaaggcaagtgagggcacttctcttgagtgcaaaatttatgggggcatctaaaaactcagtaaccaagataaataatactttaatgcaatattttaaaaaatatcaaaattaatgcaaaaaatcagtgatggacaaagtatcaaaaattcaaaataaagaatcagctgggcctggtggctcatgtctgtaatcccagcactttgggaggctgaggcaagaggatcacttgagcgcaggagtttaagaccagcctgggcaacatagtgagaccccatctttatttaaaaaaaaaaaaaagactagtttccttctaagccatattgaagcctaaggaaaaaagaaaaatatataccctcatacatatttttctgtattttttgaatggttattttttcctagagcattaaagtagttgaaaaaacatttaaaacttgaaacataggtgtattaaaactcacagcattactttaaatattttatttgttccaaaatggaatttattatgattttacttcagccttagttaattttttttttttttttttttttgagacggagtctcattctgtcgcccaggctggaatgcagtcgcacgatctcagctcactgcaacctccaccttccaggttcaagcgattctcgtgcctcagcctcccgagtagctgggattacaggtgtgtgccaccacacccggctaatttttgtatttttagtagagacggggtttcaccatattggccaggctggtcttgaactcctgacctcgtgatccgcccacctcggcctcccaaagtgctgggattacaggcgtgagccaccacgcccggtctcagccttagttaattataatttatttaagatcatcacttggtcaagggaaactgtcaaacgtggcaatcttacaattcaaaatgaaataagcaaaacagttagttttgaaaatatgactaatgagtttgcttgccttaaagccaggagcttgtatttttccttttgcctcaagctccaatttggcttagcatggcattggattgggacgtggacaaagaacataaagagaacagagaggagaataagagacagggagaagggttgaaagagtcaggtgggatggggaatatattatttttcctaatgatccaaatatcacattttcaatgtgcaaaatttcagatgcacagaaaatcacaaaaaaagaagacaagttatccataattatgttacctagagataaccaatgttgctattttggtatgatatagtctgctctttttctatgcatatatgatttatatgtacatataaatttcatcaattctaaggtgcatttttaaaaatctttaacatatctgaaattggtatgtatcttaaattgatggtgttataacttagcagtgttggataatgcctgtaatcctagcactttgggaggctaagacgggaggattgcttgtgtccaggagtttgagaccagcctgggcaacatagtgagacccctgtctctataaaaagtacaaaaattagccaggcatggttgtgtgtgcctatagtcccagctactcgggaggaggctgaggtgagacccaggaggtctcaaactcctgagctcaagtgatccacccacctcagcctcccaaagtgctaggattaaatccgtgagccactgcgttctgctcgagtatccttatttttacaagtgagaaktttataagcacagcagttccctgtaactgcagtctgagcccttagccactactttttgcaagtctgtctctccatttattcaagtttctagtttatgatcctcagaaaagttttctagtgttctctctcctaatctttacagctcttgttaaaatgattccttggcattttatattacctattttaggagactcttgatcagtctttcttttgtataaccgaagcctcctaatatcatacaattaataagtgttcctctcttggggttgtcaaactgtaactatggactttctacttaaatcacacaagatcatctccttaaaagcaatcaagtgcccaagatctgtcctttcacagtasagaaatttcacaactgcaatgaataaaacatccaaatgcttgtaagattttgctgtgagagctttttctgctcaaaattatgatttcttatttaatatmtctctttaaaagaagaaacatatgcacatttaaccttctgaaatcttaattggatttcaatctgacagttgttttgcccaaagagaggtaataaaaggggctataaactaactccgcagagcaaacaatcctccagctaaaagcaaaacctgttatcttcccctaaaaaaagagaagtttctgtttctttctttttttctttttttgagagagagtctcgctctgtcgcgcagtctggagtgcagtggcctgatctcggctcattgcaatctctgcctcccgggttcaagcgattctcctgtctcagcctctggagtagctaggattacaggcgtgcgcaaccacgcccaactaatttttgtatttttgtagagatggggtttcaccatgttggtcaggctggtcttgaactcctgatctcaggtgatccaccttccttggcctcccaaagtgctgggattacaggcgtgagccaccacacctggctgaagtttctgttttcttagacatttgaaaaatcacaaatttcattaggattgaagtctatctgatattaatattactttggattgtaagtaaaggagaggtgatagaataactcattggtagatgagtccagatgtttaatgtcctcttaatatcctaaaatgtttgcctcattgtttattaattcccgtggaatcttatttacttattttcaataggtgatatgtgcatatggcaaaaaaaatctaaagctcaaaagtatagtgaagagggagtctccctccttctcccatctgcagtcacctagttttcctccccaaaggcagccactgttactgatttcttttgattctttctagaaacatagttcagaggagtcaccctgattttggcaagtaccttaaatagcagcttcttaattttttttttattacattgcccataatggttaaagttattttaaaagtagtcctcttactgagctctctttgtggctctgatagatttccagaggattctcttgattttctaggtagacggacatatcagcagcattcaattttggcaaagtgaaaacagttttggagtgagacctgggttgaatcctgactcttccagctgtctgatcttaaatctagcctttaaaacatgttgggccaggcgtggtggctcacgcttgtaatcccagctctttggaaggctgaggcaggcagatcacgaggtcaggagattgagatcatcttggccaacatggtgaaaccctgtctctactaaaatacaaaaaattagctgggcatggtgatgcgttcctataatcccagctacttggtaggctgaggcaggggaatcgcttgaacctgggaggtggaggttgcagtgagctgagattgcgtgactgcactccagtctggtgacagagcaacacttcgtctcaaaaaaaaaaaaaaaaaaaaccatgttggcactgtccaaaggtagcacagaggtacraagtggtccctcctcctgggtgtggtgggtggagtgggcagaggccatgcagacccaagcactgccccttggccctctcctgggtttgttccacctggacctgcagataaatccagaggcctttgatctcaaggatttctaaccacccagagatcaggaggaaagactgcaaaggaagccctaaagtagaataaccttttctttctccatgaatggaatgtragttatgtttgctgagggcagattaaaatagattttattgtttgaaatcaggaatttacagaaactctttgaagagctactatcatcgaagacctttaaatcccccactgtggtagtgggcaaaatagtcacgtacaattgtaatgtgtatagatgtgtataggttttctcagagttgggacccactgccaggcagggagttggtggtatttgatgctgttgtttggggaggagtggtactaagaaaaaaaaccatggttagtgaggaaaaaacaaaaaacacaaaacacactctcagttgcccatagagwtatatcagtktgatgggataccctagaacacctcaggggtctgtgaatcctttaaccactcaatggaaaaggtgactggggtatagattgtctagtttgtttatatgacataacttttttccaacggtacttgagaggagtgtgaatgaactcctttatatatatatatatatatatatatatatatatatatatatatatatatatacatacatacacacaccacacacatatataaacatatatgtttatatacgtatataaacatatatgtttatatacgtatataaacatatatatgtatatacatatatatatatttttaaacagggtctcactctgttgcccaggctggagtgcagtggcaccgtcacggtgaaacgggaaaggttcccttgtccccctcacagggagtgcaacaaggggagtggctcgcttctttagggcccggctgctgaaatctctatggaacatacagatgggcaggttgtggggttcagatcccacggcagcgtctacctttggacagtgccaacatgtttttcttttgtttgtttgagacggagcgttcctctgtcgccagttagtgtttacagctcctagccccagtgggcgtgtgctaccgtgtgctcttttaattttgccgtctgtaggcggctgtgctaaccagctggattagaccctctgccttatcgcgaggttttctgtatcccgggttcttgccttggtgtaccggaaaaatcagatcatatgtgggcttggagaatgagtgcaaggttttattgattttaagtagctctcagtagataggggagccagaagggagatggagtggaaaggtggttttcccctgagttgggccgctcagcagctgggctctcctctgactgccccaggcaaactctatgtctttccgtgggccgatggcgtgccagcgtgctggcatctgccactgcatgttggtatgctcttccaccagtgtattcctctcgatgtccagctgcctgtgcgttcctctactgatctgttcctcttgacgtccagccgcttgtgtctctgcccgctcgggtctcggggtttttataggcacaggataggactgtggtgggccacggtggtcttgggaaatgcaacgtttgggcatgaaaacagaaatgcctgtcctcacctaggtccctgggcacaggcctgggggtgcagccctagccagggaccacccccttcccttcccagcacttccctgccccactcccatatcaactcttcaatgcagcctcagcctccccaggctcaagcaatcctcccacctcagccccctgagtagctgggagtacagacatgtgcaaccacacccagctaatttttctatttttttttgtagagatgggatctccctatgttgcccaggctggtctcaaacatctgagcttaagtgatcctcctccttcagcctcccaaagtgctggaattacaggcatgagccacagtgtctggccccttcgtatcttaaccaccaggagaaacagacctgaagtgatgccttgatatatgtgtgttatgcaagactagagtaagatttgacaggcatatatggttacaacagggggtgagctcagactttgaaaagatattggcttcactccctaatcatcaagacttggaatatcctgggattcagctgttgttgaagggaaaccattccaggtttgccaaacaattgagtgacttaaggggtgcaaagctagaatgcttcaagaatagagggagaagaagccctgctgtgctgatgggctctctatggtgttatcctgtcctggcatttgctaccccgataaactcacaggtgctaaatttaaaggctaaagtgaggcctggcacagtagctcacgcctgtaatctcaacactttgggaggctaaggtgcgtggatcacctgaggtcgggagtttgggaccagcctggccaacatggtgaaaccccgtccctactaaaaatgcaaaaattacctgggtgtagtggcgtgtacctgtaatcccagctacctgggagactgaggcaggagaatcttttgaacctgggaggtggaggttgcagtgagccgagaccgcgccattgcactccaacctggggtacaagagtgaaactccatctcaaaaaataaaaaatgaaagctaaagtggtcagggtagttgactcctaggcatttatttgtccctttgcaattaatctaagcaccatatggtgattccactctccttgccagtgatgggcaaagacrggtgtcttctgggggtgcttgtcacttatcctgttcttcacagcgttatcccatggccagatgctatgggagaggcatgtctcagtatgggactggggrtccctgatagaatcccccccagtgaaaggagagactctgagaatgactgcatgaagtcccccagttagctggcagttctgtagtcatgggtaagttgtttagcctgttttcatttttttttaaaggacaattatatagagtctgttgtgaaatttagattaggtaataggtayaaactgctcagaacagtgctcagaacataataaatgctctatgttcaacaagaacaacagcaacaaactcagaagcactcctcgctaccgccggggagacccaggatacctaaactttactgagttggggccactcaagcctgaacagaaggatcagtggagccaacatgtgagtttcttgatatgtgcctgttactccaccagaaagcgttacttactcatttccagagtttgggcaggagccatgacagcctgttgatgagcttggctgaatcatgaaatttggcctgggtttgagggtgggcaagaatggccgcttggatcctgctcaaagttctttcgttttaggtttactcccaaagcagctgaaagcagtgcacaggatagaaatgaaacaagggtacatttaggtgggtggctgctgcttcccatggcctcttgtgtcaactcccaargaagcacccctcagagtctgccgatgttaccattcagtgggggagaaagatgtttgccagactggagcagcagataacggcaggttcactgcctttataccccagccacatggcacccagaaggaataagaacacctattttatttaacacccggcaataattctgttaatcaagccatgtcacccaggtctaaagtctaagcattgagattcttcccatgtcagccttggggcaatcattccttatctgtacttttgccgtaggcagggcggttgctagcattgctaaaaggcatcctttctgttgggcagatgcaaagctatacattaggatgcttgcttgacaagctaagtgtgtgcaaggcacaaaagttgcacaaccacaggtggtggcagtggctgcagggccctggagttcccatttctgcttggggcctggcacagtgatctctgccttagggtagacaagggaagtaggcttcactcagggtgaagtcagacttgtgagcaaatcataagactcttccgtgtggccactgttgctgcttgctgcaacacaaaagcagacgcaaataggacatcgggagctacatgaaggggttagatggctttggaaccctgggctgcctggtgagcataaaattgtcagtctgtggaagttgactcctgaccaaatgcaagagaggctggggaggttgactatgtacaaggagaggcagagattgggatggggcagtcaagtacaaagaacctgctttttcctttagcatcttttagggaactaccttcctttgattcttagtccatgaaattcagatgaggccctcctcactccctagcgccagccaggtgaatcttaaatcttgtagccacagtgattggtttagggttaggcatgttacccaagccaggccactcagagctttctctgagacatttcttagggcaagcaaaaaagatgaactcctccccccgtcttttctcctccatccccacatgaccactgatggaatcattagatgggaagttatgtatgtttagggtggctagtgatcatctttgctattacatgaggcaggagagtcaacttgaccgtgaagccaacgctgagaaagcagagaaagataaagaatgagaggactccagtgatatcttttggactcctgggtcctgctgtatctgaagtcatttattcctagacttctcctttcttccactttctttgctttctcctcccttccctgctttctttcttcccttttcttttgtctctttttctttccttatttttttcttgttttgattgaaatttgtttgagtgtgtttttgtcactttcaaccaaaagaatctgatcaataaataatatgatgcactggattaagttattgctataagggcgtgaaaaggcttgaggtaaaagggctgtctatgttcatgaaaatccaggtctggcagggaagaagcagagagaaactgccaagaaaagcttaggaaatgatgcttctgactctccagggagcagagaaagggagttgggtggtgactcacagtggggaggtgggaacacattggattggaagggatggaccacccatccttgtgggctttattctatgagatgcccttgaaccatccagtttctaggcaggtcttggagatcttggaagaccaggaaactggaagccttccccctgggagagaaggtgatcccaagaatagagaggcaagaggctggttagtgtctggcctattccaagcgcttcaggacatactgtacctcattccctctgagcactggagaggtcaccatttctctgcttcattacaccattaggctcaagcctgttgatgttctgtgcctaaccatgtccctcatgtttgctttgaagaggttgcacccaaattccccagtgggggtctccaccattatatataaataataccgctgtaaaccccctttatgttcatctatggccattttctttctttttcttttctttgtagagacagggtcttgctatgtttcccaggctggtctcaaactcctggcctcaagcaatcctcccacctgggccttccaaagtgctgggattacaagcgtgagctaccatgcctgcagggccccgtggccattttcttaggataaacttctagaatgaaatgtaccaggtcaaaggttatgaacattattaaggttttcgattcattccaggaagaaatattatctattactagaaaagagatgtaaaaagttccagcctttgtcaactaggagagtgatgatcatcaaataccacacgtaagaggtgacttgtttttcagaaaaacagagccatgtcatgatgcctataataaattaaattaaggccataaaatagggtgtgagtgcagcagatcatgtggcattaaacaaattggactgtctggttccctggagatatataagacaaacacaccagagaggtgatgtaatggggttatcagggcatttccttgagagtatcccaacagtagcaagtgtggtggtagccacagtggcagaggcagcggtagcagcagctgtagttgcatttacttctgcgtaagtggggttaggaccagagagggmaaagagctagtctttcactctcaggaactttttgtctaatgagggagatcaccaactgcaaataaaattatcccgagggagagattttggcctggtataaataacattctaagtctattcacagttggaaaggttaatgcatttgaaagcaatgtggaagccataaagcattattgatgtggggtagagtgttaggtactagggagtcagacaagaaagacctggtccctatctgtaaggagcttccagtccctggcacagttactctagaatgtgatatgaatgtgtaacagaggggtgtgtgtaggaggcccggtggtggcatgaagaggggagtggttaacttcacctgctgcttcagaaggatttagaagaggtgacatgacctggtttgtaatgaacgagtagaagtttgccaggtaggtaagtgggagagatgcaaatagagtgaagggcatttgtgtgacgttggtggcccccacaatttggggagcaaataacatgcccctgttagtcctcataatttagtgctccaggccccacgtgcagcaatatcaggtctgtggccctctgaggcttcaccctctcccccagatccttgaggttactagtgttgaggggaacttggckctggctggcagggctcattgcagcaggggactgcagctaatgaggaggagccaggctaggccaggcagttctccctgcagaagccgggcaacgtttgaggcctgtgaaaggaagtggatactggagtgatatcttatcctgggggtatgtcttactccatttgggctgctataacaaaatacctgagacgggataattgataaacaacagaaatctatttctcagtctggaggctaagtccaagatgagggtgctggcaggtttggtgtctggtgagggctgctctcctcttccaagatggtgccttgttgctgtgtcccggcatggagggaggcagaagggcaacctgactgacgggaggagccctcatggcctaatcatcttctaaaggcctaccactaatactgttgcattagagattaaatttcaatataaattgcttgcttgctttttcgttttttagagatgaagttttgctctgttgcccaggctggagttcagtggcacaatcatagctcgctgtagcctggaactcttaggctcaagcaatcctgcctgagcctcccaagtagctggcactacaggcatgcatcaccatacctggctaattataaaaaaaattttttttttttttggtagaaatgagacctccctatgttgccaaggctggtctgaaactcctgggctcaagtaatctgcccaccttggcctcccaaagagctggaatcataggtgtgagccaccrtgcccggcttcaacatagatttcaatataattttgaagagacacattcaaaccatagcggggtgtgtctctaaagcataggctccttgctctccaggaagtatgcccctaactgaattgctcaaaattgcctgcataaactcttggtttttccaccagaccacttccactgggtgctcagctgcctgccctggtgtgggaggtgcacacattctgaccataggcatctgtattcgttccctagggctgctataacaaagtaccacaaactgggtggctccaagcatgtttattgtctcacagtgctgaagaaatctacaaggccatgctccctgtgaggtctgtatggtaatccttccttacctcttcctggcgcctggtggctggctggcaattttttgtgttccttggcctgtgcaggcagcactccaattctccatcctcatatggtgttttccctgtcgcactgtgtcttcacatgtctggctccctataaggacaccagtcatattggattaggagcccaccctactccagtatgacctcatcttaactgattacacctgcaaggaccctatttccaaataaggttatattcttaggtactgggggctaggggttaggacttcaccatatccttttctgggggacacaattcaatctataatgggttttgtttgtttgtttttgaggcagagtctcactctgtcatccaggctggagtgcagtggcacgatcttggcttactgcaacctccgtcccctgggttcaagtgactctcatgtctcggcctccagagtagctaggattacaggcgcgtgccaccatacccagctaattttttgtatttttttttttagtagcgatggggtttctccatgctggccaggctggtctcgaactccagacctcaggtgatccacccaccttggcttccgaaagtgctgggattacagacgtgagacactgcgcccggcctataatgggttttctgagagatgtggtggtggagctttgagatggcaaagaccagtgctcccagtatttggaggtgctgctcaggggcgacagcgcaggagcatggtgttcacctctttctgcttggtgacccgaggctgcccaggaktatggctgaggggaactggggctctgctggagccacacagagtgatgttgcatctggagggaagggtggagtggagtccctgtcaagggagccattgctgggcctcttccctgctgttcctcaagaaaaggaaactgccagtgtgatgcgcactccagagcattttccttttagaacagagaaggagyggggaatgcatctgactaggtacccagtcttgtttttgtttttcagagttattctggatatttttgcttgcccattaattaaaaaaaccctgttcataattttattgtaatgtcctgaaatttaaagatgagtgaaaggagaattagcatatatatatactttttttttttgagacaggatctcactctgttgcccaggctgagtgcagtggcacaatcatgactgactgcagctttgccctccccaactcaagcaatcctcccgtctcagcctaccaagtagctgggactacaggtacacaccactacacctggctaacatctttaataaaattgagtttttcctaccagatacacagttattcaatctattcaagagtcttttgtgctactcagtagtattttaatgactttttttcttctagttcttgcacactatttgttgtttgctagatcttttctctttgcttgctaatataacaggaatcttttctctcatcttgttatctaatcagttgtgctttgtgttataggaaagctgttgatttttgcataatattcttttgcctagtcactcgcttctctgaattttcttactatttgcagtygttttcagttgattctgttaggttttctaggtttacaataatataatttaatctctttctttttgatatttttaaagagatggggtcttgctgtgtttcccaggcaggagcacagtggctattcataggtgcaatcatagtgcactgcagccttgaactcctggactcaagggatcctcctgcctcagcctccctagtagctgggactataggtgtgcaccactgcacccctgatttttatacattttatttttttctgttgtcaagttccatttgtaaccaaatgtaagtctggctgctcgctgcctgagaagccaaatactcatgaggcgaggtgtggtgaagcaccagcagttgaagaaatggctaggctcattcttccaaaaaaaccatttcaactttttgggctgagtaaagggatttaagaggaaaatgtggtatgggaaatacgtggaaatgtcgggtgcgggttctgcatgtctcgttccgatggctatcttgataatcgcccctccaggggcctggttggcgtcagtctgactttggcctgatggtggtgggctaatcatttgtaaccttcctgcaggaggattctgcagctgggcctctatgcctggtttatttcagaattggtccctggaatttctaagcaagcacataattagataagcaagcacagtgcatgggagtgcctggcgggaaagggaggaaaacaaagagttttaaagtacatttcaaggctatattttgagtttaaagaaaaaaagttttaaaatgcatcttgaagctgagatactcggttacacattgacctattcaatccttccccacccatcaggtaacagtagtgttcttgggcatctttagctagttttttactttactaggaatatatctctattttcccatcaagtatgatgctggctttgattcttctggttagagtcatcctgaatgcatctggtgttgaaattaatctctytttttttttttgagatggagttttcactcttgttgcccaggctggagtgcagtggcgcgatcttcgctcactgcaatctctgcctccctggttcaagcaattctcctgtctcagcctcccgaatagctgggattacaggtatgcgccaccaggcccagctaatttttttatatttttagtagagacggggtttcaccatgttggccaggctggtctcaaactcctgacctcaggtgatccacctgcctcggcctcccaaagtgttgggattacaggtgtgagtcaccatgcctggccaatcattttttaattagaggggatttcttaaaaaactttcttgtcccccttcccacactccatggtttggatttcctatctcttcgaacaatctttcttttcttttcttttcttttcttttttttttttttttgagacaggctctcactttgtcgcccaggctggaatgcagtggcaggatcataactcactgtaacctcaaactcctgggctcaagccatcatcccacctcagcctcccaaagtgctgggaatacaagtgtgagccactgctcctggccaatctgttttttttttttttttttttaaatacagaattacctgttgagatttcagttccttatacagagttgagcaatttttttttatcaatggaggttatttattctcattacttattatttgcatttatgctttttctccttccctgtcccttccctatgcaataatttggttagttgatgctttaatcttttctgatgctctattgcttttcaattttctaatttaataatttctacatttatctttaaaaagtctttctttaggctgggtgcagtggctcacacctgtaatcccagcactttgggaggctgaggtgggtggattatttgagccccggaattcaagaccagcctaggcaacatagcaaaacgccatctctactaaaaatacaaaaaattagcagggtatggtggtgtgcacctgtagtcccagctactcaggaggctgaggtaggaggatcacctgagcccaggaagttgaggctacagtgagcggtgattatgccattgtactccagcctggatgatgagagtgagaccctgccacacacacacacaagtcttttttaagttattttgtggctctttttctaactttttgagttgggtacttaattcatttattttcattttcatatttatgtatgtaattatttaaagctgtaaaatatgtttggttctagtcttctgcagtgtcagttgaaagagctgcttaagtgtttaagaagttctatttagtagagttaaaaaaaaaattgttgtctgggcatggtggctcattcctgtaatctcagagctttaggaggccaaagccggaggatcgcttgagcccaggaggttgaaaccctttctctacaaaaaatacaaaaattagctgggcgtggtggcatgtgcctgtggttccagctactcgggaggctgaggtgggaggatcgcttaagcccaggacttccacactgcagtgagctgtgatggtgccactatactccagcytgagtgacagggtgagatcctgtctcaaaaaaagaaaaattgttactgatttcaagttttattatcttatgacaacagcatgcctttcactctatcaaaattattgagggtttttttttggcctaataatcaattttgataaatattccatgaaccattgaaaagatgtattctttgtttccaaaatatagaatttaatatatatcaattggatcatatgaattatgttacttggatgtatatctttatttttaaaaatgttctagttgatgcataataattatatatatttatggggtacatgtgatattttgatacatgcatacagtatgtattaatcaaatcagggtatttaggatatccattaccttgaacatttattatatctttgttttggaaatatttcaaatcttctcttctagctattttgaaatatacaataaattgttgttaactgtagtcaccctactgtgctattggacactagaacttatttcttctaactgtaggcttttgtccattaaccaacctctgttcattccccacctgcccctgctcttcctagcctctggtaactatcatactgctctctacttccataatatgaacttttttaagctcccatataagtgagaacatgtgatgtttgtctttctgtacctggcttatttcacttaacataatgatgtccagttccatccatgttgctgtgaacaatagaaattcattctttttttatgcttaatagcattcagttgtgtgtaaatacattttccttattcattcatccattgatggacacttagtttgattccatatcttggctattgtgaacagtgcatggagatgcaagtatccctttgatatactgatttcctttcctttggataaatacccagtgatcagattgctggatcacatggtagttctatttttagttttttaaggaacctccatactgttttccataatgtctgtactaatacacattgttactatcagtttataagagttcccttttccctgcatcctcaccaacattcgtgtttttttgtctttttgttaatagccatcctggctggggtgagatgatatgtcattgtggtttttatttgcatttccctaacagttagtgatattgagcatttttttcatatacctgttggccatttctatgtcttcttttgagaaatatctactcagatcctttgtccattttttcatgggattatttgttttatattttgctgttgagttctttatatattctggatattaattccttgttggatgaatagtttgcaaataatttctctcattctacaggttgtctctttactctgttgattgtttcctttgcagtgaaagagctttttactttaatatagtcccatttgtctatttttgtttttgttgcctatgcttttgaagtcttagccatgaaatattttgcctagatccatgtcctgmagcatttcctgtatgttttcttctagtagtatttatagttcctggtcttacatttaagcctttaattcatgttgagttaatttttgtatatgrtaaaagatagggtccagtttcattcttctgcgtatggatagccagttttcccagcaccatttattgaagagggtgtcctttccccagtgcatgttcttcatgcctttgttgaaaatcagtcagttggctgtaaatatgtggatttatttctgggttctctattctgtttcgttggtctgtgtgtctgtttttatatcgataccatgctggttttgcttattctagctctgtggtatattttaaagtcaggtagtgtgatgccttcaactttcttctttttgctcaggattgctttggctatttgggatcttttttggtttcagacaaattttacgattattttttctatttctgtgacgaatgtctttggtatttttatagggactgcattgaatctgtatattgttttgggtagtatggtcattttaacaatattaattcttcccatccatgagcaggagatgtctttctgtttgcttgtgccctcttcaatttctttcatcagtgttttgtagttttcttgcagagatctcttacctccytggttaaatttattcctgggtcttttttttttttgtagctattgtaagtgggattgctttctttgcttttttttcccagctagttcattattggcatatagaaatgctgttgatttttataggtttaccttgtatactgcaattttactgacttygttggtcagttctaagagttttttggtggagtccttaggtttttctatatataagttcatgtcatctgcaaagagcgaaagtttgacatcctctttaatctgaatgccttttatttgtttctcttgcctgattgctctggctaggacgtacagtattattttgaataagagtgggccggatgtagtggcttacacatgtaatcctggcattttgggaagcctaggcaggaggatcacttgagcccaggagtttgagaccagcctgggcaacatagtgagatctcgtctctacaaaaaatcataaaacgaggtgggaagatcacttaagtctgggaggttgaggttgcaatgagttgtgattgtgccactgtactctcacctgagtgacagagtgagatactacctcaaaaaaatagtggtgaaagtggacatccttgtcttattctagttcttagagaaaaggctttcagcttttcctcattcagtatattaggtgtggatttattacatgtgggcctttattatatggaggtatgtttcttttatgcctaatatgttgagagcttttatcatgaaagaatgttggattttaccaaatgccgttttagcatctatggaaataatcatatggtttttggtccttcattctgttaatgtgatgtatattgatttgcatatgttcagccattcttgcatccctgcgataaatcccacttgattatgatgcagtatcttcttgatgtgctgttggacttggtttgattttgttgagggttttttgcctgtatattcatcaggaatattggcctgtagttttcttttttgttgttgttatatccttgtctattaggttggtgcaaaagtaattgtggtttttaccattggaaaaaaaaaaagtcaaataccgcaattacttttgcaccaacctaattttgatatcacagtaatgctggcctcatggaatgagttagagagaattccctgctctttgattttttggaatagtttgagaagaactgatgttagttcttcttaagtgtttgatagaattcagcaggaaagctatccagttctgggtttttctttgttgggagatattttattactgattcaatcctggtatctgttactgctctgttcaggtgttctgtgtcttcccggttcaatcttggtaggtggtaggtgttcaggaatttatccatttcctctaggttttccaattgtgagctttacttatgttttgtcttgctctgtcacaggctgacagaggtaaaataagctcttctcagaataatgtgtgttgattctttcttgtatgtccagtaaactttgttttatatctttgttgctatgttatttgtttactcagatatttattatatcttcattgtaatgtaaacctttattgttataaagtgcctatcttggacacaaatatggaaattacagacactggggactccaaaaggggagagagtgggagggaggcgagcattgaaaatttacctatcaggtacagtgttcaccagttgggtaatgggcctactagatgcccagtccccagcattacacaatataaccacataaaaaatatgcaaatgtacccccgaatctaaaataaaattaaatataataatatagtgcctatatttgtctagtttaataattttccccttgaaatcactattaccaaaaggtaagagtacgacctctactctcttccttttttttaaatttacttggtatacctttgctcattcttttatctttcaaactttctgagttaccttgctttagccatgattcataggctgggaataatctgtacctttggcattttgccagcttaggactagagctgtcctaattagtacccactggcctggggaatttgcctgtttgatggaggtcttttgkttttttttttttttttttttgagaatttgtgtttttgaaaatgtctctatttcactttcattctctcccaccttttctggccctttatttcccaacttttaattgtgaaaattttgaaacaaagagatgctaaaacataaggacaataggctgggcacggcggctcttgcctgtaatcccagcactttgggaggacgtgacaggcagattgcttgaagccaggagtttgagaccagcctggtcaacaaggtgaaaccccatctctactaaaaatacaaaaattatctgggtgtggtggcgtacgcttgtaatttcagctactcgggaggctgaggtacgagaatcacttgaacccaggaggcagatgttgtggtgagccaaaatagtgccgctgcactccagcctgagtgacagagtgagactctgtctcaaaacaaaacaaaacaaaacaaggacaatgaacatctgtaaagcttccacaattgttaacattttgtcatatttgctttatttctccttatatagctatctaggcatatctatctgtttctgtatctgtagtgctgtatcattcaaaagtaagttgtagacatcatggtactctaccttaacactgcagcatgcatctcctaagagtaagaactgctcatgcctataatcccagcacattgggaggccaaggtgggtggattgcttgagctcaggagttcaaaaccagcctgggtaacatggtgaaatcctgtctctacaaaaaatacaaaagttagctggccacgagtgtgcctgtagtgtcagctactcaggaggctgaggtgggaggatcacttgcatccaggagtttgaggcaagatcttatcaacttggacgacagagtgagaccccctgtctcaaaaaaaaaaagagaaagaattgtcttytacataaccacattaccatcatcacacatgaaaattaaccatggtgtaagtcttttcatttttttatatttgagacagggtctccctttgtcacccagtgcagtggcacgatcacagctcgctgcagcctcgacctcccttgctcaagtgaccytcctgcctcagccttctgagtagctgagactacaagtgtgcaacaccacggctggctagtttttgaattttttttttttttgagatggagtcttgctctgttgcccaggttggagtgcaatggcatgatcttggctcactggaacctctgcctcctgggttcaagcgattctcccacgtcagcctcccgagtagctgggattacaggcatgcgccaccatgcccagctaatttttgtattttttttttttttgagacgaagtctcacactgtcgcccaggctggtgtgcagtggggcgatctcggctcgctgcagcctccacctcccgggttcaagcrattctcctgcctcagcctcccgagtggctgggactacaggcatgcgccaccacacccagctaatttttgtatttttagtagagacggggtttcactatgttggccaggctggtctcgaactcctgacctcgtgatctgcccacctcagcctcccaaagtgctgggattacaggcgtgagccactgcacccggcctaatttttgtatttttagtagagacagggttttgccacgttggccaagctgatctctaactcctgacctcaggtgatctgcccgccttggcctcccaaagtgctgggattagaggcgtgagccaccatatctggctgtaagtctttttaaactgtgcattccattgctaaattccagactcctggcagtctggaattataagggtgcaagtggtttactggagacagtaatcctatcctgatcatgccctgtctcagaaagataagaacgagggaagagatcataatgggctacaagaatttgaagggctgtcatgtagaagagtgagcagactttgcctttggagttacagaggagagcatttggaatgaagagtgaaagtttcaaggaggcaaattgaacctggaatggggctgccagcctcattcgatggtgagtactctgtgactagagatatccagggaaaatcagatggctccttctctgggatggagtggaggggaattgtgttggataggaactggtctataggacatttaagtttcttccaagaattcttagggggcagggacaagttccggagagacccaaaacaatatacaagttatagtctaattataatggctctagtccattttgtctaccccaaacaaagctgattatccttacatgtgttttaagattgtattttttcctctgctatttgttggctaaccatctcatagctctggtttttggtaaatctagcaaatactctttcttatattttctgttggtttgtagaaagggctaaagaactctgccttctttaaggagggggccggccctttcaatttggtaaaatgttagagatagaaaaaagataagtgaaataaattcgcattctatctctattcctttttgccccagtcctaatgtctgactgggtatcttttttaaaatatatatataactgcaaaataaaaggcctcaggggaaatatcactggaagtaagagtagcttggattgaatttatatctatgtcagataatgtgcttcagtaatagttattttcagaactccatgggagttttttcagtaaactaatgaatgggtgtcactgacaagctttccaaagcggaaattatgtgaaaactcccatcttatgggaaaggctaaacagaggagaaaccctgggcttttgctggtgggggaggggttaatgtcagttctaaagaagattcacattttcattgtttcattgaagccaattcaattttatgcaggaaatggctgaatggaattatatttctaggaagccatacaattaagtagaaagcattagtagttcttgacccagctctgctattaactgccctgggcaagtccctatacctagctacatttccacttcctagacttcaaatgttctatgtacatttaccaatccattgaagataaatgagatagcagtgattacaaatgtcgggtattgaatttgctgccaccttaaagctgtcccaggcctatgggctaaaagtgaaataagaacttccctacttagtataatacttagtataaaaagctcaggaggtcttatccctaaatagataagatgtggagtgaaatcactttaaatagacctgatttataagcagggttaggtttggttagacatggataagataaatgtattgactatgaatgtgttcagctcttgtatcaaggacttggcaagtagtccttggttaacacctgctgctttcaaatttctgaatggcttcccatctgaatctggaagtcctacagcttttctcctccagggcctattcttgacttgcggatgacaaccgttttttttacagccagcttttctgttttgttctgctccctctagaggtcccttcccctacctctgcctctgtccaaatatcttaatagtgatatcaaagaaggcagaagtcaggttttgccatttcacttgaattctgccccagagcctctctcagtttggagcaaagtgtaactgagtgtggtgtaacgaagttctgtggatgatgttgatgatgacgaatagtggggagcgattttcacagccaggagcttggctctcagcttttgtggcgcctcagactcttccctgggatgtgtagtgttccatgckggcagcatgctgtgaacaatgaaaattgtattctgtagtctctttcaatatgctgtgacttggcaagggctgaaagcaaatcatgcacctgcataaccttttcagcttgacaaagaatctctctcactccccctctcgcccctcccttccacaggaaatgctcccagacgacagcacgaacaagccctaattaagtctttcctcagatcccgacgtcttttcctccaaccacatcttgggtttagatgtgtaagtaagaggaaagtggagaaataaaaatcaggtataagacgcagctggaaattgggacctatttaattgcaagtaaagcctaagaccccggccctggtggctctttggacagttcacatagaacaagagacagagtaaactgatggaggagttaagatgcttttgatgaaaaaactggttgcaaattatttaagaacattttctcagactttttgcgtttcttatatttgtgtctgtctctgaatagaagaatctcaatgtctttcaggatatttaaggatcatatacgtaaggtgcctcatgcttccttgagaagtctatgaacacatccttacaattatatgcaaaattttgggctttgtttacttatctgaaaaagagaatccacagattttataaygtctccagggagttcaagacccacygctttccccaaagtttaagaaccactggtattatagaagagaaagaataggtctaaaacaaaatctggaaggatggccacgtcaggaagccacaaagaaagagtggagcctatgaaagttagagaaggatgaaattcccaggcatccccatgggagacagtagggtggtgaagctcatgcactgtggaatcatttcatctgagctcacagtctagtgtctccatctattaactgtgctggctgtgtgccctggggaagttacctctccaagcctcagttttctaatctatacaatgggatgatagtgcctacctcagagttgttgcaaggatgaagtgaggctatccatgtagcatgcctctctgcctccctattggtatgatgtgtgtgtgtgtgtgtgcatgtgttgtctctgcctctacacatgtattttccattttcttgtccacattatgcctctttctgggctgactgaagattcaagaaggctctgaattctgttctgctgtttttttctgatttctttagaaaaataatcagtgtgaggtgatgtccttggctgaatacccccagctccactaggacttgtcttccagccaggctgagagccatgtgtttgagcttttccaaccagggtaaggagcagtagatgttaggagcctcgtgcttagagccaagtgaaccagctttttctgggaaggagagaccaaatcatccctgggaggatagagcctgtcttctgcagtgccccagatagcagcagccttagctgctgcctctgtggcctacttccttttgtaatttgcacaataggccagaagatggggctcttgaccctggagtcaagggccagaggctctgactttttccacatttgtactggagagaagtcagatccaccagtcctcccaggaatcaccactacttctcaattcctttccctaccctacctactccacttctgccatggctgggacttgccttccaggggagtgggggatgtgggcacatctttcctttggccaccatcctcggctcctgaattaccacgttgctagagtcagtctttctgacgccctgcctcaggtttccccctctaatccattctcccctaagggcagattttggagatggtacaatttttataggccaatacaacatagtggtcaagaactctagaatcagagagcttgttcttgactcgtctcctcaggtgaatctttccccacctcctcagagaagctctccctatcccatgccagttactcttgatcacataacyctttatttacttaacagtagtgattataactagcggttatcttgtttgatgacttgtttactttctcccacttgattgtaaggyttatgaggccaaggacactgtcttaattgctgttttcccaacacctaacatagggcacgatacataggttctcagcaaaagtgttttgaattaatagatgaatgatggaatcccagcttcatgactgcctgaccttgagtaagttgcttaacttcactgagcctcagttttttacctgtgaaatagaaaaagagtagagacattatgactattaaatgacacaatgcatttataccactaaacccaggttctggtgtgtggaagttttccctaaagccttcagcgtcctgctttttatcatttaagaaaaataaagtctgaatgaattagccagatctccacaatttgatcacggccttttattttatttattttttatttttttgagacagggtctcactctgtcacctcggctggagtggagtggtatactgaagcctctcctgggctcaggtgatcctcccacttcagcttcctgaggggctgggactgcaggtgcatgccaccatgcctggctaatttttttgtattttaaaaatagagatggaatttctacatgttggcccaagttggtcttgaactgttgggttcaagggatccatctgtcttggcctcccaaagtgctgggattacaagtgtgagccaccatgcccagcccacagcctttctctatcacaactattacctcccactgctcttctcaataactttctgctttggcccaaattgtggctaccctgaatgggccatgtgcattattattcttaagtctttgcctaagacttgagatgcttgctcttcttaccttgggtcagctaaatcttacccatgttttcagacttagctcgaatccatgtcctctgtgaaaccttcctgaagatcattttctcttctgaatttttgcaatcttcatggtttatataatattactcattaacatatatcctgtttccctgataagcctgttaagctcccttggagatatatattttagatttctctgcctctacagtgttacttgggcctgttcattagtaggtgttcaatacattttttattagattgaattaaaagcattcatatttactaagtactttctatgtgcctgggattggttgaggctctgttgagtatacagaagggcataagaaaaataatcattgctttcaaagaacttataatattttagtaagctaaagtcaacatataaagtacttaaataaccacagcatgacaactgctataagaaaggtatgaagtgccttgagaattctggggagggtgagatgacatctgttaggggtatcagggacagtagaataaagaaaggcttcttggaagagggtggcttttgagattaactttgaaggatggttaagattttgatggacaaaaatggggatgagggtaggatgtgaattccagattcaagatgacaggattagtaaagagattgatggagtgtgtggcaatgaacactaaaacgcagagactagacaggaggcttatacaggacatcagaaatacaattctgcttcagggatactgaagcccaaccttgtttccaatttcaggaccaacacaaaggatggtaagcaggggtggaaagttttaacatgtatcagactaccttccccaactgtagcttctttaggggctgagaattatttgcaacaattcttcccctgaccccaatttggacctacctgaagtctggtatgatagtgcatataaaacaaaaggccccayggccgggtgccatggctcacgcctgtaatcccagcaccttgggtggctgaggcgggcagatcacctgaggtcaggagttccagaccagcctggccaacatggtgaaaccccgtctctactacaaatacaaaaaaatcagccgggcgtggtggtggggacctgtaatcccagctactcaggaggctgaggcaggagaatcgcttgaactggataggcggaggttgcagtgatccaagaacacgccattgcactccagcctgggcaacaagagtgaaacttcgtctccaaaaaaaaaaaaaaaacaaaaaaaamaacaaaaaaaaaamcaaaaaaaacccaaaaggtacctttctttttcttgaggagagagggttgcttcgattttagccagcctctcttttcttataaatccaaatcaaatttaatgcattattcatgatattctaaccttgtgttargtcagtagttctgttgctaaataatagtttgccttagatcatttcctggaaaagttcgaagcctttttgtggaattgcttcaacagtcatccttagctcraccctgtccgtgtgttttgcttctgacttgagactcaagaagaagacctaagtcatagtgagactgtgagggagcctgacactgcctgccttcttcaatttaatgctctttaatctggccattagctcaaggaaaaacaattaattttagaaggccctctcccctcatccgcaattacctcctcctgcaatcgcgaaggatgtttgcccrgaatttaaacatcatctcccaaggaatgaaatcagaataggcaaaaccgacactttcccagttttcaagggtcaggtgcagctgcaaatagaagcagagattttctagcaagcagttggaaggaccttcacgcccagaggcccctgaagggagggaggcggtttccaaggcaaccgggcccgggagcggttggctccccggctcctccccctccccgcggtagcccagggtaccgccggacagcgtcctcccgtgctccgcgccctgattggctgcgcaggcctctcgctgattggttgcggcggatgcctcgcgggccggtggctatggaggcggcggcggttgatggttgaccgttggctccggggtgggggtcgccgttcgagtgatctgctcagacccgaccagagggcgcgggctgctgatgcttggcttggagcccgtgggggagacctagttcggctccgccatgccggccgccgggagtaacgagccggacggcgtcctcagctatcaggtagggccccgcctcccgcgcctcccgctcctccccggggcgcagcctcctcatcctctgcccaccctccttccttctgcccccgagcccaggcttcccaggccgctccctgagggcgaggggaggccagcccgggacaccagggggcgctccgggcggttggggaccaggccagggctgcgagagagtgaccttgggccgaacctgggatctggcccatctctgccgcatcccttgcgccgcccgcccaggagccctgacagccggcgggcggcgacctcttgttctcctcgcgtctttctgttggaaggggccggcgtctggcctcgcgttgtcctgccagaacgtgggcagaaagggtagcagggaccttgctctggtggggcacgtcttctctttgtgtttttatttctgggggtttctggttcctcagtggttcagaggaaaagccagaaaagactctggaggctgggaccaatccctgatagggtgacccggtttgtgactccctctgccccattgaacagacacctgaaaacttctgggtagggactgcaaactgggctgaggatgtgtggaggggtcaggaacaggtgcttatttaagggaattaaaaaaccaaggttaagtaactggtattggaactgttggggcggctaatgtaaggaaaagcattggactaagtgttagagtctgtagtttgaaatcctacctctgcctcacacaaactttgtgaccttgagtaagtcacttgcctctttgaacctcagtttccccagctattaaaatgggaatagttatgtctgctttgcatgcttcacagggttgttttgaggatcagacgaagtgctgtttgtgaaagggctttgtggagtaatgtttattgtgtgacactcagtgaatgagtggcagcccattgaattctcactccccgtttcctgtgcaatcagatggtgtggtttctgccttggaaagagggttggaagaggaggcaagtctgaagtacagggctctgaagagggtaatgggccatctcaggaaggatgacacgtcttggaaacaagtgccatgttgacctcagggatggtttccccgaggaggcagggaaaatatcctgagtttgcaacaaaatgartatcagacactgactctctcctcttcttcctggttaatagtttgctacaattaatagaagatacatccttctttccttgctctgtctgaaaagaacaatatctaagattttggaaaatgcatatctaacccccttaaagcctattaaatgtattcaatctctgtttgggatacaatggtaagaaaaaataggcaatgttcttgccctcctggagcgtatcatttagtgggggaggggagaagtactatttttaatcaaatatcacacaaataaatatcataaactgtgataaatgctttgaagaaagataggcagtgccataagcgtgtataacagtggttccagacatggtctcagagaagattttgctaaggaagaaaatctgggcaaagagctaaaggatgaataaatgttaactgagggaagagggggatcacagggcctgagaggcaaagagaacagctacacaaaagacctgtggcagagggggacacacctggttagagacctgaaatgaggccagtgtggtgcagcaacaaggagcgatgaggggaatggtatatgagatgtgttctggggttataacacacagggccatttggagcccatgctgaggaagttgacatttatctgaggaacaaggggaagccactgaaggggtttaagtagaggggaaaggggagagagggggtctctcctaaccgggagagagagagagggcatgagagagtaaatgagatcatgaacagattttcttttttttttcttttctttttttttttttttgagatggagtcttgctctgtcgcccaggctggagtgcagtggtgcgatctccactcactacaagctccgyctcccaggttcacgccattctcctgcctcggtctccggagtagctgcgactacaggcgccttccaccacgcccggctaattttttgtatttttagtagagacagggtttcaccgtgttagctaggatggtcttgatctcctgacctcgtgatctgcccgcctcggcctcccaaagtgctgggattacagacgtgagccaccgtgcccggcccagattttcctactgaaagatttctttggctgcagtggggagaataggttggaatggatgtgaggatacagtgtccttaacatgcagaatgtttacaggttatattattgagggcatcatgacccttaggtttctgttagtgttctgtgaaattagtaattcttgagtacttctggagtaggatagaaaatatctcctttatatctagtttgtgaaactttcttgggtggtagggtgaggagaagaaaaggaatacaatgggaacagtaggacctcatgaaggctggagtcaggtaataggcaaatggaaatttgagagatagggaggaaaagagaatgagggtagaaggaggaaaggaaatggggatgacttgggggagagacagtcaactgactggcaatgaccaattaaaccttctatgtgctaactaggctgtgtggagatgggccttgtaaagtgagcagattgtgtaacttgatgtaaacagagaggttccagacatcacctctaaatatcataaggctgtgctgttttggaagatgtgagctactgtcctagccttctaacagttccctctgctttctttcttgcccttctgtaagactactctccacatggcagccacagggagcttttaaaaacacaaatcagatcatgtcacatcttatcttgaaacccttcagtggcttcctggtgccttttagaataaaatccaaactctttatcatggcctaccaagcctgaatacaatcaggctcttgtccaccctcccaggactgcctctcctccactctctttcttgcacctcctctggctttctgtttcttcaatacagtaagtcttgcatacctcaggtgggtcttgtgcctgtcattccctctgcccaggatgctgttttacccaggccttctcatgattcaactagaatgtcacttccttagagtggctttctctgaaccttcatcccagtcactctctttaagatggtcctgttttattttcttataacatatgacttacctgaaatattcttcttttggtttcttgtttattatcatctcagttagaagcttcttgagggcaggggacaagcagaaaatcttctcacctagcacagtgcctggtataaaattggtgctcaattgcataagtgaatgagcagctctcccgtatccaaagccagatgcctccccttaaggagctcaaggtctagtcaggattggcacagagtgacagatggccattacttcattacacaacatctcttccctctatgttgtgcctttgctcaggcgttgaagctggaaaatctttcccctcctctccgccaagaatattccattttaaccttcaaggtctggctccatatcattctattatattcgtcactcactctcccctgctcacaacacctaccaagtactatcttccgtgaaccctgacttgtggaatatacatattcatctctgctgctcacctgacagctccatttgctgttactgttaacttttattgaatgcttgccatgtgccaggcactatgctaagtgtttttcatgcattatctcacttaatgctctctataaccctgagaattatggaactttattattgttttccaaatgagaaaacaaagataataaagaggttaagtaattcttttatttttatttttattttttattttttgagatggagtttcactcttgttgcccaggctggagtgcaatggcatgatctcggctcactgcaacctccaactcccaggttcaagtgattctcctgcctcagcatcccgagtagctgggattacaggcgcctgccaccacccctagctaatttttttgtatttttagtagagatggggtttcaccatgttggccaggctggtctcaawctcctgacttcaggtgatccacctgcctcggcctcccaaagtgctgggattacaggcatgagctactctgccaggcatagagaggttaagtaattctaagtgccagggttgcttgtggccctgccagacccagggctgcatctctgcaaaggatgtgcccttaatcactgtgcattactgtggctgtgtctttgttgcctataacagtacctgtctctgaataagcactcactaagtgtttgggaaggcaggatgggaagagactgcaatgagggaggccagctaggaggccattggtataattcaggatgagttaatgaagacctacattagtcatcattttgatgagatctctgaaggtgtttatggaatttttatttatttttgagacagggtctcactctgttgcccaggctggagtgcagtggtgtgatctcagctcactgcagygtcgacctcctgggctcaagtgatccttccacttcagcctccctagtagctggaactacagacatgaaccactatgtccagctatttttttttattttaatttttatagagacagagtctcactatgttgcctgggctggtcttgaatccctggtctcaagcgatcctcacccctcggcctcctgaagtgctgggattataggcatgaccaccacgcccagccggttattgaaattttaagagtcaatgagcttttcatagggggtagtaatagaggaaggaagtcagaaagctttaaggaaagcccctactttggattggaactggggacacctggtatcttcacagttctcctgataagcactttcagaacaagcagaaggaagtgttgaaagagaaaactggtgagattggaactctcagcatttgagccaagtggtgctggggactgaaggaaagttcagggagggtgaaaatggtggatggggaagcaagtgaatttgggcaattaccaaggcttttatgtggatcaggcctgctcagaatggaaaattttgcagaaatcttcacaataataaaccctggtaagtgggtgataattgagaaacatggctgataggagtagagttacaccccatgtcttatgatggacctgaaaaagctctaagacaagagttctgaaggagacctggattctagtgcccagtgactgtggcacatgttggagctcagtaaatatttgctgagcgaatgaatgaatggctctacagggagtgcgtcaacttttctgagggtcatagccagtttatggtaagcagtcagtaaatatttgctcatattatttaacaaaagtatcaactgtagatagcagtttctcctctcactacattgcacatacccctccaccctctcctcacacatactaggtattctttccatgtgagagaattggggaacctgtgggcattctttttatctggttttcccagatctgctagrgagcttcagtaggagagatgtgggcagacttgtcaagcagagacttgagcagagaattggggacaattcagactgcaaatttacttccttcaaaatctgtagataatcgtcttagctcatggtttgccttggcagggtagacagggtcatggtagtaatcaggacacagaaaagcaattgtgtctattctaaatctgctgccaggtaacagcaacagatcttagataatggagaggttggttgtttcccataggtagtaacaagtttactggtcctggtcttggtagtcaggaagtcataatatatgtattggttttcaatttctgccataacaaagtaccacatatttgatggcttaaaaaacacaaatttatcctacagttctatagttcagaaatctgatacaggtctcactggactaaaatcaaagtgttggcgggactgtttctttctggaggttctgggagaggatctgtttcctcgccttttccatcttctagagactgcctgcattccttggctcatagttcccttcctccatctccaaagccagaaacatagcatctctcagaacctgcttttgtcatcacatttttctctgactctagtcttctgtctctctctttcacgttaaggatccttgttattacactgagattacataatggttttcataatttargatgatctccttattgtaagatcagctgattagcaaccttacctccgtctccaaccttaattcctctttgccattataagggaacatattcacaaactctagggattaggatgtgcatctctttagaggactattaatctatcacagtgtaacctatactgaacaggagtgactccaagtggggttcagcaaaagaatcactgagaagccagagccattttggaattttaggcccctagcaggctgctgaagggttagaatgggaagctcatgggtattcaggagctcatggccactgagaagaggaagtctggaacagctgcatgagtccttgtggaattttttttttgtggctatagggtgttttcattcagtaagaaagtatttgagggcattggagagttggggacccgtgggtcagatttggtgatggactccccaaagggccagcattctgaggctctgctggatgaagaggaagatggaagtgaataaggagatgaagaactattggaggtctggtcagtaaagggcagtttggggtgcagggttctggagcgccaaggatttaagaaggtaataatgtggatcttaagctattcttactgtgggcattaatccatgattagtccatctgactaaatggtgaggttctttgcttttggcaatcttagcatactgacttactaatgttagtaaggaacacagacttgattagagttcttatctcacttagcttttgtgagatcttagcctcaatttagaactgttttgaggattaagtgaggcaacatatgtaaaacacaatgtgaggtatataagtgtattacctcggtttgctgattagaaaccttggaaatgggccaggcgcggtggctcacgcctgtaatcccagcactttgggaggccgaggtgggaggatcacaaggtcaggagatcgagaccatcctggctaacaaggtgaaaccccatctctactaaaaatacaaaaaaaaattagccgggtgtggtggcgggcgcctgtagtcccacctactcgggaggctgaggcaggagaatggcatgaacctgggaggcagagcttgtagtgagccaagatggcgccactgcactccagcctgggcgacagagcgagactccgcctcaaaaaaaaaaaaaaaaaaagaaaccctggaaatggctgggtgtggtggctcacacctgtaatcccagcaccttgggaggccgaggtgggtggatcacgaggtcaggagatagagaccatcctagcgaacatggcgaaacccagtctctactaaaaatacaaaaattagctgggcgtggtggtgcgtgcttgtagtcccagctactcggcaggctgaagcaggacaattgtttgaacccaggagacagaggttgcgatgagctgagatggcgcctctgcactccagcctggtgacagagcgagactctgtctcaaaacaaacaaacaaacaaaaaactctggaaatcatctctatatttattgattttgaaatggttgaatgtattagaactcaataaacacttgacttttttggggggggtcttggcagggatagtggtgggagtgaagtagaatgttaatgtatgtactctctgaaaacactgaaaaagatgaaagggttctttgaggtaaaaagtctgagacctactgcaggaaaggaggtgggattcatttgggcaggtccaccaccacgcaggtccagagaggagcctcaggggaagtgtgttaagagagagagcttgaggtgggctctgctccccaccttccctgttccctgtagcctctgtggctgcttccaggagctggggccattatgtaagactgagctctgcccgtgccttttaatttccatttactgtaagtgagaatctggtctgctactcagttataattcattcatttttcaaggctcatgacaatgctttctttctcaagccttgccttgcaatttcagcattttaatgtgtatttaaccctcttagttctttttatctatctagtccttgaggtaggcactcaagtcaattcacatttacgtagtgggttattatcagtgaactaagaggaagttcagaaaagaggatactcagaaatagggctttttccttcctttcttccttccttcctttcctttttcttaagcttatataatgtgtttctcaggattctaatcttttctgagtcacaagcccctgtgagagaatctgatgaaagttatggaccctctcccaagaaaagtgcacattcacacatattcccacagatcctctgaagcccatttacaagcaccctagaaatccatggaccacaattgagagatcttttttgccataaataaatgatactatcagaggaaataatagccaattggtgaggaatctgcagcaagcacaggccaaagagacctgatgttcctttcttttcatttttaatgatttcaaacaaactttgtatgtgcctgaaatttatggaacatttcaagcatatagcaaagtagagagattttgcatagtgaatcatcatgtacccatgacttggcgtcaacaatgaacacaccatctgttttttttttgttttgttttgttttttttttgagacagggtctttctccgttggccatgctggagttcagcgtacaaacacggctcattagagcctccaactcctgggctcgagcaattcttccacctgagcctccagagtagctgggactacaagcccataccaccacacccagctaatttttgaatttgttgtagggacgaggtttcactatgttgcccaggctggtctcgaactcccagcctcaaacgatcctcccacctcagccttccaaagctctggggttataggcatgagttgcagagcctggccacacaatcttgtttcatctatgttcatctattctccaaatctcagacatattatttcatgagtaaaaatttcagtgtgtagccctaaagattaaagactcttttaaaacaacgacataactgccaaaacacacgagattattatactgaaaaaatagtttcctaatataatcaaattttcatttagttgtttacatttatgtgagtaccttgtagttttttaaaaaatacttgttttatttgaatcaggattcaaacaaagtccacacattcacattcaagcctgacctttcaaatgcttttgctaatggttattgacagtggctctgttttctttggcaagacaaagaaaatggatgaacaattattcagtgaatttaggctgtggttaaccaatctaaattaaggaaactaacaaacagcaagaaagtttttcaacctgaatttttcagatgattgaccttgctctttatattttgcagttacaattttaaagaaatcaatcatctctcctaccctccctccctctgtttctctagattcccactgtgttctctgtggtgtcaggtgtctgaagacagtaccaagtattataattaattgattcctatcctctggatattaaaaaccagtaggggagccaacatgaataattattcatatatctaattatttatttatatagttttatgagaaaacatctgatcaattatcaaagagtttataaaactaataaacattcattgaaatgtatgggatacttaccatgtactggacattgtactgggtgctgggtagatattgatgaatataagacccagtacctatcctcctagaacttttgaggggacagaatctggattttgctgattgtattcccatggtgttgtttttcaaggaactctgttttattgtactttcagtaaattggtatttggatttagaggcttgatcagattcagggacaatttatttggtaagattacctcatgggtggtgatatggtctcccattaggaggcatacaatgtctgattgtctctcctttgtgatgttagtggctgttgaaaatcagtacaatccattggggattgcaaaatgattttgttccatcattcccttttcatttagtctctcccataatgagaagcttttctcatctactctgtggtaccactctatggtataatttatctaggaaagcccagataaattatttgccagttttcaaagtaatgagttggtttattagtgttatcctccaaatgtgaccaattagttaattttaaaagtgaccttgtgaagccaggcgtggtggctcgcgcctgtaatcctagcactttgggaggctgaggagggaggatcacttgagcttaggagttcgagaccagcctgggcaacatagtgagaccgcccgccccaactccgccacctctctattttaaaaataaataaataaacaaataaaataaaagtgaccttatgaagtgaactcatcaatcttaacatattgacatggtcaatctgttgtaggcattaccctactgatgctcaaattgtcctattttttggcaagagacccctttaaattggctcctgagtcctttggacacaatcctagttgtcttcgagtgcttccttactatctaacataataagatgttttagacttaccttgtacatttcctggctgggacctatgaccagccatttctccagggagctctgattccttttattacaaaatggtattttaagagactataatgtaggtactaattatactcattgctactgattgatcattttttctaagcctttgagtgggcagagctagaaaatataaatttgtaaatttaaaaacattaaaaataaaaacgcattgtatattattgttgatacttccaattcaatttaggactgcatggctcttatttaccttttgtcttaaaactgtatctcctttctctcttgccgagaatcccagtcctcagccgcactgggagtgacagaataaattcacatagctactcatttgttttatctcacaacacacaacaagcctcagaataccaacaccaaccctacaaccaacaataggataaccaaaaaacagtttcagatcttttaaaattcttctttgtccttagagtatatgccactgaggatgttcagtcaggttactatgttttaatgttacttagaataatttctcttggaatttataccatcaatttgacctttgttttcattttgtttttgattttggggaattactttaaaatttttaattttacattatgtaaattatttacaaaataaggcatattcaaaaaagtctagtttctatctttgtctcttccatcttattccctccctcctctctaggtaactatttaaaaaaatcttttgtgactttttcttcttttatttgttatttatttatttatttagttagttagttagttatttgagatggagtctcactctgtcatccaggctggagtgcaatggcgtaatcttggctcactgcaatctctgcctcctaggttcaagtgattctcctgcctcagcctcccaagtagctgggattataggcgtgcaccaccacacccggctaatttttgtatttttagtagagatggggtttcaccatgttggccaggctggtctcgaactcctgacctcaagtgatccacctgccttgggctcccaaagtgctgggattataggcatgagccactgcagtcatcctatttgttttaaaatgtaagcaaacacttatgttccaacaccctttgttagataaaaggtagcaaattatacagttttctccatcttgctttttaaacttaatattatattttggagatttttccatggtagtaataatatataattttaaatgtctataaagctaatttaatacataaaaatcctaagtagatattagactattttatttacttccctaaaagtttgtttattccagttggcctcaaaaactttatttcaatcttcccattgggaaaatgaattgccttatgttcagagttgtcttatttgggagcatagatgataactacaaaatagtaactttggaacagtaagctggaaacttgagcaggatctagaaggaaggtgatatcgtttggctatttgtccccaccaaatatgttgraatgtaatccccaatgttggagatggggtctggtgggagatgtttgggtcatggaggcagatgcctcatgaatgtcttggtgccatcctcacagtaatgagtgagttcttgctctgagttcacccaagatctggttgtttaaaagagtctgggccctcccctctctcttgcccccatcttgccatattatacaccagcttcccttttgccttctgccatgattgtgagcttcctgactctcttaccagaagcagatgctagcaccacacttcctgtacagcctgcagaactgtgagccaagataaacctattttcttaataaattacccagtctcaggtattccattatagcaatgcaaatggactaatacaggagacgtggggatttaatgtgctggagagtttggggaaatggcatgttagatgactagatgacctgacaatatgagcaaagacataaaggtgggaatgtgcacagtgctctcgggatcagtcagcttggctggagttgcaggtttgagaagggaaatagattgccagggaaatcagctaagagtttttttgaaataattcagggtcttgtgattcagggtattgataggataggtgccattatattcattcttttaaaacrtttaatttttattttgaaattgacaagtaatatttaagtaatattgtacatattcattggggtgcatrgtgatgtttcaatacatgtaatgtatagtgatcagatcagagtaattagcatatctatcatttaaaacatttattatttctttgtgttgagattactcaatatcttccttctagctgtttgaaactctatattatagtcatcctactrtagtatagaacactagaacttattcttcctatatagttgtaattttttatcctttagcaaatctctccctacacttctcccccttgccttcctagcctctaatattctctcttatacttcttacttctctgagatcaactttttttagcttccacatatgagtgagaacatgcagtgtttaactttctgttcctggcttatttcacttaacataatgtccttcagttccatccatattgccacaaatgacaagatttcatactttttatggctgaatagtattctgctgtgtatatatgccatattttctttatccattcatctgttgttggacacctaggatgattccatatcttggctattatgaatagtgctgcgataaacgtggggatgcagatgtctctttaatatagtgatttcctttcctttggataaatgcccagtagtgagattactggattatatggtggttctgtttgtagttttttgaggaacctccactgttctccacagtggctgtactagtttatattcccaccaacagtgtataagggttctttcttcttcrtatccttgccagcatttgttatattttgtctttttgataatagccatcctaactggagtgagatgatacctcattttggttttgatttgcatttccctgatgattagtgatgttgagcattttttcatatatttgttgactatttgtttgtcttttgagaattgtgtattcattcttttaacaaagatttatagagcactgttatgtgaaaagtctgtgctgggtgctaggatacagtggtgaggaagatggacatagttccttcttcctcaaggaacagaggagactttttttattttttttgagacagagtctcgctctgttgcccatgctggagtacaatggtgcgatctcagctcactgcaacctctgcctcccaggttcaagtgattctcctgcctcagcctcctgagtagctggcactacaggcacgcaccaccacacccagataatttttttatttttagtagagatggggtttcaccatgttggtcaggccagtcttgaactcctgacctcaggtgatcacctgccttggcctcccaaagtgttgggattacaggtgtgagccaccatgcccggccaagacattttattactaagagaattgcagtgtgctatgagggtatataaatggtggacctagcttagtttggaagtcggagtgggtaatcaggaaaggcttccaagtaagtgtgttgaggctgagatcaaagagatcatcatctctttgatcatcatcaaaggtgggggcaggtggtgggagtggcagggagagaatggtagttccaggaagagacagcagcactaagtaaagaaggtgggtgtggttccagaactaaaaaaaaaaagaaagaaatgcctaatatgatttaaagggttggagcatgtagggaagagtggatgagagatgaaaattaattttttagagaaattgcaaaggaagaaagacttggtaagaaaagggaactagctacctgaaggcatatggtaggcactcatacatgtggaatggatgaataagtaactttgaaatttcacctgtgggctaataaatgatggtgccattggtaggaataaacaaatgagcacagggtgttagttttggaaggaaagttagttgggttttagacacatggttcttgaggtgtggcatcctagtggcttatcaattactgaaccacagtttcagactgcagttgaaattgtaagtcttaagtgaggaaaacaaagagtagagagctctttcttggaaattatggttagaggaagaaaaagactaaggatgagacagaggaggcctgataagaggagcaggatggaaaatttcaaggacagcgtgtggtaaacaggcccaaatgctgcaaagaggccaaggagaccaatctacaccaaatgggacaacttgcttcacagcacttgcaaaatgccaaaatgttatacagaggtataratggagtggggaggtggaaaaggcatgagatttacagccacaagacctgggctcatgacacgtcctagtaatcccagctgctctggaggctgaggtaggagaattgtttgagcccaggagttcaaggctgcagtgagctatgattgtatcactgcaatatagcctgggtgacccattctctctctgtttttttttttttttaaaagacctaggctcagtcctagctccgccttttatgacatttgtgaccctgggccatcattacttaatgttctctgagtgtcagtctgctcatttataaaatgagaaagataatggctaccatatttgcatctaaaaggtattgtgaagttcacatgtaaaaatacaggtaaacaattgtgtttcccccgtaagtatctcaaaaggatctggcatacacaaggtttgtatatttgaacgaggtatgtgtattactgtgactacttatttgtgtttaaacagagaccagatgaagaagctgtggtggatcagggtgggaccagtacaattctcaacattcactatgaaaaagaagagctggaaggtaagaactgccatgctgtgtgatcagggaaattggtgaggggcagcctggtgtgggaagacctggctctgtgtcctaactctctcactagctgtcagaccttggggaaaatcacttgatttcctttagcctcactttcctcatctggtaaataaaagtggggatactaatacttgtcctaccttacagggatatcattaggatctaattgcctacatgggagatagtgctttgaacacggtgaagtccaatataaatattaacaagtaacctgttctttgagaatgtgatgtactcagttcagtgcgttaattcttgacaactgcctggaaatacaaataaatacaaaacttaaagagaaaataaaatacaaatagttttaaaaactcattttggctacaaaaccctatttttaccycatttccaatatttactgtttctattctatttatacccatttctgcctggtggtttcatctaaacaagagggaaaacaggaacacacctgtgacatactcttgagttcataacatcaaagttatataaaagcccagctgaaggggaaaggaaagaagaggcattttggatgacccactctgtccagtttaccttatttcagctcttcctttctctgcacctcacccccagctccccacataaccgttatgtggtgtcctgctttccttyttcccctggggactagttggtgtgttaggagttggacccacacctggccatggttttctaattagtgttgatgctcagtttcattagaggaaggctcatgtccagtatccaatatagctttaatgagaagccacatttggctcaaaagcctttgtgaaatctctgcagcatcccctgcaatgttgaaggctatgatacagcaactttctgatgcctgagacagcatgtgaaatgttctctctgtactgcctgttcccgtgacagttttttcatcaaagttgtacaacctccagagaaaacttgtccttttgatggggagaacggaagctgtagaggctgactcagcctctgggtctgttaccatgagaactgacgtgggtggctctgtggaggtcagtggtgtttgggtataccaaggtgaagttttccaagttattttgaccagatggaagaagagaacatgtgagttgcagcagttgggagggagtgggagaaggaaagggtgtggaatggaaggctaacatttgttgaatgccccttgtgtgttaggcattagattaggcaccttatacaagttgtccttttcatcttcatagcaccccaggcaggtaggtatcattatccctattttacacatgaggaaactgctcaaggtcatcgagcctaattgcaggtgaggctggggagagaatcctgctcttttcattctgccacacagcctgcaagagaggacagtaactgtcattaaccacccaacctcaatatcttgctccatcaaataaaatttttgtatgttgctcttgcctcttcttctgttctgataatcatgtggtctctctaccctctcattgcatcctgggggcatgttgctgtcagtttagttgttctatagcaagcaccactggacctttgccctcagcaaggaggtaaccatttatgaacactcttgtctacttgggagtagaataagaaacctgagcaagctctcttgaatcttaayaactggttccgtccacggagatcagctgagtaactggcggtgggagcagcttctccagatgacatcatctgttctttatgcatgttctactttgctaaaaaagaatgctgtctgtgatgacagccttactagtgcatagtgtgttgggagatggtcctttgtacatagacttttttgaaaactagaatcttatttatgttaacacttaaaaaaaaagcattacacgcaaatggtggacaaactagaaccagatctcaggcctgatgtggtttctagaccagctctggagaagagaagagagagttgggatttgctatagggttggctgtgctgtgggttccactcagactcactcygaagggyagccctaggactcaatgaggctgtactcagggtagtgttatctcttgaaggcatagaataaaacgagtaccattttgatggaacacagaagcaaattgtgttcagattcaatatgcatgccatgatatcaggttctgtggctgcaaaaaaaatctccaggtcttttttcccctttatgtcataacttctgcccacatgacataaactataaatcattgccttaccacattttatttatttatattaaacaacaacctctagtccaagaatatgagttttttgtttttgtttgattgttttttgaggcagtcttgctctgtcacacaggctggagtgcagtgacccagtcttagcccactgtagccttgacctcctgggctcaagtgatcctcccaccccagcctcccaagtagctggggctacaggcacgtgccaccatgcctggctatccttaccccattttaagaactatttctgagatttagtctgtgtacattgttagaaactttgtaagtgtgggtcttttgcataaattaattctatcagtaagagaagttgcattaagccattatgttgctttttttttaatatgtgagaagagtcaaaagccaacatcagaacacgttccaaagatgaactcaagaagagcaatagtccatgatgtgcttcagtggactttcccagtcccagaggaacaagaggcagttgctttagttagagggatggctttttccattttttcctggcagatcattattcctgattaactactagattaatgaactctggagtgagtttaaggccttctaatacgtttttaacagaggtaagagccatttggtcatatttataacttctaaaaaggcttacatctgctcgacatgtgagattcacctctgcagttattgactttgagttaacctgtaagcccagaggagccgagcaccctgttgtatgtgctaatgagctctgtgtgagtgctgggtaagcagtgtgcgtgtactgcattgtaccttagtaggcccaatctccatctgcagggtacgtcaaacctatggttcctgtcctgcttcacatgattcattgccagttcactaaagattgctctctgcatgtgtatatgtacttattttttaaactatagactaaaattacatctttcccayaatttttactaaattagaatactttatttgcacacagatagttccaaaagactaggtttgaccttttttggaaaaaagaatgacgagttagatgggaaaaaaatgggatttgtgcgagttggtaggtagaagacgggggcaaagagcggttgaatggccaacaaagtgaccacagaattagtttaatgaagtcactgggtggccagaatccagttagatggactggattttattggtgctatattcatttcctagtgtctgtttgtcatcttttctgccaatttttctcagaaaatccaaatccttgctttagaactcccagactagaaactgatgcctgattttctgacagcygcttggtccttcttagctctgaccccctgccgaacttgatttcatttctgcctgtctctctgatattttcaaaagacaggcattgcgattggctaatgttcgtgataattgattgtactaaagtaagatttaccttacttcctacagaaccattcaaggcatctataggatgtcttcaccattatgcctcaaacctacatagtgggaatttagataccaagcaaaaccatatattattcactcagcaaacatttactaagccccttctgtagtccctttctgcagtaataagtcaggacagtgagaacaattgaaccatcgtgtcttttctgaagaataacctagcctgaaactttcataggactcgaacattagaacctggactagccatcatctggacaagcctgggaagtcatttggtctggcctccttgttttactttaatagtgacagtgagtaatttaaaccaataacatgaaatctaataatgcagtttctaatatccaatcactgcctcctcaatttctcctttaaaattaaataatactagcagtataccagcatgagcccagtggaagtatttggaatgggctcaaggagcaaggagaagtagaggttctagcctggctagtaatcctttgcggggtttgtagggaagaggaaacccatggttgggatggctgtattgaagaactgaaagtcacctctcactgaggctgttcttaacctaagtccagctctatctagctgtactagattttacaacaccaggtcatcattttagaggccaaagtggttgtttagttttaaattttgttttgttttgttttgaggcagggtctcactctgtcgcccagactgagtgcagtagtgcgatcatggctcaccacagcctccacctcctgggctcaagtgacctcccacctcagcctcccaatagctgggactacaggcatgcaccaccatgcctggctaattttttattttttatagaggtggaatcttgctgtgttgctcaggctggtttcaaactactgaatgcaagtgatcctccttccttagcctcccagagtgttgagataacaggtgtgggccgctgtgcctggccagaagtggttgttcaggatcgaattatgctttttacagcacatagattcttcatgacctgcccctgcctgtttttctgtccttgtacatctcctttccttcccttttctaccctgccctggccctactggccatcyttttgccccagaaccagctctgcacattcccaccttaggacctgtgcacttgatcttcccccttcttggaatactcttctcccaggtcttctcatggcctctccttcttatcacttagatgtcccctctaatcatcttaaagtctcccttctccatcctaccccttaccctagacacgctagcattttaccttatttggttcatagtaataatcaatatttaaatgatatatttttgttttcatttctgaccccccccaagcagaatatgtgtcctgaagactttgttctgttcactattgtatccccagcccttgggacaggatctggcacaattacttgactctagtctgctgctaatgccacctgggttggtctcagtagtgtgctacagggatttcattaacatactataatggaacataatgagttarcaaattgtattttattaagatggtattcaatttagtattttcacgctatatgctttttatagtttatactgataatgtcagggtctggaatcccacatcttagcagatgacctcctctggctctatatttctgtttctatgaagttgcaagatgactacattatgttcagagatctgcctgttaaaaatgacctgagatatacacgaggcaacagagaactctcctgagacaggagggtaagaagtgcgattccaccagatactaaacattttatcctcctgcctcttaacattctagcagatctctgatcatcttatcctctaatccttactgtttgttttttattttgctttatcactttggaatttggaaaacagagagggcaaataaaaggagagacaaatagagaaaggtgttagaatggcatccaaggcactttaacctgacttggaagtggagggcactatcaaggaagttgagtgcagccttaggaaaccccattgctgggaaaagaagaagataaagagttggcaactcttcccaccaagtctccttctcggggaagtcttcctgatgaagctctccattctcaggtcagttaggactttatcaacctccccatgccctggtgagtactttatttgtcctaaacacattcactttggttacatgttctttttgtggcccctttcaggtcagagtcagaggccctcttaggtgagattatgtactcctgaggaggtcctaagggcttatgctcttcagggaggtacttaggaggtattttatttgctgaacatttatggaacaatgaccatgtgtgaaacactgtgcttgattatgtaggcattctgagagaaacgtctaacttgggacaccaaggagattgcaagagaagagtgcagaataagagagatagctgcttaactttaacgcaaaatagaaaaataagtacatgagaacagcactaaccaagggtgctgggaatctgcctgcctgcctgtctgtctgtctgtctatctatctgtctatctatctatctatctrtctatctatctatctatctagagatagggtctcattctgtcacccaggctggagtgcrgtggtaatgatcatagctcataagctcatgcagctttgaactcctgggctcaggcaatcctaccacttcagccttccaaatagctaggactataggtgcacaccaccacacctgtctaattttttttttttttacaccttttgtggagatgaggtctcactaagttgcccaagctggtctcaaactcctggccttaaacagtcttcctgccttggcctcccaaagtgttgggattacaggtttgagccactgtgcctggcctggcactgggaatttaaaggaatgaggcagcacatctgatgggggaaatcagaaaaaataccaagaaggaagatgcatctgcagtgcatcttgaataagtgagccaagccagtgtccagaaagcactggcacatttgtggaatggcagtttgattctggtagagaaaagagtatgaggtgatggtgggtacagcagtcaaggccatgaagaggagatggagtcaaaaccaggccatttggttgctgaggtacatggcagttatacatctctagatatttcccccccagaatgttgattctctgtgagcatgtgggatttccacttttttttttttttttttttgagtcagagtctcgctctgtcacccaggctggagtgcagtggcgcgatctctgctcactgcaacctccgccgcccaggttcatgccattctcctgcctcagcctcctaagtagctgggactacaggcacccaccaccatgcccagctaattttttgtattttttttagtggagacggggtttcaccatgttagccaggattgtcttgatctcctgaccttgtgatccgcctgcctcggcctcccaaagtgctgggactacaggcgtgagccaccacgtccggctgggatttccactttttatttctcttgaacttgttattcagttcttgagaggtctttcattttattttcccactgaatgtataattggtattaaaagaagaaaagattaaaaaggagattgagtactgagcatgaaggtcctgaattcatatgggtgagccatgatcagagmtgtaactaggaggatttgtttgcagggttaatttaatgtgagaggcaggaaggggcccctgctttgttaaagtgggagttttgatggccctaatctatagaaagtacggtgagggagaaagggaatggagttgaaaatctaaggtaacgctcggtttcaagcctaggaaattgagagaatgacaaggccatgaacagaaacatggaatgagtataagaccgatttgagatggaggatggtgagtttgctttgtgacatgttcaatcattgtagatagagatttgaaggtcatttgtagaagtgaattttgaaaacagaagagtgtttagcactaaaaaggaagaaaagggccaaggacagaaacttgaggagctttcctttggtggcttgttgggggatggagcagcacagtcagagtagtgcaagtgaaccaggggagggcagtggcaccggagctcagggagcccagagcacccaagtggtttggatactgcctgcaacgtggtgggctctcaagaaagtcttttgaactaagctgagagagatgtaagatgatagagatttggtgaatgagtggtgtggtgtccctaatgagggaagcttcagcagagactggggtcagaagccatatgcagaggctgtggaacaaggaagtggtgaggaaagggagttaggttgtgactgtttttggaagtggtttgataaagaaggaaagaggaaacagcagaagcttgggtgggtagcactgcttgggaaggtttctttttaagaagtcaggagaaacctatggcagggatggatggaaaggagagactgaggataacagaagcaacaggataccagaggggtgggagacaatgggatagagtcatactcattaacatacccagcttggcagaggagagcaagccagactgaggaagagaagaacttcttccatctcttctcaggaaaaactgaagtgagggctgggtgcagtgattcacacctgtaatcccagtactttgggaggccaaggcaggagaatcgcttgagctcaggagtttgaaacaagcctgggcaacatggcaggacttgtctctactaaaaatcaaaaaaattagctgggcgtggtggtacacgcctgtggtcccagctacatgggaggatcacttgaacttgggaattcaaggctaccatgagtggtgatcataacaccacactccagcctgggcaacagagtgagaccctatctaaaaaagaaaggaaaaaaaaaaaaactgatgcaaagtcacctgctctcagcaggaaggaatgtggataaggttgtggatttgaagacagtggctaaggattagaacagctcctttggtggaagatgtggggaatgggtctgagatctagagtgctgagcagcagtaaccaggcagaaatgggagaagaccaaggcatggtgcattgggcatgggagcatcagcagccccaaattctgggctccaggtttggcaggaaggcaagggaaagccaggtagaggtgacagagatctggaaatctggatcaaaacaaaagcaggcttatagaaggaatgaggccagatgtggtgactcatgcctgtaaacccagtgctttcgaggtggagacagtaggattgcttggggcaatcagcttgggcaacgtggcgagaccccatctctacaaaaaattgaaaaattagctgggtgtggtggtgcacacatgtattcctagctacttgggagactgaggtgggaggattgcttgagcccaggagttcaaggctacagtaagatatgaccaggctactgccctctagcctgggtgacagagtgagatactgtctcaagaagaaaaagaagaaataggagcagaggaactagggagggaacactattgggtcacttattttctcatgttcccctctctttgtacagtatttaatgtctttttttaaccttagcctcaccctcctcatgacttacaactagtctcttttagtactgttctagattgtgtatgctacaatgtagaaaataaaataatggaagctgatcctaggatgaatacatcctaggctgctacaatttattccaggcatgtgttaagcattttgcatgcataaccttatttactgcttatgaaaactctgagtttaaatactaagcttttaatatttcttcttaaagatgagtcacagagagattagataaattgttcaaggtcacatggcaagtgaatgatggaattgagttttggacccaggtgggctgatttgagccttacctgtgctcttaacgacttttctaaactgcctccctgccaagacctgccacacttgtcatagagcaactgtattgccttttaaaaaaatcactcagtcaaattgtcattgtcattgtcataacaataacatctgaatcagcctttacagtttggaaatcacattatttctttcagtcttcacaagatccctgtgaagtttgcaggcatgtgcaggacaaaggaagagaccttcaactccaaaatctctatatctttactcctggaagtctttgaagttttgttgttccagagctgtgaccagaccaaagaactgtgatatttttttctcttaactatgctaggctttttgttgttgttgttttttaaaactaaaggagttctctccacagaccttctgcttctttccaggtcacagaactctgtatgtgggagttcggatgccgcttggccggcagagccatcggcatcaccgcactcatggccagaagcaccggagacgagggcggggcaaaggagccagccagggggaggaaggcctggaagccctggcccacggtaagggccttgggagacagggcgggtgtccatggcccaggggaatggggaggctgaggggacatgtgactgacattagcagctggtcttgattcttgagcctttttgtaggatttccaaagcttgcttctaagaagaaatgcctctaagagtcaaaaatattttcgtgaaaacttcacagttccgggcggctgggactacaggcgcccgccaccacgccgggctaattttttgtatttttggtagagaccgggtttcactgtgttagcctggacggtctggatctcctgaccttgtgatccggtctcgatatcctgacctcgtgatccgcctgccttgacctcccaaggtactgggattgcaggcgtgagccaccgcacccggccactgtttttaaattttaaaatatacaattaaattgttatttactatagggttatttttatggtcataatacaaattatatgtgagtataaataaaattcatttctaaactcttaatattttttcaaaattgttatatatttttgtttgaacatgtggcctgtctgcctgcaaacacacagactttttgattcacatagagttaaatatatattagtctaaagacaaactttaggtgtaagaaaattatggaataagtgtgtgtgtgtgagtatgagtttgtacctattttcagaagaaaagaacaatatgggaatgaaaatcattttaataaggtggctactataaaaccaaaaacctaaaaactgaaagcaaatgtaaaaaaaaaaaagaaaagaaaacttcacagttctgaccccctaaaatcaatactataataggtaaaaccccttgctagagaattagccaatctttttgatcaaattcatcagttttccagtttctygtgggttttcttcaagtggtcttcattcataaatttttcctcccatgaaactacttctacagagtagctttttctctgagaataaagaaatctttttcttctgcattcgtggttgtctatatatatttctaaagttgttaggtaaggaagaatgctatttctgttctaagtgtgaggctagagcagacctttctctttggttgatttcctagacacaccatctcagcgtgttcagttcattcttggcaccgaggaagatgaagagcatgtgcctcatgagctgtttacagagctggatgagatctgtatgaaagagggagaagatgctgagtggaaggaaacagccaggtgaggccctaaaatggcctgcatcaagatctgcttgggtaggcaartgtgtacccttcagcaagtgacaggcctgcctgccttatttcttcttgggagaagctgtgactgacatggggactgacattccagtgtctcctgtggagaattttggtgttggcatctttatgatgtctttggtgttacctrtgccagttgacctggagcatgggattggygaaataacatgggatattcaggggggcccctctcatttgtttggggctcagagtaagtttatgggctatcttggtattattataggtctgacttagaagatgtagacagggccaccttggtggggacctagtttagcagacatagcataggtccagacttcttctgcaggtgaaccacagggttcaaattcaccagcagtcacagagtttttgagactttaacttcctctgggacaattcaagctatctagagacccttgggattatatccagcctgactgtaggcttccggaagtggttgtagaataattatgcttctctgagactcaaatcccagaagagccctcaggataaccaaggacatgtctagggtcctctagtaactgaccagtgaaccttacggatgatgcctgagctttggggaaggagcgagatgggtaattagcaaagcatggcttcagctctcactgaaacagctcttgctgggtgcctgctgtattgtgaatgttatgggctgagagattcaaacaggccaattgacctggtaccaagtgaaaaggcaattagtcttttgttattccatcttggcaaacttctaaaggtcacacaggacaatgataaaaagaaaaatatcattttattaatgtggtttgtcagtgtatccaaatgatatagattaaatctatttttttaattgtacaggtaatgcatgctcattatagaaagtttaagaataaagataagcaaaaagaagaaaaaaattatctgtaattccacaactgcagggttaatgaggaatataatatttggtgtcttatacatgtatgtatttgacttttagaattttctttaaataagaatggaattaaactatactcaatcttgcagtgttctattacctgcttttttcacttatcaatgtaccctgaacatacagattagattttacaatgttcagtatgactatccagatatcttcctctgtggctcacatcgaagattctctcttaaaaattcctcattttctatctttggcatctagttatttgtaatgctttcaggtggctgaagtttgaagaagatgttgaagatgggggagaacgctggagcaagccttatgtggcaaccctttcattgcacagcctgtttgagctaaggagctgccttattaatggaacagtcctcctggatatgcatgcaaatagcatagaagaaatttcaggtaaggttggggaagggaaaacagagcaactttcttataaatttaagaagtgtgggaaaaaaggagtgtggcgtgacagaaagaatacagtgggttgtgtgtccttgggcaagccacaaccttcctggcctcaatgtccttggctgtgggaagggtttcaggctaataaacgactctacctacttcacaggtgtattatggtattcaaatgacatggtgttaagtttccatttgtctgtttattcagcaaatgttttattttgtatctgctatatacttgataatgtgctaggcatggggttatgaataaagttccytcgggtgcagtggctcacacctgtaatcccarcacttcgggatgccaaggtgggtggataacttgagctcaggagttccaggccagcctggtcaacatggtgaaaccctgtctctacaaaaaatacaaaaattagccaggcatggtggctcatacctgtagtcccaattattcaagaggctcaggcacgaggatcacttgagcctggcaggtcaaggctgcggtgagtcaagattgtgccactgcactccagcctaggtagcagagtgagtgtaggggtgggttgcccctacacacctgtgggtgtttctcataaggtgggacgagagatttggaaaagaaaaagacacagagacaaagtatagagaaagaaataaggggacccggggaaccagcgttcagcatatggaggakcccgccagcctctgagttcccttagtatttattgatcatcygtgggtgtttctcaaagagggggatgtgtcagggtcacaagacaattgtggggagagggtcagcagacaaacacgtgaacaaaggtctttgcatcayagacaatgtaaaggattaagtgctgtgcttttagatatgcatacacataaacatctcaatgctttacaaagcagtwttgctgcccrcaggtcccacctccagccctaaggcggtttttccctatctcagtagatggagcatacaatcgggttttataccgagacattccattgcccagggacaggcaggagacagatgccttcctcttgtctcaactgcaagaggcattccttcctcttttactaatcctcctcagcacagaccctttacgggtgtyrggctgggggacggtcaggtctttcccttcccacgaggccatatttcagactatcacatggggagaaaccttggacaatacctggctttcctaggcagaggtccctgcggccttccgcagtttttgtgtccctgggtacttgagattagggagtggtgatgactcttaaggagcatgctgccttcaagcatctgtttaacaaagcacatcttgcaccgcccttaatccatttaactctgagttgacacagcacacgtttcagagagcacggggttgggggtaaggttatagattaacagaatctcaaggcagaagaatttttcttagcacataacaaaatggagtctcctatgtctacttctttctacacagacacagtaacaatctgatctctcttgcttttccccacagtgagaccctgtctcttaaaaaaaaaaaaaaagtaaaagaaagaaacggttcctaccttcaaggagctcgccttcaagtgggggaaatagccatggaaataacaattaaaaaaagtgcaacgacagagacatgcttgataataattagagaaaggggcaactggaagttgtgtggaaaaaaggagtaaagagaattaaagactttaaaatatagcatctagggcagatattcaggaacttgagccaaagtgcccctacctcttcagtaagatgtgaaggggagatatctgattgttcttcctgatgtgattgagtgttaagttattatgtttggggcctgaatggagaaacacctggatgcatgggggagttttctcttgaattgrttctgtttggctggacaggttaagaaatatttctccaaatctttctctatttcaagtatccaagtcattctgtctctctgggatcataggaggacccaggggaggggtaagcactgatgggacattgggcccccctctttttcagggaggtaccccagaagtatcactytgactgcctgggaaaaatgaaattctcatgttcatcattggagtcacattttgctaacttttgactatttgtctgaaatcccatgaatgttccttaaaaggttgtttgttagggagaagaatccctgggagctattgaagctgtttaaaactctttgtaaacaacagcagtcacgggagagttttggacagggtaatgatcaatcagattttgcatattagaaagataatgatggcagcaatatggagggtgagttgatgggagaaatgcattargctattgcagtagttcargtgagatcacctgcactgtgggcagtgtcagtaagggatggataatttttcttctgataactttaagtgataagagagacaggaggtgatagatagagggagacatgaggtggatgttcttttttttcccccaagatgaagggtcctgaagcatgattataatatagggggaaggaaacaatgaatataaaggttaaaaatacagaaatatggctcttcagcttgaatattaaatagattttcctcatttatttcttctagtacttgaatagtcatgaatagaattagaaattgaggataggttcagatttttgggaggcttttgaagaagtgcataggactgaagtaaaagtgctatgattcttcacatcaggtacctaatatgttcataatattttagggatactgataggtaaagtgcctaaaaggaaatcagcactgtatatcatctcatttaatttcctgtaacaaccttttaacagataatatgagctccatgttacagatgaagaactgaggtatagagagattatataccttgctcaagatcacacagctaaaaagtggtagaacagggaaacaatgtgggcctttaactccagaactcatactgataactgctatgtttactgccacttaacactaggtattgagatttttttcctcctcaaatctgttgggcttgataggtttaaatgtgatgcttggtggtaattgtctggggtgagtggttagttaacttaatttttcttatagatttctcttctaaatagccctttggagttctacagttatagttcttcttgacaattacagcaatgttaaaatcttggaggaaggraatgtaggggaaatttggcagatgacagaacaaagcaggtaataatgtgagctttcaaattatacagtcctcaatttgaatcccagctgtgcaaactgctagatgtaagaccttggagaattttctagcatttgggccttaatttcctcatttgtaaaaattgttgtactagtgctcaatagtttctatgcccaataagaataatttgttacatgaataaagtataacttttcacagtcactatcatcaaatggcactttcagacaggaagctgaaattgcacctcaatgaccctagtggagctgcttccccctactccatgccctttaccccactccacctgatgttggccttcttgggttcattaaccctcaatctgagtgttcatgtgagtgcctrctttccagacctgatcctggatcagcaagaactgtccagtgacctgaatgacagcatgagggttaaagtgcgggaagcccttctcaaaaagcatcatcatcagaatgaaaagaagagaaacaacctcattcccattgttcgctcctttgctgaggttggcaagaagcagtctgatcctcatttgatggataaacatggtaagattattaggtgatttttctctctttattaataagacattgggaactagttggagatgctgacttactaggggtgggggctgtatttgtctaatatgtttccatgtccacttaggcacttagtactttttggagactggtaagattggtggctgggactggtgctcatctctctctcacggcattcctcagataggtctcagcggacccaaggtgagggacttatgccccagggtggcctcagaactgatgtagcttttgagagatagccacattggggacaatttgagacccgagaaggtaaactggagctttttaggagcaaacaaatatcttagattagggaggcaaaatacagtagagtaggctctggagtcagacttgtaggcttgtgattgtggctttaccactcacaaaatgtatgactttgggcactctactaagcctctttaagtctcactttcttacctataaagtaagagtaataataggacctactccacctactccatttattgtgaacttcaatgagttaatccatgtgaggcccttagccagatgcatggtggattataatcactcagaattttggctactgattggttccttttcctgtggccaggaagggtctcatctacatttatttcctggtctctactcatagtgaatcaccatgtgcaggggatatgcctgggaatctatatttttgaaaagttttccataggggtctctcatatgcatgtctggtgaaggattactgccttaatagagaaataaaagagggtcataaatgtgttcagaaagaaggtgcagaagtagcaagagctctgtcctttccttaccactaactagtagataaggagaaagatgtgtgtgggtcttgacttcgtagtcatcttaacctcttttctagataggctttgcaggagaaggcagaaccaactgatgatgggtgggatgtgtcagaaggggaaaagggcagggactcaggattttgttttattttctccaaataggtcaaaccgtgtctcctcagtctgttccaactacaaatcttgaagtaaaaaatggagtgaattgtgaacatagtcctgtggatttaagcaaggtgagcagagtggtgggaagttggcttcaaggcctaaggttccttttagtggaatccagagtttaattgctggaatytgggtaaggtttagtgtttcaagactctttccctaagactagagccctttctgcataaaagggggcccatctctgcatgtcttttcccttctccttcagcctggatgaagctgactcaacagtttctttctccagattcaacatactgaaaactgggactagctgcttagaatcttccctaaaacagatctcttgatttttcaattatttttttggtacctgctctccagcagttccttctcacccccaggggttttgccaaaacaatattttggatatctatttagagacagatgtctcctaaaactaactcttggttgaagctctccttgaggactgtgactttggtatctgaggccttctgtagcagcagtgtctcactgcagcttatggtccaagccttggtctccctgcctccagcctctccttgctctggtctatctttgacactgtgtttctaaaacacagatagtgtcatatcacttcctctgctcataaggcttcccattttatttggaaaacctgaaacccccgacaaaacatttgagtgtttaaaaagggaaagaatgtgacccagagcttcagaaacatttctcttggaggaagcttgggggaatgggattgaaatcagaatacctgattttaaaatccgaacctataccttaaaagctctgtggtccygggcaagtcaacttcacctctctgggtttcagatacttcattttttttttttctttaagtgggacgaatacaatctgtcatatcctccttctggggtttttgtaaggatcaaataaaataagaaaacatttgctaaccataaaatgacatatgagtgtaagatatattttaggtgatggggccaggtgcagtggctaacgcctgtaatctcagcacttttggaggctgaggcgggtggatcacatgaggccaggagtttgagactagactggcgaaaatggcaagaccccatctctactaaaaatacagaaaaattagctggacatggtggtgcatgcctgtaattccagctactagggagcctgaaacacaagaattgcttgaacctggcagcagagagctgtgagctgagattgcgccactgcactccagagtgggtgatgtagtgagactctgtctcaaaaaaaagtaaataaaaaatttaaaaacgatatttaaggtggtggttcccaagttgtcagatgtttcttttggactttcaggtagacyttcatttcatgaaaaaaattcctactggggccgaggcctccaatgtcctggttggagaggtggatattttggmccgtcccattgttgcctttgtgaggctgtctccagctgttcttctctcaggcytaacagaagtgccaatcccaacaaggtaaaggcaaagataaaactcatgcattctatccaaaattcaaatttatgtagtgctggtagaaraaaccacttaatactgaaatttagaattaattaattttaggaatggtgtttacaattcagcagaaaagccagatgtgctggtgtgtgcctctaattccagctactagagaggctgaggtgggggattacttgagcccaggagtttgagcctgcagtgagctagaatcctaggatagcaccatggcaccccagtgtgggtgacagagtgagaccctgtctttttaaaaaaaaaatcagcagtaatctcagaaaattgaggtatatttgattaaccaccatgaagaggaattctgagatttatttctaaggctatgactgcacagtatctatagccttggaaatagagaattgaagaccattcaaaggacatagcaagggccaataacttgttaaaataggaagccaagtcttatcttctcagttctgtagagccatattccaggggaacgtctctgaataaaggtatttgtttccctttgcacaattctggcatggtttgtatggtttgcagatatgcaaacatttgttcaaaaggctattcatgcgctctgaaggtggtgatgctggtgattcagagccctgctacttacagagagtattcagatgtccagaacacatttagactcctctgtaaggcttgatcatttcaacttccttatccctctcctctccccatcattttctgattagaacaataagtggaattcagacaaccttgaatttgcaccacagtgccatgttttgaaaaagcatcttttctacagctaggaattgtgtctatggaaaccctaagaaatgtaatcacattattgaatgatgccgcacaatagcttccaatgcccatagtggagctattattaggtcaaggcaactcaaagtgctccttcattactgtcttcttttttttttttgaaggtacagtgatgatttatgtacgataagagagagaaatcttatactgtttagagaggactaatggcacttctttatatttacttacataatttcctcctctgtgtgttttgccagatttttgtttatcttattgggtccagtagggaaaggtcagcagtaccatgagattggcagatccatggccaccatcatgacagatgaggtatgtgcaacttttgcttcagtcttccatctcataaatatttattgaatatttactctgtgccaggcaatatgctagttattggggataaaatactttccattgcaatatctgctgggaagtagttcagggtacttctctgagagcccagtgtggaaggaccaagctctagaggatttttcttcctatgttatctctccttttttgagtaatcaagaatgcagagaaatctttttctggggaaactattattgccaagtaggatatatagagaaatatattaaggttggcttaactttcaagagaagatggttaattaaatacattcaagctatttacataaagaaacctcactcctgttccactaaatgagaccagtttgtataaggtcatgggtgtgacctcaggcagtgtagtgtgaatgtcttgactagtctgtaccaaaacaaccagatattttgacattttgacattgaacccacagtgcatactctggtaaggactgcactgctcggtaagctgcaaagtagggctttcaaggcatatgccttaggcggcagagggaggtgtggcctgttttttatcagctttctttgattgagaggcttaattcaggaaggaccttcattagtaattccatccagtgtttccracctttaagatcaagaaaatttccctctcaacgtgggaaagctgattaaaattttttttttcatatatcttgcctttccttccatcctttgtggagataacataattgtacaactttagactcatgtcttatctcttcttatactagcagacatgtatttagttcttttaatgcatctcatttccacgcttgttttttaaatccttttatccttgcacttctctaagtgctaaagttttctgcatctcagatccccrtgacagagataaaaatcaacaggttgtattcatttttcaccatatccattggtgattgtttcatgtaaagttacttttaactttcctgagggttttctcttctctgtagatttttcatgacgtagcatataaggcaaaagagcgagatgatctcctggcggggattgatgagttyctagaccaggtgacggtgctccctccaggagagtgggatccctccattagaattgagccacccaaaartgtcccttcccaggtaatgtatgcacatcagccaatgtggctattgtcacttactgactgcccaccatggacaaagcaaagaccatgtgggtatatgctaaatatatcaagatgcagctctgttttggtgcacctagaatatcaaaacaataataaaaatgaatctgggctgggtgtggtggctcacacctgtaatctcagcactttgggacgccgaggcaggtagatcacctgagrtcaggagtttgagamcagcctggccaacatggtgaaaccccatctctactaaaaatacaaaaattagctgggcgtggtggtgggtgcctataatcccagctacttgggaggctgaggcaggagaatcgcttgaacccgggaggcggaggatgtagtaagctgagatggtgycactgcattccagcttgggtgacagagcgagactccacctcaaaaaaaaaaaaaaaaagaatttgcatagcataaattggctcaggtgtgatggggtcagtcaggattacctgggaatgaattttaagccaaattttgaaggaataatgtgaaatagaagagagaagggagaacatttcttgtgactacattgtatacaagtcatcaaatgaaaaaagcaagttrtatagagagagcagatagaatgtctgatatttttctgacatattagagatgggaaaggaactcctactgtgtattagacagcagccaggtgctttatatatgcaaattcagccttcccaggaacatccctcaaaagatattgttatctctagttttacaaaatgaggaataaaactgtcttctagggcaagattttaaggtaaagtaagattacacagaggcagatatgaaactggaacttaggtcatatctaatgccaaagccccatttttctctttctaggcaaggcttagttaggagtcaggtactatggaacaggaagagaaattatggggtgtgtgtgtgtgtgtgtgtgtgtgtgtgtgtgtgtgtgtttcggtaaagtcaataaactgcatcaagtcagtaagtgtatttgaaagctacaaacacgggcatttttggttgcttttgggttatcccattcccactccctgctgatagcaggacgaaaagatagatgttacctttactaattttgtggtcttctgttaaaaggagaaaaggaaaatgcctggagttccaaatggaaatgtttgccacatagaacaggaaccacatgggggtcacagtgggccagaacttcagcgcactgggcggtaagtcctgggacgtttcacagcgatgctgcttattgggtagaagttatgcaaaggaatgaggcatcttctttctttcagcctacttctytgtggtgggaatttattggctgaagaatgacttttcaaatggaaccactgactagaagtattatgaatatatcaaatatcgtattcattcattcaagtttctcaaatcacctaccatgttttgtctcacctccagtccttcctaccattgttccctctgatttgaacactcttccctttcctcatctcctggctaactcctacgtacccttagtctcggttcttgtgtcacttcctttggaaagccttctaggactctctctggatgaggttaggtgttcctgctatgtaatatcacagtattgagctctgaccctcccttccccacattacagcctttatcatacttcattattattggttgatctattgtcttttctgctaggctgtttattccaaaagggcagaggctctattatattcctaggacccagcacagtgccctgaacagagtaggctctcaatgtctgccaaatgaatgaatatttttagaataatgtctgttctgtagcatggaatggactaggtatgataaatgttgagtgatcattttaggttaagaaactcccttagggtaggaagataggtactattttaggtgtgtgtgcctcagaataggcaatctactcttctaggccaacattttaaggacagatgtccaaggaggaggtaagtgagggaagcaggtccccagagtaggaggttttattccctaggtcagaaggtggtaaacgagaatgatattttgggttagtgtgatatccaggggtgtccccagagaaggttgagactatggctctgtctctgttaagctgtgctgtgtctaagaaggttctgctgggtagagattctcagggcaggactgagatcatggaaattagcttttatgtcctctaaccccttgctttcttcttttctgcctccttgcttgaggttgctttccttactcttctatcctcagcactctacccagtggaaactcagagttgttttggaattgtggaaagcattttatttttccaatcttggaaattcagggagaaaccaggagaggagacagaaacaggagagaatggcacttgactagcagtgtcctgcagagaagcatgttttctggtaggaagaatgtattggagggtaggggaagatagctgtgctctgggagggagcattggtggaaagaaggagtccttgcaatggaagggccactgaaaaggggaagcagccttccctttttaaaaaacattttcttyaaagttgggagagatctgaattgggtggggaggcctggtattgagaggcagttcaagggaagcatatgtcctcagaaggggttccaggattgagactgtcctagaggaggtggtaatttttttcaggaaaaggttttgagtatggatttgatatttcaaaattataatttatcttttggatataaagggtgtccacactttaggaacttagaatttgaaagtagtagaatttagggcaacaaggttttcctcaaaccaatatctgtgcagagatgagattttaggttgctctttgtgccaaagaaaacaaatagattagcatcccaggctttgtgagaggtggtcacttataatcaattccacctgagggtttgggagaccattatattggatctcaacagttataagatcttggtaatggtgtctratgtccccaagaaaatcccatattgccaggatcatcatattcttattcacaaaccgcaagtatcttaactcacaaattcaaatggagtttgaaggagttctcccataatgtcatgtcaggaacttctggaattgacaaagctaaaaggaagctctgggctcagagcttagctctgcttgatatgggagatgcttcctctttctgagcttctgtcatttttcttagagcccttagtaaagggcctcaagccatatgaccttcctcccattgtagccccttaggcaaggtgacataatggctgcatagagaatcacatttccaggccagctctggcctctttctcagtctcaaattatgtgggaggtaaatgtgagtcttttttgtatatggacatcctataagtttctgtactttcctggactgcacaaactaaaaccacattagtctgggttttataatttttcggactattagttgtgtttcttggagatgcaaaactgctttatgcttgtcatgttgcacaaccttggagcaagacttggataacatcttacggaatgttatccttgttggakggagaagtatttgaaggcagggtgaagtagactctaagaagatgggaaaggagacaaaattgaaatggtactctgagttctgtatgatctgaccctccaagccaggkttaagacagatcttaaacctccctgatattgactaaggcagggatgccataagtaacaaagaaggaaatatgactagagtgttcctaggccggaagctccacagcaaggagggtgctctggaaaggggtttttcagggtatatttctgtcccttattggggatgccacttttgggaagggttaatggaaaaaagaatcaggagctgctatctcgatgatccccccacacttcaaacaggtttcttccaaagtataccagacaaatggatggctggcctgtttctaaagccctccagggaagggctccttaagtcaatgctccagagcctagtgaccctctacgcgggtaagtcctctcttgcatcaaacttwaactcatatccctgtgtgcctcctgccccagaaaacttgaatgtgaagggcagtgttgaaagggaaaggaaatcccaagtacagaaagaagcatccatgcctgatgaatatctgttgtagatgtgcaatcatagtctgattttatgcatgaatgaggtatgaggctgactccataaagtgttcagaaattattttattaatttatagttataccatccatatgagcctcagatctttccccgccttttaataactgctagacwgacagatgtcttccctttctatggcttcttagaaatccatttcacataaatcttttgtctgttgctcacagacactcctgtcctcctgtgtctaggggctgagtattcattgcagcatctcaggtagcctcagagtatgtgtgtgtgtgtgtgtgtgtgtatgtgtgtatgtgtgtgtagggggtcactattatgcagggatattttctcacagaattatgctttccagaggaaggtgactggtaatgaagaggtaataatcgcatggtaataagatgctatgttagctaagaacccaggaatacttgagtcttgccccagataaattattgctgcctgcaaggttattgaggggctatttacctagaggagaaagcaagacaaagtgacactttattactaactgaagcattggtcccaaaccctgaagcagaattcatgatttaggctagaccatgtagatagcttctttacctgagctaggtttgccagataggctaaaactaaggcaggtcacaaggctggctttgcttctcttccctaagcccagacccagattatgatgttactgctgtaagctgaggaaaggtgaatcccaactatacccaccagaaccagaggaaaagagcaggtgggtgtctgtcctgtgtccacctggatacccattatactagctagatgagagagagtgttccaggagaaagagctggctggatcttctcccctagcatacagatcccaggcctcctcatactcctccaggcttctaggtgacagaaggaaagaaagagcttgccaagcctccttccgtgagagagtagcttgtgtgttttttaaaaatagctttttattatagaaaatttcaaacatataaaaaaaagggagaatagtttaatgaacccccatgtacccatcaactattaccaacattttgccaatcttgtttcatctatttcttctcacttaattttatttttatgttttctagattattttaaaccaaatcaccgacatacattttacctgtaaatacttcagtatgcatctctttaattaggacattaaaaaaattatcatgccattatcaaatctaacaaaattaacaatcattctttacattgtctaatgctcagttcttattaaactttttatgattgtgttagcaacatctttttagagttcatttgtttgacataggagtcaaagtttgcatttggttattatgttcccattctgtaatagtcccttttcctttttttctatgccatttattggtagaagaagccaggtgatttgtgctataaaatgccgagtggctctttttgttattcacctgacagccctcaccctggtgcagtgactccactcttagaaaaagtgattgaattgggaacacatctcctccttagggatattttggtcttggtctgtctcatctttgagaagaggagaggggccctgaagtcctgccaccaagtcctgttgattctacctcctgattagctcttgaatccatccacttctcatcctaatctatgctccattcattatactaccacagagtggtccttccagaatgtatgtttgattatgtcactcttctgtttatagttcttcagtaacttgacatgctattaggataaagttttaattccttaaaaccatttctggccgggtgtggtggctcatgcctgtaatcccagcactttgggaggccaaggcgagcagatcatgaggtcaggaggtcgagaccatcctggctaacacggtgaaaccccgactctactaaaactacaaaaaaattagccgggcatggtggcaggtgcctgcagtcccagctactcgggaggctgaggcaggagaatggtgtgaacccaggaggcggagcttgcagtgaccagagatggcgccactgcactccaacctgggcaacagagtgagactccgtctcaaaaaaatatataaaaataatgaataaaaccattttttaaggcctttttgacttagcttctccagccttgtctattggcattcacccttcacactgtattatccactcatatctctyagcaccttgatccaccaagcactctcacctctaagtgtcacccatgttggcccctctgcctcatctgcttaactcccagtccctgcctgaagtcatggctgaaatgcccctccctgctctatgccaccatagcaccctcacaatactgcctgtctcctgcactagacttggtcctggagagcagggctgttcatgtcttgctcattgccgcatctccagtacctggcacagtgcttggcaccaagtatctgctgctacttgtcaattgcatgaatgaattattatatacatttctcacaagtaaggggggtagttgttcagagtaagaaagtacatgtgataggggcttttttatctagaaaacatttaataaaactagtaattttaataccttaagttggttttgcacatttcctcctaacagctcagaatttaaagtctgaagctaatacttgctttcgtgttaatttttttgaactttttattgaatggataatacgcatatctaaattaattctttgtatgtttaggatattcattcaaatttacctaagtcatacccttggttgcaaagagactctctgctgacctaagagagttatctgtactggggtcaaactgaagccaaagtcttaccgctgaacagagcacatttgaaatgctttcaaatgtgtgctgtttacatgcttttagggaagacggactgtgttagaagcctgtctgttgtgtttccacaggctatttgggggcttggtgctggacatcaagcggaaggcsccctggtactggagcgactaccgagatgcactcagcttacagtgtttggcttcctttctgttcctgtactgtgcctgcatgtcacctgtcatcacctttgggggaytgcttggagaagccactgagggacgcatagtaaggacttttaaccacttctaatgatcccaaacaagacctaaaatattgtggcggcagccaggtccacygtgggggaaattacttggtctaggactgaagagattggatttttcctctgaattaccatggtcttctgacatcacaccaaagagcaacacagtcctctctttagaacagactcttctgcttgaacatcagcttcagtagctggttgcccagttgaattttctgttgcctcagtgatggaaaatggatatattgatgccatttcaaaataagatttaaaatgactctgtatgtgagcttgtagtgtgaatggtatcactgtgctttctgyatattttcaaatactgaattgagtcactgaagaataggagttagttaaggaatcatgtgtcaatggagctgggcacctgaattattaaagtagtatctgtttacaggagtattacatggtgtgtacacatcactcttgctaagatgaaatacaagcaaatggccatcaaggcacacaggagagcaaagtcaggaatgtagctaagccaacattactctgtactgatgggctatggactcagtgatgactttttttcctctcagagtgcaattgaatccttgtttggagcttccatgactgggattgcttattccttgtttgcgggacaggctctcaccatcctgggaagtactggaccagtgcttgtgtttgaaaagattttgttcaaattctgcaagtaagacatttgtttttctgaaaactctaaccagatttagtgattatgctgccaggattaaatgtcagggttctactcagtacagacaggcaatatcattttggattgtaagaaacctgaaaggagaccatcatttggtctgttgtcctgcccccgggtagcaccatacccaaaatagcagatctcctattgttaaagagcttgattaatattcctcagccattattgaagtcttgactttttatctttaaaaagactttccctagctaattcaaacttctccatttccattgtgagtcaatttttaatttggcctaatatcctccccctgctgtttttttttgttttgttttgtttttttgctattgatagtggggcacaagagtgctctggtttccctaattttcctatacaatcttttcttttttcctyttatatttcaagtagcagctcatgggactatggccagcccctttttttcttaactgcaagaataagatcataattacattaggtagtaatggcaggaatgtatatgagacaatttctttttttagttttcgtatccttgcgcatatcctgtgaggcaaatctgtatcataactgtgccagagcactatttagaagsaaaatacaatcagaattagggataaactgggttccagtgctygtttagatgaaatgaattaaccacatttctgactccttgtctcttaatgccatccatccatgcgttctgatgaactttggtcttgtttcagagactatgctctttcatacctctccctgcgagcttgtattggactgtggaccgctttcctgtgtattgtccttgtggcaactgatgccagttcccttgtctgctacattacccgtttcactgaagaagcatttgcctccctaatttgcattattttcatctatgaagcaatagaaaaactgattcacctggcagagacctaccccatccacatgcacagccagctggaccaccttagcctctattagtaagtgtgctttctgcttatttttaaaaattgagcaaagggcctgagtttaattgctgatgtagagtgctaggcagtgcttacagcttctggtcaagaagtgtcttgccctttaggaaacggatctcagatacagacaaggagtattggagggctgccagaggagaacaatcaaaagtgttgacagagaagatcgactagaagtgaaacacgaaggggactcaagaaatgctttccagaccatgtcttttggttctaggcactgaaacaaaaatgggctgcaaatgtagcagggagaatttgagttagttatggggaggaacttctttttgcaaggactttgtgagcctctggactatgttatcaagtgagagaatggactctgtcctttgttgaaatgaaggactctctttctctgaaagtatgtacaggcaactcttaggaattattaggtgaagatatattaatcattcctttcagatccagaagtgtctcacactgtatcataaagatccaggagcctacttacttcctagatttcaacttaagagattatgatttctttatgtgttcaatatggtttggatcacttggaaaagaaacacggtacctggctgtgttttcaaccatctaggacactctggtcctataaacatttcttctctggaatagtattctccaaattatgactaaagatcctcttcccttagctctgtacatcaagttctggctgtacagttctgatgtggaggatctggttgtgaaatgaacaacttcagtctgaaactgtctcagaagagagagtacactttctggaggcatctgcggaccagcgacagatacactttcatctattctagttattcactcattaaccttttaaaaatcagaattaataaaaaatttattagaactttattttactagaaagtaacaatgattagggagtatcatcttcaaagcctagtgaattggctcctattggcattagagttctcatttctgtaaggttgattctttgacctctttttatcattattttctttgtttaacaaatatttattgagcacctattatgtaccaagcaccattttaggccttggaaacgcagtggcaaacatgacaaaggatctgtctttatgaggcttatatctgagaagacaggcaaagtgaccagccccggattgagtagactttggttccagaaacaaattctttgttaataaagctcaagatgatatttttttttagttgcattctactgttatttcatatggtgctgatgtgaagctagaactccttaactctttaaatgattttatgttaatatgtatgtaattgatttttaaaaaatagagtttattttttaaagcagttttaggttcacagcaaagttgaacagcaagtacagagagttagcatataccccctaccccagcacacacacagtctcccccaatatcaatatcccacaccggagtggtaagtttgttacaatcagtgaacctacacagacacatcattgccacccaaagtccatagattacattagagttgactcttggtgttgtacattctatggattttgataaatgtataatgacatgtatcctccattataatatcatacagaatactttcacttccttaaaaatctcctgtgctctgccagttgctctctccctacccccaactcctaacaactactgacctttttatgtccttatagttttgaattttccagaatatcatagttggaatcatacagtacgtagccttttcagattggcttctttcactttgtaatatgcatttaaggtcctctgttttttcatggcttggtggttcatttcttcttagtactgaataatattccattgtctggatgtaccacagtttaattatttggaattgatttttttaaacctaagtatagggctttatagctttccctattacttttcgttttgtcaatttcttcctattattctaacctgtcgagagctttttgaattttaattcagtcatgccgtatcttagaaggcatgcttattaaattcacagaccatacaaagttagtggtgttggctgtgtcagttgaccatattgggagccaggtcaggcatgaagcatgctgggactgggaggcaacatggtggccaatggcacaggtgtggtctggtctggtctggtttggctggagtaggaggcctggggaagctaatggagtttctaggtctggctctaccatgagcggccagggaatggccaaggtagtggggtattaccaaagataactcagtgtcagaaagtgcttacatcacgattccaggagactctgacttttagaacaagagcatgacgaagggtatagagaataagatattcaggcttggaagaagttattgagaagtaagtgggatatcgagacctccttgctatgtagactaaatttcatagcaagagcctaagagatagaaatcgggcaaaaacaaaaacaaaaacaaaacaaaaacaaaaacaaaaaacaaaacaaccaatcaagactcattctgggcacatcagatgccaaatgtggttatcagcacagtttaatccaagacccatgggctgatttgagtcaaacttttgtaatgactgactgaaaaattagaatgtgatggggcctacagaggggcctcagctcctcaggtctgaagtatgcaaagaagcagcaaggcagctcctgacagcctttaaaccagttgttctaaaaacatttaactgagtatttggctgttttcctcaggaatctttttaatttttcccctcagctgcaggtgtactctgccagagaatccaaacaatcacaccctccagtactggaaggaccacaacatcgtgacagcagaagtccactgggctaacctgactgtcagtgtaagtctgggagctgccagatgtcctagcattgtgaccacaggtttaggagggacttctaagtgaaggggaggagtagccctttggccaaactctggcatttaccgaaataaagctttttaaaaaacaattcttactcactttcttttatcctttcagaatttttcttgtatgttaagggagaagattacccttctcttttctcccccctacatcctacccagtgaccctgcactaaggataggtggggatgaaaccatgcaggacagggggcagatccagacatgtagggttgaagaatgttcaagtttggaggtcctctgtgataagaaaaatataagttgccagggtccttccagagccttggaagtagtattgttcagaacagttctatgtcttaggaccataagtaaccaccctacttgaaagtggcctgtgcaagacagcaccccgcaactgcataaaggtcaaggggatgctgcttgcagcctctgctcccaacaaccatgggatgacaatgagtggtggactcagtaggaaacagctatttatttggttgtgtctgcctttcatcacccagaatgcttattcctccaggaatgccaggagatgcatggagagttcatgggatctgcgtgcggccatcatggaccctacactcctgatgtcctcttttggtcctgtattctctttttcaccaccttcatcctctcaagcaccttaaagacgtttaagacgagccgttatttcccaaccagagtaggtagcatgttcatgcatttctttcacgttagaatcaaatataacagaaccttttctcagccttcatgctgcttatggggttgattggccaggtggagaactccrgatgtcctgatgagccacactggcattctctcctagtgtctggcagcctctttcatagatctgtggttgggaatgaagggttaatacttaaaacctttttggtttacaagtgccagttaaggttaaggtggtagtgatggttttttaaaagttattaagtcttatttccagaatgctgttacgtttcatttccagaattctgagacacttaacacacaatagctacagctggctcctgaatacagtaaattgtcattgtgaccttggatactttaggggacccaaaaatcttctcccagggatggcttttttaatagcttatgaaatcactggcgacactgactgcagcaaccagcatgctcctgacttagtttgtatgactgtttgaaacctcagcaacctttccatgatgcagatagcattgtttgtattatgagcaaggcttttgccagttttggcagggcaagattagaggctgagtgtggagtagctacatgggccatttctttgaaagggaacttgagaaggtggagaatggctactgggacctcatcacagaaagttaacactgaaaagaataagtgcatgaattatttacatccttcagtcacatggaaacatctataataaatgaccattacatttgccatatcaaaaatataaaaggaaggtgggtgatctacagtgaccacaaagtttgtgccacagaagggccccctgaaggcctgggttacatgtacttttaccacagtataccaagctaaacctcaaacatacgaatcagtgagaagaagccacatacctttttaatttgccaaaaagttagaacagccagatatgaagaaatacattgtgtatttgtagtttatttaaagaatacactcatgctgggcgtggtggctcacacctgtaatcccagcactttgggaggcccaggcgggtggatcatctgaggtcaggagtttgataccagcctggccaacatgctgaaacccatctctactaaaaaaacaaaagttagttgggcatggtagcacatgcctgtaatcccagctactcgggaggctgaggcatgagaatcaattgaacccagaaggtggaggttgtagtgagctgtgattgcaccactgcactccagcctgggcgacagagtgagactctgtctcaaaaataaaaaagttaaaaaaaaaaagagcacagtcatttgatgccttctgatatagaactgagaagaaattcatattagtgatgatacactattgtagatagttttaataaatgtttaagkagaagataatataaaaaagggtgttcattttgctggcgagagatctaccatcagtacatcaaaaatggggatgtgctcccagtcctctattgggggataggtgctagtggccttcagagaaacctatttatgtggccagtggtgtggccttacctgcagtaaataaaaaaccttcttggtgtttcatatagaaaatcagccattgggcggggcattatttacggcatttttttttcattgcacacaataatttctgacctatacatgtataatacagcattttcttgtttttctttttcttttctttttttttttttttttctgagatggagtcttgctatgttccccaggctggagtgcgatggtacaatcttggctcaccacaacctctgcctcccgggttcaagtggttcttctgcctcagcctccaaagtagctgggattgcaggcacttaccatgcctggctaattttgtatttttagtagagacggggtttctccatgttggttaggctggtctcgaactcccaacctcaggtgatccgcctgcctcagcctcccaaagtgctgggattataggggtgagccaccatgcccaaccaatacagcattttccataaaatatatttttaatttaaatcatacaaaaattcataatatgattttgtgaatgtgtgtgaaagtgtgagacctttacatttcactacaaaacctgtgatggtttggtttttaaaggctaaacggttggtattaagcaagtaaatattttaatgaaactataactcaggaacagtttaaaatattagtttcccacttagatttcaaggcataaaaagggctgagtttatccctttaagtgctgtcaagaattcacttgggtttgtgatatttggtggtacaatgccaaatgcccacagcagcattatattgtactttgccaaaggtagacagaggaattctctatttctcagcagtcgtttccccaaaaagtataatgtttatttttagttaaaatagtcttgttttaccataccacatgatgactccctggaagttatcatgtgaagttccccaaattagtattttctcatctctgagctctttgcctgactccatttctacatttttcaggggccagaggctcatctctgccatttttccatgtatcgcctcctgatttgacttcactgattatctgctgtgactagcagtgttattttggatactttaagaatttcagatatggccaggcatggtggcttacatctgtaatcccagcattttaagggaggccgaggtaggtggatcaccggaggtcaggagtttgagaccagcctggctaacatggcaaaacgctttctctactaaaaatacaaaaattagctgggcatgggccgggcgcagtggctcacgcctgtaatcccagaacttgggaggccgagatgggcagatcacgaggtcaggagatcgagaccatcctggctaacatggtgaaaccctgtctctactaaaaatacaaaaaattagctgggcatggtggcgggcgcctctagtcccagctactcgggaggctgaggcaggagaatggcatgaacctgagaggcggaggttgcagtgagccaagatcgtgccactgcactccagcctgggggacagagcgaaactccgtctcaaaaaaaaaaaaaaaattagctgggcatgctggcaggtgcctgtaatcccatctactttggaggctgaggcaggagaatcacttgaactcgggaggtggaggttacagtgagccgagatcactctactgcactccagcctgggcaacagagcgagactccatcttaaaaaaaaaaaattwcagacgcaaagaaactttatatgatattataaaagacartcctttccattttggtttatttcagtattttagttgcaacctgggattaaattggagtttcaaatgtgatgaaaagtagaatgataacattctgtaattttcctactgctctgcaccaaattccagagtctctggagtttgtatttcaaattaytcagtcgaatgaaacaggatttattgctgtctgcttaacatatatttgtttggttgaaaggatttttccagaaactgtaggaaaatgaagcagaatcaactgggtgaaatatagyacaaacattggattaggatgtggtgaattgtgarcaatcaggattctggttgtgactggggcccctgtctcataggagcttaataccatgtgagccagggacgcagtgtccaaggcccatggcctggagacctggatgctggctgtggaccttgggcaagtccctcatcttccctgtgcctcacctcatctgcacaatgatgtgatgacacctgccatctctttccaattatgcttcaaggatgcagtgagatttgatatgatgacccaagagtagaaggtggtgtgccatggtgtgtcctagtttagcatgctccctgccttctcttctctgacattttattcaatttgggaacagatgggattggcaggaggggagctcatggtgtagtaatactctactaaagtgtgcctattggtattaccttctaatgttgagttggatttcctaaagcagcccactttgttactgaagttgctgactcctgtggaaatccccatactaagcagccttacaaaatccagtccccatagaataatgactccacacaggcgtcaaaaatggattgtcttcaattatgttacaaagcaaacacctttttgggggatggaggatgattgggtgtttggattgaaatgtagacaaaggggctgggtgcggtggctcatggctataatcccagcactttgggaggccaaggtgggtggattgcttgaagccaggagttccagaccagtctggccaacatggtgaaaccccatctctactaaaaatacaaaaattagctgggcgtggtggtgcatgactgtaatccccactactgggttgaggcacgagaattgcttgagcccaggaggtggaggttgcagtgagctgagatcgtgccactgcattccagcctgggcgacagagtgagacttggtctcaaaaaaaaaaaaaaaaagaaatgtggacaaatatagctagcaagtgtattttgagcaaaatacatattttataataaaattttataaataaactttgtaaaatcaatggtataaaatcaatatttaagattataggctatatgttacttaatttcattaaatagaaaaagaaattcagcccttctgatgcnnnnnnnnnnnnnnnnnnnnagggctgtttctacaaggccaagttttgtataaatggaatttttttttttttttttcagatggagtcttgctctgtcgcctggctggagtgcggtggtgtgatcttggctcactgcaacctccgcctcctcccgagtagctgggactacaggcacgcaccaccacagccagctaatttttgtatttttagtagagacggggtttccccatgttggccaggatggtctcaatctcttgacctcgtgatctgcctgcctcggcctcccaaaatgctgggattacaagcatgagcctggccaagtgctattctttatttcagattgagagttgggaaaaaytggagcaaataatggatttctttcttgcttaaaatgtatttatatgtatgtcttattatatacaaggcagatttccctggaataaaagtctagaatgtactkcttaattttacacatgtgtgcaggcaatattatctgtgagtgaaaagtggaataatacgtggattgggtcaactgattatcagcttgttaggagtcctctgtgtgagacatggtggtataattgtgaagttctcactgtatgtggatgttcatgtgaaagatagtactttcttcccgtaaatatcttttgatttccatttgtatggaatcccaatgaatgtatctttggaaaacataatgtgtcaaaatttgtattttgttcattgatctaaatgcccgtgtaactaatcagaaatccaatttggctcagattgggaattttcttttaaaggaaaaaaatttacagaaaagactactggaagaatcatgttcaaatgacatttcacatcaatgtttcttcaatattttggagttgacttggttgttttctcctacctacaatagaatgtgcctgctgtttctctgtcgctcactttgggcttgcaggaagtacaacgggaatagcctgagcttcttgctccctgtataatttattcactttacytgaactgccttacctgcagttcatagtgagaacacctgggcttgtaacttgcctccacttttaagtgtgatagggccaagttgctttacctctctgggcgtttttctttaaaacgaatgggttaaactagatgagctcagaagtcccttcctgccctaacattatcttctatttttattttcctgtggttactactattagggtcagacatgtgaaatgtgagggaccatttagagatttagatgttatatttttggattattacagagtatacacccaagtttaggacctgtgtcatttttagtgtccccaccccgtttctatttctgttccatttgtctttactttctttgtaatcatctcattttttttccactcttgaaactcacaactttccagtccatgagcaactttgctaccatccccctcaaaaacaaatctatttaaaacaccctcctagaaaagcctctgaaccaccttcagctaaatctgtaacgtttatagaatattttaaaatcttaattcagctagagttatgatccccaaacaagtgctgacgaagctatcacagaaatgatgtctttttcaccttgtargtatcattgttgctaaatcacatcagtacaggccttctgtggggagacagcagggggcaggggcaggactaggggatgggagtagataaaactgtgattctatcctttactttaggtaaaaaatcctaggttatgaaacaaggttctgggccaagcacagtggctcaggcctgtaatcccagcactttgggaagttgaggcgggcagatcgcttgarcccaggaatttgagaccagcctgggcaacatggcaaaaccctatctctacaaagtatatataaaaaaaaaaaattagccaggcgtggtggtgtgtgatagtagtcccagctactcaggaaggctgaggtggaaggatcacttgaggccagggaggtcaaagctgtagtgagctgtgatgatgttactgcactccagcctgggcaacagagtgacacctgctcaaaaacaaaacaaaaccaaaaaaaacaaagttctctactcttaagttggtatataagatgacctgcacagtgtcacagagatttcccactcagtaaatcactctgaaagagtttgcataagattctgtagatttgcagtatttaatgtggatagtcaatagctacatgtggcaaatggccacttgaaatttggcttgccaaattgagactgtactgtacacataaaatatataccagatcttgaaggattggtaccagaaaagaatataaaacgtttcatcaatattttatattgattacatactgaaatgacaatattttagatatatcgattaaataaaataataatttgataaatataattatttcacttatttttatattttttatgtggctactaaaaaatttaaaattagacataggggtaacgtacttctttgttttttgagacagagtctcactctgtcgcccaggctgagtacagtggcacaatctcggctcactccaacctccacctccttgggttcaagtgattctcctgcctcagcctcctgtgtagccgggattacaagtgtgcaccaccatgtctagctaatttttctatttttagtagtgacagagtttcaccgtgttggccaggctggtctcgaattcctgacctcaagtgatccacccacgtcagcctcccaaagtgctgggattacaggcgtgagccaccgtgcctggcctggctaatgtaattctattggacatgctactctacacttacatggtttggggtaggcagtgaaataccataggtagaaaaggtaattcagtgaagcatccaaatagacagaaacaacacaaatatttttgctggagtcaggagcactatgtggcacagaacacctcccagaaagcagaaaatttttctgcctgaaaaccaatgtatatgtaagaccccaagtaaaaaacaaaagcaaatgagccccaaactgtcttccctcagctttgcctgggagctgctatctttgcacttatttttctagcatcaggatattagccacatgagggagccaagcatatttgtctcattttaggcatcattcttttgtggttccccccaccccaggtattgttgagtctgtccaaagctgggtgagataccacacaagtcttgcttccctcagtgtgctgcttctctcggccttggtggaggctgagcctgttgccggtacccaccagcccagtaggttttgatgctgcctcctgaaagagattgtatttgtttcgttttgcactagtcacagttgttgtttaaactacatcaaatttggggggagaatatttgcctgtgatggaaagagagatagatgagttattgcttcaagtgttttaaaataaaagctattctcacacacaaaaaaaaaaaaagaaagaaaaagaaaagaaagggagctcaaatcaggaggaaatggtggtttttcctgtaagtgaggtttcagccagacacattttctttttctttttttcttttttctttttttttttaagtcagtagtggtttattaaatggttgtatcacatctggaaaacattattcaaaacatttattcagcrtacttcctgttcatattttagaagatgtaaagcaatgaaatttgctctaaataaatggcattttttttgccattatttggcatcttgccaggttactttttacatccaagttcaagtgatattttgttctcaaaataaaataattttcaaggtttggaagtataatgcgaaaattttaacagggattcttttttttttaattatactttaagttctagggtacatgtgcacaatgtgcaggtttgttacatatgtatacatgtgccatgttggtgtgctgcacccattacctcatcatttacattaggtatatctcctaatgttatccctccctgctccccccaccccacaacaggccccggtgtgtgatgttccccatcctgtgtccaagtgttctcattgttcagttcccacctatgagtgagaacatgcggtgtttggttttctgtccttgtgatagtttgctcagaatgatggtttccagcttcattcatgtccctacaaaggacatgaactcatccttttttatcagccaggcacattttcaatacagggtacataaatgggaggactcagttaattagatatttagtgtacacccatatatgactagaacacattcttagacttcagtgagcctacatggcagtcacgggaggtacatattaagtaagttctgggtctttgtttcctgctaggacaaatagttaacaagtggctgttctgtactgactacttgctcaggcctgggttaagtgctagggaggtgcaacagaaacttaaaagatagtatctgtcatcagataggaaggaaaaacacatgaaacaatcagatgctatatgcaaagtagtaaacagttggatgtcccctgggatgtacgtgccgtaggagttcagaggagaaaagggccactgggccccaggatggtcaagtgggcttcatgttggggatggggaggcagtggatactcagagaatttatattgcattcagagaagaactaacaaaaccatggaggaggaactggaaaccttgggcttcaaagcaaagtgaagtcaggctaaggtaccggtgatattacgtgtggctaagatatgttttgctctcactcttttggaagcttagattaaggcaggcacgggtcatttgccaggtactgtattttattaaagccacactataaagtgaggcagtccttttatgatggatcctaaattggatgggaatctccaacaaaatagagatatgtgccatggaggaaaataaagcagtaaagaagtacaggaagtgctggggtggagggaggtggccaattttaagtggtatcatcagagamgagctcaaagagaaggtgatatttgagttgaacctaaaagacgtgagggagctgcccaagaggttacctggaggaaaggcatgttaggtagaggcatgaacaagtacaaataccccgaggtgggagtgagcttggcatgtttaaggaaacagcaacgcrgtctgtgtgtttggagcagagtgggcaagcaggagagcaataagagctggggtgggagatgtgatgatgccaattgtgtggccctcataggccaagaaggccttttgaccagaagccatttcagggttttgatagaggagtgacatgacccaacttatgtttcaaataattactccagtgactgcatttaaaaaacactgcagggcaaaggcagaagcaagttaggaggctgctaccattacctgaacaggagctggtggtgacttggatctgggtgggagcagtggcggtggtaagaagtgatcagactcgggatatgttctgaagggagagccaataggacttgcaaatagactggctattgggtatgagggagaagtggagttgatgctgctgctgaggtttttggctagcactgaggaccttggctgatcccagaaaatccaagttctcagaactagagtcccaacctggccctaaatgtcccaaacagaactcttcagaggatggtctgggttatgttagcatttgtcagagggttcattctccctcatcatatccacactttatgagcatcagttgggcaattaacatattcctgttgtttaaatttgcttgcattaattcaactgtaagatgaaaacattcttctgaggatttttaagccttttacaatactaacctcttttctactgtatttaacctgccaaaacatgtgtccacttctttctcatgccaggtacgctccatggtgagtgactttgctgttttcctcactatcttcacaatggtgattattgattttttgattggagtcccatcaccaaagcttcaagttcccagtgtgttcaaggtaaacagatctcagagtacttggtgcactcatgtaatttcatacattctgatgccaagtaaatttcaaaggccttttcatatcctaatcctgagttttacagtcccctaaatctgaaccttgctcctcataccttgtcatttagaaaagcaaacttcagacttggttgaattcaagacagaaaagccagagaacagaaaaaccaaggttgtttaatgaatgaaaagtattattattattgttattaataccacttactgttcttaatatgttaatatttaaacaatggaatgtgcacatttacataaatatattcaagacactgtggaaacatgggtctctggaacaagcctcgttaacagcactttcattgagcatcagctgtataagggcactgggaagaatgaaaaaggtaaaggacttggcctgaaccttcaaggatggtgccccttccttgaagggggagaatggaactgagaggagcctcatcaggagtctagggcccctgccggagtaatcatgacatctctttcgaaatcatctcaatctgatttcattgtttgtataactctctctaatatatgrtatttttcaagaaactatacaaaaagtcaaacaaatgatcaatacatggggactccaaatagatttcagtttgggagcactgactaagtagacaaagaagatagaaaagctgagctcagttctatagagccccatagggtgaggggagagaaaatctgtgcgtactcagtgacttwagaagaattatgaaggaggaaagtgggagaagttggtgaggagaaggccgacaggaataaaggcagtccctgacttgyaaatgctcccttcagttgtccctttcctttctcttttttctctctacccatgaagtaggcctgttgaaataccttcttccatattgtctgaaaatttttaattttgttgaatttgctgaaatgccaccagttggaagtttatggactaaccaatccctcttgtaagtataataccttctagaatatggcattcttgcctttgtgtgaatgagcacaatcagctttctctctaatacctagctgagatcagtgctgcaggaggaatggattttgtctaaaaataggtaatatgggaacattaagyggtccttggaaaggttccaaagggataggcctaagatagtcagaaggcactgaatttctgggacatctgtgaagaacgcctctgggaggtaggacaggggagaaagggaaacgggagaatgtcaaagaaaatgttgctcatgacaggctccattttcaggaggcagagaagaagttttcttctttttgtctctccctattgtatcacatggcactcaactcccaagacccaatctgaaggctagtactattactaggggtatcacgtcattaagggtttatttaataagtttttgtgttggtctgagaacttaactaccacttagaacattgttgttagggaaacatagattctgtaaacttttagaagctaacccattcataattttggacttggtggtgttattaaagagtatttgaatcctagagtcatgactaataaggaaccaaatcaaatataacagtctgtgctttgtttcttgaatttgggtcaactctggtccagttggtatccctggccttttatcctctagcaccacttgccaaaaaagggcgaacttgtcttcctcagagtacactgcaggggtggggtaaggatctaggtgagtttagatatgttgtgaacaccccagtaagatttataaacagttgtattacaggggcattggagaggatcctaggtcaaacaaacccccaactttagccgtcttaggctccttctcaagtctctgatggctggacccctgtttcactattgatgggagaagccccttggagcaatccagtccattcaaagcccaagagattccatgcagatggctccactttgcctttatttatgctgtagacacacattatgtggctctggagagaagtcgtaggagaatagtctaagttayttatatttgtctttagaagtcattaaatttttttgacaacagatacagttgttaattatattttacttgggttaatgttgagatacacttgttttctctctacacagaggtttggaaagtaagtggaaggaagtgcaagattaatgaatatttcacaagaaattaataattgaagattgactgtttcaaaggggattcggaactattactgagcaaaaggggcttgctgcccaatgtgctagaagccaatactatgataccaggtttttgagagaagaaaagttttttatttcaagtttactaacaaggagacaggaattcagctcaaatctgtctccctgcactggctttactgcaataattagaaaatgtttagggggtggattctgggatagtaggttattggtagaaggaaaggggaggtctggaaagtcctcaggcattcatagttatctcttcatgctacctctgggtcccctgtgccaagggggtttcagcaagttgtttcttttcttatctaccatcctrcaaacccaagaatttctgttagtcattggtgtctttaactctttgggaaatggtttcagaacaaggtcatagatttcctaaggagttgctgtatttcatgccttttttttttttttttaagaacctcactcaagaataaaaagaaatatggatattgtgatccagtttgatatgttttaccccaatgactataacttaaaatacaaaaataatatattttcccccttagccaacaagggatgatcgcggatggattattaatcccattggccccaatccctggtggactgtgatagctgcaattatcccagctcttctctgtactatcttgatattcatggatcagcagatcacagccgtcattattaacaggaaggaacataagctcaaggtaaaaagaggttctgacctagaaggctgctgtggcaacctgttacattttcgtaaaattttagggtaagcacatctagaccagaaattgtagaatctcatagaagaggttcataaggggtttccattctttaataacaaagatttctttggagattagagtggaacatggttgtatggtatgaaagcaacgtggactccattactctcctctcacacctgtggggaaggtgattgggtagagttcctggtgatccctatatagctatatgctttgggtcaagcaactgtacagcttgtcttcctgaggttcaggtgggggcctgggccactgtttcctagaggcaggtattctcccactggtgtctgttactatagtttctaggccgaaactggaaccctaggatcctagggaagtaacagagcaggcaagcaatatccaaatctgtcaaggatctgggggtatgtggtaggaagccaataaggacacttacctctaactcccatagtttctaccatctagaatggtcaagatgtggcagggtgtctggttaatcttccagagaagaatggatctttgaatgtgtaagactcagagtcagctggaggcacttggaaaaataatcaatattggcatatataggacaggctaagattcccctttttcttctttgtttcctcctaaccaggaggggctacaagactcctcttggatccctgaaccccttccttcttatccatacaccccttcatgctttgggcctgagacccgtagctcactgttctatgccctactacagctagcctactgatggtgacaaagactctgtttccccacagaaaggctgtggctaccacctggacctactgatggtggccatcatgctgggtgtctgctccatcatgggcctgccctggtttgtagctgcaactgtcttgtccatcacacatgtgaacagcctcaagctagaatctgaatgctctgctcctggagaacagcccaagttcctgggcatccgagaacagagagtgacaggccttatgatctttgtgctgatgggctgctcagtcttcatgacggctatcttaaaggtaatcatcctttcagtcattcagcaaatatcaagggcctgatttgtgccaggaatcctgccaggtgctggaaatacagtggtgccaaatacttacaagtataaatccctgccctgaaagagtttattctagagggataagacagataacatgtagttaagaaaattagttaagaaacaaacatgataactacagaatgtgaatagtgatataaaggaaatacacagtgctttctggcactatagagaactgagaggggtctattttagtaggatggtcagagaaggcttctctgaggagatgctatttaagatgaggtggaggccaggcgcggtggctcacacctgtaatcccagcactttgggaggctgaggtgggtggatcatgaggttcggagatcgagaccatcctggctaacacagtgaaacctcgtctctactaaaaatacaaaaacaaaattagccgggtgtggtggcaggtgsctgtagtcccagctactcaggcaggaggctgaggcgggagaatggcgtgaacccaggaggcggagcttgcagtgagccgagatcatgccactgcactccagccagggcaacagagcgagactccatctcaaaaaaaaaaaaaaaaaaaaaagatgaggtggagccatgccatggatggtgggacatggcatggaaggaggggagaaaagcagtctagtcaggcccttaggtgggaaagagtgatatgtgttctacgaaatatcagggccatgtggctcatgggcattgagtcaagacaagagcacagtgcaatgagaaggaaagagaggcaggggcagatcatgtagggccttgtcgacagtgggcaaggtaacctttgaagggttttaacaggagagggacatgatccagctagtttaaaaagatcactctggctgaggtctagggaagaatagaagcagacagaccagtgaagctgttgcaggtgacagatgatggtggcttggataaggaagctggtagcagggacagataaaaacgcatggcttctgtatagcttggaggcagacccaaaggtctcaattgttgactggatgtggartgrggtgaggaaaatagaaaaatcgaagaaacctgttaggtttctgacttgaccatctggtggagtgtgatggcatttattaagatggaaaagattgtatgatttttgtgaggggtggggctgtgatcagatttggagtgagatgtctgggagtcatctaagtgaagaggctagaggagggttctggactaaaatataaatttgggtataaatttgggagtcaacagcacataggtggtattgaaagccgagggaatagatgagagaactcagggaaaagagacgacgtaaaagagaagtgggacataagagcagagttagaggttggatagaagaagaggtagcaacagagtctcagaaggagctgccagagaggtgggaggaaaactagggggatgtggtattagggaagccaagtaaggaaaatgtttcaagaaagagggattgggtagacacgtcttggaaaatgaagactaagctaaggccattggatttagcaacattggaggcctcaggttatctgacaagagcagagtcagtggattgcattagtttctgctgcctgtgggtgatttagaagtagaagcaaaagcagaagctgaccatgataaaaatcattttgttctgaaatgaaatgattacatgtaagttaaattacaggcctccatgtctggctcttcctccacccctgtctggggatgggcagacacacacacacacacacacacacacacacacacacacccctctttaacagaaatgatgccttttaaatcttccacaatctcaaaaatcttccaaatccttagggatttagtgcattttaacatggaacttttttactgaccagtgacttgaggcaggagttgggggtatcttatcagagaaggaattcagtggaactatagagtagaaatccaattataggtggctaaagagtgaataggagataaggaagtaaggactgcaggcaaatctttcaagaggtttttctgcgaagcaagatggaaaaatggcagtggctagtatgagaagtggggctaaaagagaggttttttttgttttgttttgtttttggtacagatagaggatactttgaacattaaaaaaatgttttgtgggtggaaggcctgcatctgggagattggggtgagaaggaaactttacggctgtattcccaggtgccagccattctggagcactgccttgtctcccttgcctcctcttcccttttttttggcaaatcttcaaccaccccagcctgtaccacaaatgcccttcaagggtgagaactgagagggatgggaaggatttctgaaccatcttcctgtcccctcactttccactcaaccttaccacccacctctcctgacacccctttcccacctcatattccctgtccccagcccaactcccactcccacctggttgaggcaccatctggaagagcctaaacgttgctgcttctccaagatagaaccatgaaggcgcggcagtggccatccctgggctttcccctagctgcttcaggacaattctcttaggacaactattcagtagttcacaaacaacatcgaattggaatgtctaatcactctacagctggaacataaaatccaatgggggattttctaattttttgttttttaaaattttactttaagttctgggatacatgtgcaaaacgtgcaggtttgttacctaggtatacatgtgccatggtggtttgctgcacctgtcaaccgatcatctaggttttaagccccacatgcattaggtatttgtcctaatgctctccctccccttgccccccaccccccaacaggccctggtgtgtgatgttcccctctctgtgtccatgtgttctcattgttcagctcccacttatgagtgagaacatgcagtgtttggttttctgttcatgtgttagtttggagggattttctaattccacaaattagatttgagaatatttatatagtcccaaaaaaactaaattatagtccaatttagttttcagctctgagactttccttgccttgattctataggcccaatttccctacctcagagtcaatctgaagattacctaggttgatagacatgaygtgatcagaaagtcatgttcaaatactgtgtggatgttcaagtgcagtataataatgtcggtgtttccccccagaccattacctctttgataagatacgtccccactcttgccctcaagccactggtcagtaaaaaaggaagcttttttggttcacgttaaaatacatcaaatccctgaggagatgattgtgagattacagaagatttaaaaggcattatttctataagagaggggtgcgtttgtgtgtgtgtgtgtgtgtgtttgtgtgtgtgtgtgtatgtgtgcccatccccatggaggaggaagagccagatgggtgagatgggaagtctaacttacatgtaatcatttcatttcagaaccaaatgatttttatcattgtcagcttctgcttttgcttctactcctaagtcacccacaggcagcagaaactaatgcaatgtgtctgcagctattttgtgactttgtttcattcttggagatttaaaagtgtatatagttttgagtgtgctatgataccaaatttaatttctggcctttcttgtccttttgtcttcagtttattccaatgccagtactctacggagttttcctttacatgggagtttcttcactacagggaattcaggtattgtatggttcagccagggcagtttcttctcactgcaagtttgcatgtcctgtccagggagggacagctccccaagagaagcacaaccagttcttgagaaaattgtttcctagtcttgccacttaggctattttagacatgtatttggatatagggagaaaaacagccrtgttggcaggagagtacagagacttccagggtggtctggcttgatgtcatggctccagttattcattaattattcaacagacaatttttttttggcatgtattaaacattagttgctttgccaggtgctagtaaacttggatctgaaaggttgatcaagaaccaaactggctttcactcatggacagatctaggttagtgccaggctaaagtataaaaatggggtgtttaactttgggagagggttcattggcagaagagataggggaatagtgggagttgctcctggtaaggagatgtcacttcttgttatactctgcatttttccatccatcaactattgctctaagtctttcaaaaagaaaaatcaggagcttgtcattgataacttgggtattccagataatataataacttaggctgattattctttgtttgaatggaatgtcctatggccattcttttttttctttttttttttttttcctatggccattcttacatactgagttctactatgaacttgggcaggttatttaatctctggttctcttttttccttattgtaaggatgatcattttttatatatctaggatgttatgaggttttattttatcttttcactataaataatcaatgaatggctccaaactcctaaaacaagtaagaaatttggttttgataataagcaaaaagatgtaattggtttattttgttttcaacaccccctgagaaagagctctcttaggagacacagygtgggataagagaaagaagtttgaacctagaattagaaaagatggattcaaattttgactttgccacttaataaccttggccaaattgcctggtcttttaaagtctcagtttccatttctgtccagaggaaatggtgttacctacctttcagagcaggtaatgtaagagatatgaattggtctaacaaagcttctgacccagaatgccctcctgaaaataaatgccagttccttcctttcagttctttgatcgtctaaagctctttgggatgccygcaaagcaccagccagatttcatctacctgcggcatgtgccgctgcgcaaagtgcacctcttcaccctcatccagttgacctgtctcgtcctgctctgggtcatcaaggcatctccagctgccattgttttcccaatgatggtgaggtggtttttaaaaaataaattcttattatcattgttattttttagtggtaaaatattataactttaaaatttaccatttttaagtgtacakttgagtggcattaagtacattcacattgctgtggagctattaccaccctccagctctggaactttttacatcttgcaaagctgaaactctgcacctattaaacactaaatttccattctcccataccctcagcccctggcaaccaccattctactttctgtctctatgtattgattattctaggtacgtcatataagtgaatcacagaatttgtccttttgtgactggctaatttcttttctttctttctttcttcttttttttttttttttttttttgagatggagtttcactcttgttacccaggctggagtgcaatggcatgatstcggctcactgtgacctccacctcccaggttcaagcgattctcctgcctcagcctccctaatagctgggattacaggtgcctgccaccacacccagctaattttttttgtattttttttagtagagacggggtttcactgtgttggccaggctggtctcaaacttctgacctcaggtgatccacccgtctcaacctcccaaagtgctgggattacagacatgagccactgcgcccagcttgtgactggctaatttcatttagcctaatgtcttcaaggttcatccatgttgtagcatgtgtcagaatttccttcctttttaagattgaatagtatcccactgtatgtaaatactacattttgtttatccattcacctgtcaatgatactgttgtaaatatgggtgtacaaatatctgtttgtgtctctgttttcagttctttggggtatatgccaggagtggaattgctggatcatatggaaattctatctttaatttttttctaatcctctagatccacaccctcctggtgggtttctcaattttgtcaggctacatataagggtttgtattcgtgtgttacgttcatgggttaaataaatagcagattactgggaactcctagaagggatcctatcaattccagatgtattaggaaagtagtcactaaattagagagaaatgtacttgaatttaataagcctgatttgcctcattccttgtccagtcaccaattatagctgatgaacagcagtccacccaggcaggattaattctttgttttcctttggctaaaatggccctcatggaaagaaagtggagcagcagttgagatgccctggacatacctttatcggggaaatcagctgtcagattttagrcgagtcactttctctctctgggcctcagtttcctcatttataaagcgagtgtcaggccaggccagagggcaaagacaaaaaccactagagacaaatgatgcaggcccaaagcaaggatttgggtaggggaatgtataggcaaaggatcagagggaataaagatgatcttctaagagaacccatcatcccactgtgaggaatgcttgggtggctgtggctggtcccaccatggcccagctccagcagaggctttctacccacctgctgtcctgtagccttcctgctgacccctagccatctgcagatgatgtgctcatcttttcaatgacagaatccagttagctgctctctaagttgtagagctgttatgatagttaaaatactgtatgtaacacatgttacctggcacaaagaaagcattcaataaatggtgactgttaggattattatgagtttgattttgcttgaaatgtcctagtctgctgtgaaaataaggctttgcttttaagtccaggaaggaaattagtccctttaattcacttttttttttaatttttcttcaggttttggccttggtctttgtcaggaaagtcatggatctctgtttctctaagcgagagctgagctggctagatgatctcatgcctgaaagcaaaaagaagaagttggatgatgccaaaaagaaggccaaggaggaagaggtcatagtccttgcaccaactgtatacctgggggcctcaaattacagaacataggaagggtcatgtgaaaagtcagcatgtctggaatcccgagggttatatttaggagctgggaagattacccccaaagatgttctcagctaagaatggattagggattcttgcttctgtctgttcttaatttttgggtttgacaaccacttattttttcctttgtttayaatctactcaccaggctcatacctacaatgtgaacatacagtatgcccttaytagcagattcaatggctcacattctttcaaaaggtctaatttgacaaatacataagacccattatttcctagaatgtttgtaatatatctaattgcaaatggtgctgtggttggcaccatgcaaagataacttgcataggactttctgtcttttttcatttccctcagcayttggcatcttgtcatctacacaatggaccctcaataaatkgcctatatgtgcaaagaaagaatgtgtagcaaatgaaaataccagaccmagaaatgagtgagctgggaagtgtttccaaatacagttagtgcctaaaatagtgtcctttgaaaaaacttttaaaagacttttttttaggccaggcatartgggttatccctgtaattccagggcttttgggagttgaagctggaggattacttgaggccagaagtttgagactagcctrggcaatatratgagaccctgtctctacaaaaaaaaaaagaaaagaaaagaaaaaaaatcaaaataattagctggatgtggtggcacatacctgtagtcagctacttgggaggctgaggtgggaggataccttgagcccaggaggttgaggctgcagtgagctgtgatcatgccactgcactccagcctaggctgagtgagatcctatctcaagaaaaaaaaaaaagatgacttttttttcccctaatatcttgaactttaaaaatcttgtatttctaaataagcttcaacaattataaaatataaagtcaatggaagaaaactttaaagagaatattgatagaattcactacataaaatgtgatgctttcaggcatccaaaactctaatcaaaattttaaaataacagataagttgagacatgttaatatccttactattcaaataattcttataaattaataagaataatatgaaattgaaatgagcaatggacatatataatttacgaaaaagaagtacaaatgaccagttgccttatgacaaaaatttcattctcactaataatcaaagaaatgattgtgcagcatctggattttatgaaatgaaaataaatattaaaaaataaaaaagaaatgaaaatttaagcaaggagaatacttttttacttgtcgaattggcaaagatttttaaaagataaaaacaagtgttggcaagactgtaattgaaattggcttctcatacactaaaaatagtaatataggctgggcgcggtggctcatgcctataatcccagcactttgggaggccgaggtggttggatcacctgaggtcaggaatttgggaccagccgggccaacatggtgaaaccctgtctctactaaaaatacaaaaattagctgggcgtggtggcaggcgcctataatctagctattccggaggctgaggcacaagaatcgcttgaacccatgaggcagaggttgcagtgagccgagattgtgccactccactccagcctgggcgacagagtgagactttgtctcaaaaaaaaaaaaaaaaaaggtaatataagttgcataaatctctttagagggcagtttaaccttagagtcttaaaaacgtatatgccctttggcccagcaactctaatttttaaatttatcctaaggatataattagcaatgtagacaaaatattttaatttgtggtgacataaagaaaaaaagaaaattagagtaaatgtattacaatggaatattgtacaacagtttaaaaaaatttttttttgagacagagtctcgctctgnnnnnnnnnnnnnnnnnnnnnnnnnnnnnnnnnnnnnnnnnnnnnnnnnnnnnnnnnnnnnnnnnnnnnnnnnnnnnnnnnnnnnnnnnnnnnnnnnnnnnnnnnnnnnnnnnnnnnnnnnnnnnnnnnnnnnnnnnnnnnnnnnnnnnnnnnnnnnnnnnnnnnnnnnnnnnnnnnnnnnnnnnnnnnnnnnnnnnnnnnnnnnnnnnnnnttacaggcgtgcagccaccgcgcccggtctaaaaataaagttttaaaaaatacttaatgatgataagtattttgtaatgatactcaatgatgtgtgctgtagtcccagctactcgggaggctgaggcaggaggatcgcttgaatctgggaggcggatattgcagtgagccgagataacaccactgcactccagcctgggtgacagagagagatcctgtctcaaaaaaaaaaaaaaaaaaaaagaggctggatgtggtggctcacgcctgtaatcccagcactttggaaggctgaggcaggcagatcacctgaggtcaggagtttgagacctgaccaacatggtaaaaccctgtctttactaaaaatacaaaaaagtagccaagtatgttggcgcatgcctataatcccagctactcaggaggctgagacaggagaatcacttgaacccgggaggcagaggttgtagtgagctgagatcatgccactgcactccagcctgggcgaaagaacaagactttgtctcaaaaaaataaaaataagaaagatatgtggacgtgtttctgacattttatgtgaaaaacatagggaatataaaatggagcatacagtaagactgtcaaagaatctcacttttactaaaacatatacatatacacataccgtacacacacacacgtgcatgtgtgcaccccccacacacgtgaaaaagattggaagaaaatacaccaaaatgtttattgtgttgctctatgtctctctagttggtaagattatacattttttgattaattttcttcctccatatttattgaatccttactctgttggtcactgttccagatacagtagtatacaggacacagacagtccctgaccgaccacatggagcttacattctcttggaggagacactgtcaacaagcaaacaagtctatatttgttttcttggttatagtgctataattctacacacacacacacacacacacacacacacacacgtatataattttaggtagtgatatgttttaagaaggtagggagtgagggagttactttatttaggatgattagagatgacttctgaggagacatctgagtagagacctgaatcaagtgagaagcaaattatgagaatatctgggagtaagaacattccagggcaggggtacagaaaatgcaaaggtcttgaggaggaatgagcttggtgtgtttgaggaacaccaagaaagccagtaagactggaagggacagagtggtagcagggagaccagctaggaggctggcagcagctcaggcaataggggagggtggcttatgctaaggtagaggtgatgaaagtggctgaattgggtacttattttgaagatagagctgacaggttttgctaatgatggtgggcatgggtgaaagaggaatcaagtatgactcttagatttttggactgaacaactgaatgaatggttgtgctatttattaagatggggaagaccaaggagaacagcaggtttaggaggaaaatcaagagatctcctttggatgttaagttcgaggtggctggtagacattatattccttattttccaaaattcctgaagtaagtacatatttgttaacacgtgttactttataaaattattttaaaagctaaatgaaataaaagaaaaaagtgaagactttttctccacctcatagccaacattcatgttcatttctttatgttgttttcaattttttaacatagttttcatataactatgataattatataattgtgagtttgtatttatatatatagcacatatatattctgatttttcccctcaacctgatttcataagacactttcatgtttctatttgtatcatgatattttttaaatggatgtataatgttctatagtattatctcatacttaatttaaatatttttcctttgttaaaatttttagttgttttatattactttgaacatctttgtacagatagttttttctctgtaattattttctttaaattagtgggattattttcttttctttttttttgagatggagtctcgctctttcgcccaggctggagtgcagtggcgctatctcggctcactgcaagctccgcctcccgggttcacgccattctcctgcctcagcctcccgagtagtcgggactacaggctctcgcccctgcgcctggctttttttttttttctttctttctttctttatttttattattattatactttaagttttagggtacatgtgcacaacgtgcaggtttgttacatatgtatacatgtgccatgttggcgtgctgcacccattaactcatcatttagcattaggtatatttttagtagagaccgggtttcacggtgatagccaggatggtctcgatctcctgacctcgtgatccgcccgcctcggcctcccaaagtgctgggattataggcgtgagccaccgtgcccggccagattattttctaagaaaacattttattatggatttctaaaaaaagttattttagattcagggcatgtgcaggtttgttacatgggtgtagtgagttatgctgagctttgggcttctaatgatcctgtcacccaagtagtgaacatagtaccccataggtagttttccaacccttcccctgtcttccgccttttggagtccccagtgttttttgttcccatctttgtgtccatgtgtacccaatgtttagcctccacttataaatgagaacatgcattatttggttttttgttcctgcgtcagttcacttagggtactggcctccagctgcatccatgttgctgcaaaggacatagttttgttctctttgtggctgcgtagtattccatggtgtatacatactacagtttctttattcaatccaccattgatgggcacctgggttgattccatttctttgctattgttaatagtgctgcaataaatatatgagtgcagatgtctttttgacagaacaatttattttcctttgggtatataccaagtaatgggattgttgggtctaatgctagttctatttttagttctttgagaaatctccaaactgctttccacaggggctgaactaatttgcattcccaccaacagtgtagaagtgttcacttttctccacaaccatgccaaagtctgttattttttgactttttaataatagtcgttctgactgatgtgaaatggagtctctttgtggttctgatttgcatctctgatgatgcatgatgttgaccagtttttaatatgtttgttgactgcttgtatgtcttcttttaagaagtgtctgttcatatcctttgccctttcgcttctatgcaccaataacacccaggctgagagtcaaaccaagaacacaatcctgactacagtagccataaagaaaatgaaatacctgggaatacacctaatcaaaaacatgaaagcactctctagagggagaactacaaaacattgctgaaagaaatcagagatgattctctgaaaaagaagtcagattagaaatgattctctgaaaaagaaatcatctctgatttctttcagcagtgtgttttttgtttgtttgtttgttttgagacagagtcttgctctgtcgccaaggctggagggcaatggcatgatttcagctcactacaacctcctgctcctgggttcgagcgattctcctacctcagcctcccgagtagctgggattacaggtacctgccatcacgcctgggctaatttttgtatttttagtagagacaaggttttgccatgttgaccagtctggtctcgaactcctgacctcaagtgatctgcctgccttggcctcccaaagtgctgggattaaggcatgagccactgtgcctgacctctttttttttttgagatggagtctcgctctgtcgcccaggctggagtgcagtggtgttaaaaactggtcaacatcatgcatcatcagacatgcaaatcagaaccacaaagagactccatttcacatcagtcagaattactattattaaaaaatcaaaaagtaacagacgttggcatggttgtggagtgcagtggtgtgatctcggccgactgcaacctctgcctcccaggttcaagcgattctcctgcctcagccttcctagtagctggaactacaggcatgcaccaccacgcccgactaatttttttttttttttttttgagatggagtctcgctctgtcgtcgcccaggctggagtgcagtggcgccatcttggctcactgcaagctctgcctcccaggttcacgccattctcctgcctcagcctcccgagtagctgggactacaggcgcccgccacctcgcccggctaattttttgtatttttagtagagacgggggtttcaccgtgttagccagggtggtctcgatctcctgacctcgtgatccgcccacctcagcctcccaaagtgctgggattacaggcctgagccaccgcacccagccagcctgacgtctttcagcagtgctttgtagtt

SEQ ID NO: 98051 - DNA, 30288 bp, Homo sapiens
  misc_feature (1)...(30288): n = A,T,C or G
gatcgcgccactgaactccagcctaggcaacaagagcaaaactccatctccaaaaaaaagaaaggaaaaacagggccaggtagccattgtggagagagcacacttaggaatcctgggatgttagtgttaaaagaaagctcctggagccagtgattctcaggtttgtcccagaacccttttttctaagccccatataaaaggtagattaaaaaaacaaagtagcatgagtgaaattgagagagggacaggtaatgcctttcagcccctaacttctaacaatctggaagcacaacgtgaaaatcacgtagcccaaccctatcattttcatattatgaaactgagtccaggtaagtgaatctgtccaaggtcacccagcaaggtatcagtagccctgagggtaaggactctgataaggctcgggagggtcctggaaagcctgaggcggcaggaagagtgtgcagagttgagcgtgtctggaaggctgatccactgctgggcccacatcaaagcccccatggggagcagacccgactgcacatggctcttttgctggaagaagagcatggctgcgcagaggactaaaatttcatctgggaaggcttcttttgactgtcagtagcaggatgtcaccagatgagggtgctatgggaccacagctgtctttgttcccattgcaactcaaccctgcgggaggccgcctgcatccctgagagccttctggagcctacagaggagacattggccagccaaaaggaaaggagtggccagggtacgacctggagtagggaagggaaaaagttcccggaaagaagagaattggatgagaggtctcggtggaaataaaggttttctggcattggtcaaggaaactcgcgttgtgttctcttacctgtgttgtcccttagctgaatcagttgatttgggctatgaagaaccacacacatctgaaaagttctgttacagccactgtctcatgtccccaaacattctctggccctaaatctagcttatgtattgtgtcaagcacgtggagacgtgagacgtcaaacgaggtcctgtccccgtggaactcacacgctaaatgtaagcaaatcatagcaagcctggagatgctccaagaggtgctggatgagttagaaggagcaattccttccacttagggaatcagataaggcctcacaaagatggcaatgtttgacctaagacctcggaagatgagtcctcagatgggaagggctcaataagcagagttgttacacaggcagcagcctggcaggagcaaagccacagaggacatgtggccccagtgggtctgagaaacccagaggacattggggtgagggagtgactggtgtagaagctggaagatcagagttacatcatgaatttcaggggccctaggcactttagccttcacggagctcttgctccattcaaaaaaaaattaatgttatgactatgttggtataaagatgaatgtaatccaggctgattggatttactttatttcttctggttttaaaagaagctaaaacatttctatgggccctgggcactgcacctgctgtgcctactgggtaactcagccccgtacaagagtgggttggggcccagttgagagaggctttggtaggtccggtaagccacagggagtcgtggagcctaaccctagccttattcttggttgcattaaatatccaaacgtggatcccagtatccctcatactgtctatggtatcacccaacagctccccagcctaatcatatgatgtagcccaaccaaggtgcccagctgtgtcaagaaggttccacctgcccccaaatagcatagcacttcccaggcacagtcagccaagagctactcgcagggagtgggagatgcagcaggagggagacacaggctgtgtctagagaggaggtctgggttcagggatgaggggaggactagggaagggaggtggtggagaagagggagaaggcactgatgggagtggtgggaaggctcaagaaactagctttggccaggcaccaatgtctgacaactgtaatcccagcactttcagaagccgaggcgggcagatcacttgaggtcaggagttcaagaccagcctggccaacatggcgaaacccagtctgtactaaaaatacaaaagttagccagacgtggtggcaggcgtctgtaatcccagctactcgggaggctgaggcacaagaatcgcttgagcctgggaggcagaggttgcagtgagctgagattgtgtttcagcctgggtgaccgagtgagactctgtctcaaaaaaacaaacaaacaaacaagaaactagcttcttcatggcattttccttagtcaagcctggcctggccctaacaacacccgtattcttccttaaaacccacccctctgaccactctcagctaacctaaggcccctacctcttaaaaccctgctgctagccctgtgctactatctcccggctctaggagtctctcactctagcattaaagagctaggcctctctggggatctgtttcccacatgaagagtactggggccattgccacaaatagctagatgtcccagaatttattcttatttttaattaccaaagtaatactgtgccagcctggccaacatatcgaaaccccgtctttactaaaaatacaaaaattagctgggcgtggtggtgggcacctgtaatcccagctactcgcaaggttgaggcaggagaatcgcttgaacctgggaggtggaggttgcagtgagccaagattgtgccactgcacttcagcctgggcaacacagagagactccattttgttttgttttgttttttttaaagtaatattgtggagaaaagtcaagtgatctagaaaagtgaggtttaaaaaagtgaaatttgctacttgggaggctcaggtgggaggattgctggagcccagaaagtcaaggctgcagtaatttgtgatcgtgccactgcacaccagcctgggtgacagagagagactctgtttcaaaaaaataataaagctatatagtattccatagcagggttaaacccaatttattcagtcttcctctactgatgaatacttagcttttttccaattttgcaacaagctttgtgacaaactatactgtaacccacaaccttgaacatttatttttctgcctgtttttttgttttgttttgttttgagactgggtcttgttttgtcacccaggctggagtgcagtgacacaatcatggctcactgcagcctcgacctcccatgctcaagggatcctcccacctcagcctcccaagtaatgggactacaggcatgcgccaccatgtttttttcatgttttgtagagacaaggtctcattatgttgcccaggctgataccaaacttctggcctcaagcagtcctcccgccttggcttcccaaattgctgagattacaaacatgagccaccatgcccgaccagtgtttatctcaaaagaattcattcctagaattggtatgcaatgtcagaagaaatgcaatgcctcaaaatttaagtcattgtctggctgggcgggtggctcatgcatgcaatcccagtacttggggaggctgaggtgggtgaatcacttgagctcaggagtttgagactagcttgggcaacatggtgaaacctcgtctctacaaaaaatacaaaaattagctgggcatggtggctggcacctgtagtcccagctacttgaggggctgaggtgggaggatcgcttgagcccagaagatggaggttgcagtgagttgagatcatgccactgcactctagcatgggcaacagaatgagaccctgtcttaaaaaaagaaaaaatttaagccattgtctatgcctaaccctaagagtaagatttttttttttttttttttgagatggagtcttgctctgttgcccaggctggagtgcagtggcacaatctcggctcactgcaacctccacctccagggttcaagcaactctccctgccacagcttcccaaggagctgggattacagctcccaagcacagggactacaccacaacgcctggctaatttttgtattttcagtagagacgggatttcaccatgttggccaggctggtctggaactcctgacctcaggtgatctggccctgctgtgatgtaaagaggtaaccttcaggaggccctcaagcctcctcttggactcctcatcctggggctagaggccagaggaagcagggaagcgggaggagaatgaccaaagaggccccgggttccctagcgcagctcacccctcttccctgagtgtgccagaatgctggagggcaggctggagagcaagctcttcaggttatctgagcatcaaagtgcaactcctctgaacagctctagacactgaaaaagtgactgtgcagattccttcaaagagcattttccaggtttctcccacccctgcagccatgaagcttggattctggagtgtttaggcaacaaaagccctgggtgggcaggtgatggtcctgcttctgtctaggttcctggcttctccctgcctaattccaaaccccatgcgttgctaccatgactgctgcacccacagtcctctgctctggagcctgcagtggctctgatcattttgtggccaacccaagggtcctctgcccacctcaaggcacattgcaactcttttctctctctatttatttatttatttatttatttatttatttatttatttatttattttgagacagagtcttgctctgtctccaggctggagtgcagcaacctccgcttcccaggttgaagcgattctcctgcctcagcctccagattagctgggactgcagaagcgcaccaccatgcccagctaatttttgtattttgtttttgtttttttttagatggagtctcgctctgtcgcccaggttggagtgcagtggcgcgatctcggctcactgcaagctccgcctcccgggctcacgccattctcctgcctgcgcctcccgaggagctgggactacaggcgcctgccaccacgcccagctaattttttgtatttttttagtagagacggggtttcactgtgttagccagagtagtctcaatctcctgacctcgtgatccgcccgcctccgactcccaaagtgctgggattacaggcatgagccaccgcgcccggccaatttttgtatttttagtagacggggtttcgccatgttggccaggatggtctcgatctcttgatcttgtgatccgcccgcctcagcctcccaaagtgctgggattacaggcgtaaaccaccgcgcccggccgcaactcccttctctctcctctacgaactgtgatgaacaaagcctttcatctcctgcaggaacctcggctcctaccctcgttctccctctgccctccaccctccatctaccctcatagccctcagactgtcttcacatcccaaggatcccctcctctaccctgcctcatattctcctctgggagccccttcttggctctccatctgagagggcccaagcctgtttctcagtactttcctcccccagaattatctccactgcatctatttggcttttgtgtctgcatttacacctatgcctgcatcctgggggcatgtgccatctccctctttgggcagagagagttgctgtgtcttccttgcccttgctaaccactcccccctcttccactatccccctggcctccagctgctagtgcacagggcaagtctctgcatttatggtgccactgaggacaacgagagagtgatggatgacaaggggtgctcccttagagaaaaaccagccctggttctccatcttatttctgaaaaagagtttgttggatgcttttcaattaaaagcagatgattaattcagccctggccttgttctgtctttgaataacagatacattagtttacttgaaaagaaatattttcatttgtatttccatgtcacttgtgattttccctgccttgcaccctcagccctgccagttggcaagaagacagtcagctttgctgctaagaggagtataaagagggcttggtccaagcaagaaggcagtggtctactccatcggcaacatgctgskccttymtggtaagtggatatggtccnkcaaccctggtcctttatggtaagtggatcatgtggcctgaggtctatagggagggggacttgggcaggaaggtcagcaaattttccctaagtccaggccagcaccctgtcccagggcaggtgggacgctctgcctgcagagcgtcctttactctcctggaggccaagatagaaaaggtcagggccactggctattcaggcccctctgggtggcagktccctgggccacaaagcagagagaagccccatctggtagtggggtgggtcyctgggcttccccaccacccccattgacaggaggacttcctcagcaggtgcctggctggggtgtgcactgcaggccctgaaccctggagaatcttgccaaagcattagggggctggtgggggtcaaagagtgggggggggtctcttcaggccaaagggtgatcttgagcaaagaggagaccacaaggagcctctggggcctagcctggtggtttgagagaggtccttcatagcatgccggagttctgggaacacctgggggaaacagaaggcacccaggcacccctgttttcaaaaggggctcagagaactcacagctgggcccctcattcgttagagaggaactgtgaatttgcagacaaggctaacattcctcaaagcacaatcgccaccccccacccctacccctggctgaccccatgcttagtcatcactcacttttcttctgccccacaaaggacacagcacccaggaccttccggaaaccaatgcccgcgtagtcggagggactgaggccgggaggaattcctggccctctcaggtgggtgttccttcccagccccagacttccacccaaataagagctcagtgcatgacataaggtatcatgtgtatttgtgcatgtccctatcaacaagcagctctccarttgtctaggttctcgattttaaagatggatgggatcaggcttaggtggttttctaaatgcaaaaggcttggaggaggggatttatacaccaaccacagtccctcttcaaggcacacacccaaacacaagatacatttatattctcagcgacagcacttgtgccacgcaagaaagactgggtgccagacagtcaccttggactccacataccttgaaactcacacgcacaccactccacactgtgtgtgtcacaatgcttgcacgcatgtgcgcgcacacacacacacacacacgtacagcatgctgcttagttggctatttagagtttccactttgctaacagggcagctgggccctgatttaagtgatctaaatatgtaaacctggcaaattaactgatgaagatccacactttgagaagatatcactgcaatcagagttttagcttataaaagtctgagccccagttttcaggagtagagctattacataacatgaggtgctagaagaagagacatgaactgataaaaacaaacatcctattggtatttttttttttttgagatggagttttgctctcattgcccaggctagagtgcaatggcatgatctcggctcactgcaaactctgcctcctgggttcaagcarttctcctgcgtcagcctcctgagtagctgggattacaggcgcctgtcaccatgcccagctaatttttgtatttttrgtagagacggggtttcaccatgttggccaggctggtctcraactcctgacctcaggtgatccacccgcctcagcctcccaaagtgctgggattacaggcatgagccacmgcgcctggcctcccattggtatttctaagtagtccctgaagtggggagacaggagatgtcttgaaaacactaaaggtacagctctggagacctaagcctgttgggcttaggtgatggagcaaatctttgcctatagttcctcttttttgggggaggagagggggcgatggagtctcgctctgtcaccaggctgcagtgcagtgacgctatctcagctcactgtaacctccacctcctgggttcaagcaattctcctgcctcagcctcctgagtagctgggactacaggtgcakgccaccacgcccgactaatttttgcatttttagtagagatggggtttcaccatgttggccaggatggtcttgatctcctgacctggtgatccacccgccttggcctcccaatgtgctaggatcacaggcgtgagccatggtgcctggcctatagttcctctttaagggagaacagaggtagaaggagttccaaaaaaggagttacaatgggttctaggtccattgcaacaacctagagagataatgccaaatacactgtgtgcctttactcctccatccatgtacacagcaaacatcaccaagcgatggagcatcccttcctgctggccccagaagcatctacacaccccttatcaatgccacactccaggtggccactaccaagcaatcagtagcaattggcaggtcagatgaaacctatttgccatctctagcctagaaagagaatgttttgaaggacagcaggactttaaggaggtgacatgtagtttgaggcaaagtcttttatatttaattatttttgacgttgtagaggcgaggtctcactatgttgcccaggctggtctccagctcctaggctcaactgatcctcctgcctcagccttccaaagttctgggattactggcatgagccactgcaaccgacctggggcaaaaccatttgagaaacaccaacctatcccttctttctttcctccccatctagatttccctccagtaccggtctggaggttcccggtatcacacctgtggagggacccttatcagacagaactgggtgrtgacagctgctcactgcgtggattagtaagaaaaacaaagamaagctttcctgggcccctggaaggggaaggggctgaccttctgaaagaggatataattttgccctctctggacagcacttcagggactgggcagtggctcctttcctgttcagggcctgcagggaggtagtatggtgaaagtacaaactttggagtcagggagactcaaattcaaatcttgctccaccaaattctagctatgtagccttgggcaactatgcccccattctcctatctctaaagtgggctaagaacatttactttgtagaaatgttgtgaggattgagtaaatatgtaagtgcctagtcaatgtctgactggtgactattttttcctatttgtcttgggcaatggttttcacatttgagcatgtgtcagaatcacctggaaggcacagattgctgggccccatccagcagagtttctaatttggtaggtccagggtgaggcctgataatttgcatttctaacaagtttccaggtgatgctcatgctgcggcccaggaaccacgctttaagaacaactagcctaaaagtctatgcttccttcaaaatcttggtggctgagagccattatttcatttatgcgcactacacctctcccagkttacaagatattcagcctatgatgttaaaccgagaaaatcaaagtgatggtagtttttttcacttccacaagttagtcaattagggaatgaaagagcttgttactttctcattttggagagtcttatatccctcctctgcctagaccagataagatgggttcctgtcctaaaataataaacaaaacctgggcacggtggctcacacctgtagtcccagctactagggaagctgcggtgggaggatcacttgagcctgggagtttgaagccagcctgggcaacacagcaaaaccccatctctaaaaaaaaaaaaaaatttcctaaataataatgattwaaaaaaaagatggtttttcaacttttctctaagtggggtagagaaggtttgagtcccctggatgactcagggattccttctctcacgccagccagaagactttccgcgtggtggctggagaccataacctgagccagaatgatggcactgagcagtacgtgagtgtgcagaagatcgtggtgcatccatactggaacagcgataacgtggctgccgggtaggagcaagtccaagctggccctgggctgggcggtgaggcctgactagccaacaactggctgccttcacctgttctttcagagggctagagggattgcatggcctgaaacctggtccgtggctcctggcctggcctttagttaaggagcccagctgagcctgagagaaggcaccatgtcctagagggagcaatgagctggctcattcgtccaggaggactttgagaatttaggttctgagccaggcacagtggctcatgcctataatcccaacactttgggaagccaaggcaggcggatcacctgaggtcaggagtttgagaccagcctgaccaatatggtgaaaccctgtctgtactaaaaatacaaaaaaaaaaaaattagccaggcatggtggcatgtgcctgtaatcgcttgattacaggagaatcacttgaacccaggaggaagagggtgcagtgagctgagatcgcgccactgcactccagcctgggtgacagagtgagactctgtctcataagaaaaagagaactgacgttctggagggcttgagagtctttgaagacctttaggatttgttggatccaggctggtttgcacagtggattaccattctctgcagattttaatgttctgtttctatggggggttttatcattatttattattcacattatagaatagactccatcagcaaaagtaaatttcctaaagtgaatcttacacgggaaaattgcaagttgagttgtaaacttctggaaaataaataattaaaacggtggtcaattctatagcatgtgsaggtgggggtgggttcaaggaattgggatattctactgagcttgtagagccactcagccttttacatttttcttgtttgagaactctgccaccaagatcatgccactctgctcctttcagattcccccattctctacttcccggggttgcaaaggtcagagctaggctgcaataccaatgtcccaccagcagatgctgctgttaaacatagaatgtttacatgttaaattgtaattgctctagtttgaggcttagcaagtgagccccgtccttcttcaaagtcgtcactttccaattccacggggatacaaatgcttagagagggccagtgtatatgctgacctcagggaagagctgatcccatgagtgagcagtctccttttctcctgcagctatgacatcgccctgctgcgcctggcccagagcgttaccctcaatagctatgtccagctgggtgttctgccccaggagggagccatcctggctaacaacagtccctgctacatcacaggctggggcaagaccaagagtaagwtgcctacattggcacaatccaccacggggatcttgattaggtagctgagcttctaagacacctttttctgtggtcctaggtgcttatggccagagaccaggagctaaaagaaccatagatacaataactgatgcattatatcaagctaagaatgggctgtgaagtagttgacagattcatggactcttagaacaaaaaaagactttatcagagaattttttttaccagcccctcatttttaaaatttatttatttatttagagacagggttttgctctgtcacccaggctgcaacctccacttcctgggctcaagtgatcctcccacctcagcctcctgagtagctgagactataggcatgtaccaccacactcagctaatttttaaatttttttgtagagatgggatctcrctatattgcctaggctggcctcgaactcctgagcttaagaaatcctcccaccttggcctcccaaagtgctgggattacaggcatgtgccactgcagccagccagcccttcattttatacatgaggaaaccaaggtccagagaaattaargatccttagctgagtgtggtggcatgagtctgtagtcccaggtactcaggaggctgaggaaggaggatcgcttaagcctgaccaacatggagaaaccccatctctactaaaaatacaaaattagccaggcatggtggtgcatgcctttaatcccagctactcggcaggctgaggcaggagaatctcttgaacctgggaggcggaggttgtggtgagccgagattgctccattgcactccagcctgggcaacaagagtgaaactccatctcaaaaaaaaaaaaaaaaaagaaagaaagaaatggaaacaagcatgcacaatcccatttctgctccatggagcttgcaggagcaaacagaacagacagataaatcatccacaaataaggccattccatggtgcaactaagttatccacgagtgaaaagaagcaggagtagggttggtggcttggagcctaggtacagtaagcaaggctgcctccctgagggaagggtcctgtgcggccatakaaagagagaagacagaggatccaccacatgcaacagggagagagaaggagtttgccctgagctcagctttcacgagagtttgggaaggtgtggcaggggtggaaggtttttctgctggaccacatctggagctgactgccaatgccgtgtgtcctgttcagccaatgggcagctggcccagaccctgcagcaggcttacctgccctctgtggactacgccatctgctccagctcctcctactggggctccactgtgaagaacaccatggtgtgtgctggtggagatggagttcgctctggatgccaggtgaacatttgcagggggtcccaccccaggtcccgccactctctgcctatccctccacccctcttcctcacctccctattcgacacttactcttagtcctacacagactcaattttctactctggcgtctaagtgagaatgatcctgtgctggtaattctacacatgcagaaactcaaagttgaaaggaaccttaaaattgatcttgctcgatgccctcacttcaaagtttgtacgtggcccaacatttatatgttgttgttggtatatgtgtgtgttcttagaatttgttacctagattttttttttgagatggagttttgctcttgttgcccagactggagtgcaatgggacgatctcggctcactgcaacctccgcctctgggttcaagcaattctcctgcctcagcctcccaagtagctgggattacaggcatgcaccaccacgcccggctaattttttgtatttttagtagagacagggtttctccatgttgctcaggctgatctcgaactcccgacctcaggtgatccacccgccttggcctcccaaagtgctgggactacaggcgtgagccaccatgcccagccaaatttgttacctagattttttaatggcagygatgcagctgagcctggacaggtggttgtgatgctgtataagcagtaccctgctccctcttacctatcagtcctacttctcttgcagttcctctaccaccatccctttaccccagtgatatttctggcagtatgtacaggtgagtttgataggggaaagtgcacaaaataattttataatagcttatatataacaaatataaccttcctctattttgacaagatcaatcagccataaactatcttacagatttctctttttaagctttttttattattattattttaatatagagatggggtcttgctttgtggcccaggctggtctcagactccagggctcaagtgatcctcccacattggcctcccaaagtgctgggaatacaggcgtgagccaccatgccccaccccagatttcttaatgcagtttaacaactattcattatatatctactatatgccaggcattgtgctaagtgctaaggttacaaagatggatcaaacagtgtcaagtaaagaaacyagaggcacagacatacaatagaacattgtaatacaatgtggttaagtgttaataatcaggatgtgcacaggtgatatggaagcccaagggtaggtacctacctctacctactggggccagaaaagactttccttccccaagaaactagaatttgtagtgggtcctgaggggcaaataggaataggccaggcaaaaaggagaaaagacattcagagggagggaacggcatgaataaaggcagggggccaagaaacaacctagagtacatacagaattatggggcattccctaaggctagagtagagcagcggctggaggtccacaagccgaatctagctcactgcttgttttatatggcccatgagcttagaacagttattacattttgatttctatatatatatatatatgtatgcgtatgtgtatgtgtgtgtgtgtgtgtgtgtgtgtgtgtgtgtatgttttttttttttcctgagatggagtctcactctgtcgcccagactggagtgcagtggcgcaatctcagctcactgaaacctctgcctcccgggttcaagcaattcttctgcctcagcctcccgagtagctgggattacaggcacgcaccaccacatctgctaatttttgtatttttagtagagacaggatttcaccatgtttgcaaggctggtctcgaactggctggtctcggactcctgacctcgtgatccacctgcctctgcctcccaaagtgctgggattacaggcatgagccaccgcgcctggccatatacatatatatatatatttgttttttttttgagacagcgtctcactctgttgcccaggctggagttcagttgtaccatcatggttcacttgtaacctctgcctcccaggctcaagtgattttcccacctcagcctccctagtagctgggactacaggcacataccaccatacccagctaattttttgtattttttgtagagacagggtttcaccatgttgcccaggctggaattattacatttattaatggtaaggaaaaaaaatcagaataataatatgtcatgacacatgaagaatatataaaatttcagtgcccataaataacatttcactggaacacagtcacagttgctcatttacaaactgtttatggctgcttttttttttttttttttttttttgaagagataaggtcttgctctgtcactcaggctggagtgcagtggtgccatcttggctcactgcagcctcaacttcctgggctcaaatgatcctcccacctcagcctcccaagtagctaggatcacaggcacatgccatcacacccagctaattttgttttgtttttggtagtgacaaggtttcactatgatgcccaggctggtcttgaactcctggcctcaagcaatcctcctgccttggcctcctggagtgctgggattataggcgtgaggcaccatgcccagcctatggctgcttttgtagtacaacacaaagtagttgcaatcaagackgtatggcctgcaaagcctgaaatatgtactgtttggcccttaacagaagaggtttgctgacccstgggctagaatagaagctaccaccatactaggaaatgtcaggaggtaagactagagaggcaagcaagagctgtacaactcagggcttcaaatgccaggcttggggacatgaaccttatctcttgggcattgggaagccatcaaagacttctaaacaggagactagcacaaccagattcaccttttagaattgttctttaggcatgtttttgaagaagacaagagaggcagggagattgcctagagggctattgcaatgatctaagcaagaaatttgagggcctgaattaaggcagtggtgataggaaccggaggagggaaggaggaggatctggaacaacagccaagcatctggtttaagtgatttgggggagggcactgttgccctgagacaagatttacagagtttgagagagaagatgatgagtttggttctggacaacctttgtctgagatcccagtgggacattcaggtatagcaaccagtaagaaatttggtgttttttttgttttgtttgagacggagtctccctctctcacccaggctggagtgcagtagcgcgatctcagctcactgccccctctgtctcacgggctcaagtgattctactacctcaggttcctaagtagccgggattacaggcatgtgccacaacacctggctaatttttgtatttttagtagagacggggtttccccatgttggccaggctaagtctcgaactcctgacctcagcctcccaaagtgctgggattacaggcatgagccaccacgcctggccaagaaattagatagaaaaagtggggcctgggggaagagctgggctagagatacctactgagaacaaatcagatcccattccagggaaaaactgttcaatgagaaaagagcagtgggttgggaaagaactgtcagaacataaatacttgagtgtttcagggataagtggaggataaagaaaccactaggatctaagaaaggagaagtagatgtaagataaaaacctggtaataaggatattatgaaatctcaggaagtacttacagatatcacataatatacaattcacccagaagccacagtaggtaagagctgaaagtggccactttggcaattgtaaccttggcaagagcagtttcagtggagtggtgagggcagaagcttgtccgaagggtaagaaataaagaggcaataagacatataaccagccgggtgtagtagctcatgcctgtaatcccaagattttggcagattgaggcaggaggatcgcttgagcccaggagttagagaccagcctgggaaatgtagggagacttcatctctatgaaaattttaaaaattagctggatgtggtggcgtgcacctgtaaccccagctacttggaaggctgaggtgggaagatcacttgagccaaggagttcgaggctgcagtgagctatgatcgcaccacggcactccggcctgggcaacagagtgagaccctgtctcaaaagaggacaaaaaaaaaaaaaaaggaagaacaaaaaaagtctggtagctttaaggacagcaagtcatggagggagtggatcttctaagagaagaaaattggccgggcgcggtggctcccgcctgtaatatcagtgctttgggaggctrtggcgggcagatcacaaggtcaggagttcgagaccagcctggccagcatggtgaaacaccatctactaaaaatacaaaaaagtagccaggcatggtggcgcgtgcctgtaatcctagctactcaggaggctgaggcaggagaattgctcgaacctaggaggcagaggttgcagtgagccaagatcgcaccaccgcactccagcctgggtgacagagtgagactccgtctcaaaaaaagagaaaagaaaattgagtgcataaataggcagagaggaaagaatcctgtagagtcagacagaggtaataataataatggatggcacaagatcccacagaagaaagagatggaactaagagcacaggtggagctggctctgaacaggaagagggataccagatgtgcacacagacatagaaaagtttgctggatttggtagccgaacgttggcaggtgttctacattattgcttctagttactcatgaactaggaggagtcaacttgactgctgaaaatgaaggggaaagggttgtatgggtctggactagttagtgtgaatgggaggacagtcctccaagatgttgctgactggctgtttggagaccagactacgaccacatggatatatgattcactctgttttactcaaagacggtttcctgcatgattggggtaaaaggacaggattgcagatcaactgcaaggtccaaactagatggaggagagagagaagctggcaggctggctgaaactataaaaaatgaaaggattaggccaggcgcagtggctcatgcctgtaatcccagcactttgggaggccaaggcaggcggatcacgaggtcaggagatcgagaccatcctggctaacacggtgaaaccccgtctctactaaaaatacaaaaaaattagccgggtgtggtggcgggtgcctgtagtcccagctactcgggaggctgaggaaggagaatggtgtgaaccggggaggtggagcttgcagtgagctgaaatcgtgccactgcactccagcctgggcaacagagcaagactctgtctcaaagaaaaaaaaaaggattaaaaagttttttgtgtgtatgagtacaaagaaccatggaaataaagtagccaattcatcctagtttgccctagactttcctggtattaacatttaaaagtcctgtatcccagggactctacatgggaataagggggaaaatagactaatgcataatgcaacctcttctaggccttcatcagccagcttcacctataacctcctaaggtttaacctttctgagtgaatacacatgcctgtgctctcccataagccctgagctctaaaaaaacgagtacttttcttctggctgccactccaaattgacagttctcagaggcaattgtgtccccaggtccctccccactggagtttctcaaatagtgtgtcttctgggctttcacagttctgggtctccaacccttctcctcagaatggattcacttagaacctcccatttcaatcaacccatccccactgatttcttttccaactcttccttctgctctaaaatcctcagccacaccctccctctctcctgaggcttggtctcttttcgggtcaattagcacaagacaatagtattatatacaattcatttatctatcattcctctagcccctgaaatactctcaaatccctratagaattttggtggaagagattgttttgttttgagtacaataatctaaagaaaacatcgtttcctaaatagcagttagggtggagtacaggtagttccactttaaagtaattacccttgactgggcrtggtggctcatgcctataatcccagcactttgggaggctgaggtgggaggatcacttaaactcaggagttagagattagcctcagcaacatagggagaccctgtctctgcaaaaatttaaaaaattagccgggcgaggtggcgcacactgtggtcccagctacttggaatactgaagtgggaggactgcttgagcccaggagattgggactgtggtgagctatgatcataccactgcactccagcctgggcagaggctctgtcttaaaaaaaaaaaaacaaaaaaaaaacagtcgggctcagtggctcatgtctgtaatcccagcactttgggaggccacagtgggtggatcacctgaggtcaggagttcaagaccagcctgaccaacatagtgaaactccatctctactaaaaatgcaaaattagccaggtgtggtggtttatgcctgtaatcccagctacttgggaggctgaggcaggagaactgcttgaacctaggaggcggaagtggcagtgagctgagatcatgccattacactccagcctgggcaacaagagcgaaactcagtctcaaaaaaaaaaaaaaattaacggggagtggggctacacatctatactcccagctactcaggcggctgaggcaggagaatcacctgaacctgggaggtggtggttgcagtgagccgaaatggcactactgcactccagcctggacgacagagcgagactccatctcaaaacaaacacacacagaattatcccagtttgaaattttggtctctttccctagttttttttaagttttacttttgtttgtttgtttttgagacagagtcttgctctgttgcccaggctggagtacggtagcgtgatctcagctcactgcaacctcctcctcctgggttcttgtgcctcagcctcctcagtagctgggatgacaggcatgagccaccatacctggctaattttttttgtatttttagtagagtcggggtttcgctatgttggccaggctggtctcaaactcctggcgtcacgtgatccacccacctcggcttcccaaagtgctgggattacaggtgtaagccaccacacctggccccaagttttactttttattgaagcttaaattggcaaataagattatggggctcaataatggaaaagaatagctactctagttctcccaccccatgggaggccactttcaactcttcagctgattcttttggtgtctacatctttaaaattatatacttacactgctatttttgtgttgacattatggcagatgtgattctctttattttttatatatacatacctgccctccaagcatgacattttctgatcaccatctcaacctctcaaaatattttggttagatcaacattcggcatttactatgattatataaaatgctatttacaacaaaatcatgtaatatattctaggtttacttttcatttgctgcataactttttttttttttttttaaagagacaggatcttactctgtcacccaggctggagtgcagtagcacaatcacagctcactgcagccttgaatttctgggctcaagaaatcctcccacctcaatctcctgagtagccaggactacaggcacatgccaccacactcagctgattttttaaaattttaatagagatgggggtctcggtttgtaccccaggctggtctcaaactcctggctttagcttaagcagtcctcctgcctcagcctcccaaagtgctgggattacagtcataaaccaccaaggtcagcccttgctgcacaactttttcaattttttcaatgtctgttaaaaaytgtctttttcatttgcttaatatagtcagtttttcattaattcaaccccacacactccactaatttgttaagtgacctatatcatcttctcttgacctagyggtctatgtggatctatttgcattcgttgtgagggatacttaatgggtgggttttcccggaaactccagacctttgatccagaaaatgttgtttatttgttgatttcctsccactctattttcacttttctctttctagaatttctgttattcacatgtttgcctcctaagctggtcctcttgttttctctatatcttgtttgttctatcttatgttccaactcttccagtctctcatttctaaatctatcaaatctgtaatttccaaaggctctttttgctgtctgaatgttgtttagtagtatgccgttcttgtatcatggatgcatattagtcatgttttttgtttgtgtgtttgttttgagacggagtctcgctctgtcgcccaggctgaagtgcagtggtgcaatctcagctcactacaacctccagctcctgggttcaagcgattctcctgcctcagcctcctgagtaactgggattacaggcatgtaccaccacgcccggctaatttttgtatttttaatagagttttaggggtttcactgtgttggcctagtcttgaactcctgacctcaggtgatccgcccgcctcagcctcccaaagtgctgggattacaggtgtggagccaccatgcccagcctattagttatggttttattgcttgttttcttctccctgcatagtcttggttgccttcatttttttatttagctccttgtttctttgtttcaatctttatttttatattagatgaattccttttttttttttttttttgagacagagtctcactctgtcgcccaggctggagcccagtggcgccatcttggctcactgcaagctctgcctcccgggttcacgccattctcctgcctcagcctcccgagtagctgggactayaggcgcccaccaccacgcccggctaattttttrtatttttagtagagatggggtttcaccgtgttagccaggatggtctcgatctcctgacctcgtgatccgcccgcctcagcctcccaaagtgctgggattacaggcatgagtcactgggcccggctagaggcattctttagatgtttagtgatccttaaccatctgcttttatttcagagtgggggtggtatttttacccagagtgggtgggctgattggtagctctgagccttagatggggttcatcaatagtggattctctgtcaggtgatctggctaggccattttagtggaggacctccaatgtcagtrtctttaggtctttcctcttggactgttcagtttttccagagaagtatcttcccattttatgtgtggcattatggacctggcattctagaagctgagtaagaagggaggcaagatcatattccataaacccaggttcccagttgagcatgtgacctaatacatcactttcctcttcattccagtttagtttagcatgttttgactaccaagtctaaatacttggtctaattatacccattggtctaaatgctggggataaagaaattattagaatgccctatttttgccaccccaggttcaatttaagccaataaaagcgattgaactttagatatttaaagttctatgctagcattgtggagaggaaagatcttggtaagagtttttgtctcaggaagctcatagacatgtgtgaggaggtacaaacaaattatgaaaccaaaatacaaggcagaacatgaaataagtgcagcaaaagagaagaagtattgtggttgtttagaaaggaagaagagattcattttgattgtggggacatgaaggaggtggagatttgcaytggagctttaaaaccgtacagaatttcacaaccagagacgggggcggggggagtgcaagcaaaagcccgaagatctggagttttaggattctgtttctcctccctgcagggtgactctgggggccccctccattgcttggtgaatggcaagtattctgtccatggagtgaccagctttgtgtccagccggggctgtaatgtctccaggaagcctacagtcttcacccrggtctctgcttacatctcctggataaataatgtgagtcctctcaaatgatgggttgaaatggggtcacctggagacctacgcactggctgggttggggaacaaacgttggatggactgggcaagccgtcatcttccttaccacattcatgtgtttactcccttcccttccttccacggtgtactttccttcaataaggctgccatcctgaattccctcccctccacatacccacagagcagacttcactgtattgtttattgcttagggtaagacagtggcaacatcaaatctgaatcagggacatatcagtgccttcctaagtcaaagcccagggaaaaacaggttcagaaaggcctgcgtactcctaggcaagggaaggaggcaccgacttcctctcccacaacgtctttctaaggacattatgataatttgctctaacttttttttttttttttttttgagacagagtctcactgtgtcacccaggctggagtgcagtggcttgatctcgactcactgcagcctctgcctcctgggttcaagtgattctcctgcttcagcctcccaagtagttgggattataggcatgcaccaccaaacctggtaaattttttttgtatttttagtagagatcgggtttcaccatgttggtcaggctggtcttgaactcctgacctcaagtgatccacctgccacccaaagtgctgggattacaggcatgagccacagcgcccggcctgctctaatttttgacaggttttaccaccttaaataatgcttgagagttaggtgaggctctgcctacactgacctggtggaaaggccacacaacacatttcactgtgccctccacccttcaaacayattctggagccttgtgtattaatcttggctcacggccatttcaaggtctgtctttgccactgtattctgggtatgtacctataacactgagctgtcctatcacagttgaggctgacttcctgcctccctgtccccacaccctgtcaacttcccataaacccagtacaaaaccatacttaactgggagccctgaggaaacaagaaaggaggtaggcaggagttactgactgtggacataactgtctttccttcaggtcatcgcctccaactgaacattttcctgagtccaacgaccttcccaaaatggttcttagatctgcartaggacttgcgatcaaaaagtaaaacacattctgaaagactattgagccattgatagaaaagcaaataaaactagatatacattatcatactgtgtctatttgtaattaagccctccagagcaggggtccctatgcctgatgatctgtcactgtctcccatcacccccagacaggaccgtctagttgcaggaaaacaagctcagggatcccactgattctacattatggtgagttgtataattagttcactatatattacagtgtaataataatagaaatgtagtacacaataaatgtaatgcccttgaatcatctcgaaaccatcccccaccccggttcgtggaaaattgtcttccacgaaacgggtccctggtgccaaaaaggttggggaccactgatttagaagaaatgcagttataggatccaagttggatttcaccacatctgcaggctgggtcttccctttgctgctacctctaccagtccacaacacaaacccagtgggagtagctttatgttatccattttgggttactttaggatctatgtatccactaatctgtccatctgccctattcctgtggatatttgctatattcgaaggcacagagctacttgggaggctgaggcaggagaatcgcttgaacccgggaggtggaggttgcaatgagccaagattgcaccgttgcactccagcctgggcaacaagagcgaaagaccatctcaaaaaaaaaaaaaaaaaaaaaaggttcccgagtgggctgggtacggtggctcacgcctgtaatcccagcactttgggaggccgaggtgggtggataacgaggtcaggaattcgagactagcctggccaagatggtgaatcctcgtgtctactaaaaatacaaaaattagctgggcacagtggcaggcgcctggaatcccagctactcaagaggctgaggcaggaaaactacttgaacccaggaggtggaggttgcagtgagctgagatcgtgccactgcactctagcctgggcaacaaagcaagactccgtctcaaaacaaacaaacaaaaaacttcctgagtgactgaatgtgccctgtctttcccaggtatactgtgggttcatccttcttttgtttccccctttagtgcctaaaacgaacgcccactccaagtttctgggtgatggcaactactaggatacaccagagatagaagtataagattaggaggcagggcagataccagcagactaagaaagtgacaaattagaaaggagactggagaaaatcgcttgggcctgggaggtggaggccgcagtgagccaagattgcgccactgcattccagcctgggcaatgaagtgagattctgtctcaaaaaaaaaaaaaaacaacaatggagactggagagctaagaatagaaaaaaggagagaagagaagatactaaacaaagaaacgaaagggttgaggggaagaggcagaacagaaaggaagaggcaacaacaacatagggcctcaagctaagtgtgaatcagcactttaaggctgggactaaaattaggcaaccggatccagggttctataaaccacagagaactgggaaactgataattctgctgtatcctggccagggctcagtctgttagagtggcctatgagaaagcaaagggggaactgaaaggggaaggctaaaaaggatgagaagcagcttttcatgtcaatcacttaagaccagacaagagggactagggtattaaacattacagaaggagaaactggctgagacagaccctggaattgacaggctcagcagaggcctctagaacactccatgtgctataagaggctgagtctgttcccatcccagttccaccactgaggagctgggtggctgtggtcaagtcatcagccctttctgtgactcaatttccctatctaattaacttctaagggttgtttcttctctaacactacatgatttggtgaccatcaatttcagtttgcaagatattggcactaaacagagtttcttaggagacagtggctgggttgcattgctgaggatgccatgtagtcctggcagggacacaggtactggcctccttctgccagtgacacacctgttagcattgccatctactctcagtgttcccgcagtactgctattctccatgcttctccccacttctccccatccaatatcaagtccttctattttcatcaccctgcctcttccagggcatcaccaaagctaacatccagaataaaccctaatcgcctggcagggcaaggtggttcacacctgtaatcccagccctttgggaggctgaggcgggtggattgcttgagctcaagagttccagatcagcctgggtagccaggagtggtggcatgcacgcaccttagtcccagctactcaggaggctgaggtgagaccatcacttgggcctgggaggtagaggctgcagtgagccctgatggcactgctgcactccagcctggcaacaaagcaagaccctgtctccaaacaaacaaacaaacaaacaaaccctaatcacctattcccagaaaattttgtatccatctctacaaataaattaagcacattacattagaatcacctgattacccacctatctccacttccagactttaagcatctttatttatgtacttatttattaatacttattctttattggttgagaaagggcctcacgctttgcccaggctggaatgcagtggcaccatcagggctcactgcagcctccacctcccttggctcgggtgatcctcccacctcagcctccctgatagctgggactacaggtgtgtgccaccacgcccaattaatttttgtatttttagcagagagaaggtcttgctatgttgcgcaggctagtctcaaactcctgggctcaagcaatctgcctgcctcagcctcctaaagtgttgggattacaggtgtgagccgtggtgcccggccagacttcattaagcatcttaaggtcagggactgcattttattcatccttgtttcagaacacccagcaatgcctggtacacagttgaccttgagtgcagtaatgattgttttggagaaagaagaggaacacagtagcatacaagggcctctaattttgtgtcaggccctatcttccccctccactccttaggaagtgttattttgaccttcttccctgccttgaggaaattttaacctgcactgtaaaatctgagtacgtggttcctccacacctagtgtcctaatctcaagctatcccctcaaacaggtcagggaggaattttttggagaacttctccctaaagaaacaatagttgtcatctcaacagccgcaccccaatttgcacaatctgtgtctgtgttcacattctgcctccatccagtacactgtactccaactagaaaaacttgctcctcatgctcagcacgggcgtccatactatcctcctcagccttttttcaatgtgatcattctcttgcctaagaaccagccccctaccctgtttctatctccagcttagttgttcctcatttatttatttatttatttatttatttatttatttatttgagacgaactgtcgctctgtcgcccaggctggaatgcagtggcgcgatttcggctcactgcaacctctgcctcccgggttcaaacaattctcctgcgtcatcctctcgagtagctgggactgcaggcgtgcgccaccacacccagctaatttttgtatttttagtagcgacgcggtttcaccgtattggtcaggctgatctcctaacctcaggcgatccacccgcctcggcctcccaaagtgctaggattacaggcgtgagccaccgcgcccggcctgtttctctctttcaagcccggctcgggtgtcctgcctgctttctgcactctatccctaccagttccaggcttagagcctacctggagcaagaaacgcagtgtacatggcggcttcgcatgcatactcagagaacctaaacgtgttttcgatatggtaggtcctctcgctgagtggaacccacatcattttctaccctgcggtggcagttgctttgcagtgctcagcgtgatgggaactggctttccggagcgagtgagtgtgggcccaccactgaggacctggttcagtgaggccgaggtttcgggcaggggttggagctcggaagctggcctcgagcgagcgctgcctgagggtaggccccgggcccgcccctccgagccggcctgctccagctgacagtggtgggctgaggggcgggcctcagggctggccaggggcggcctgaggtggctcagggctggggccggatgcgaggcatgccgggagcccgcacttcctcctcgggggcctcagaaaaccacagggcgcggggccagggcggcggcccccagggagttggcaggatggcagagggcaaggcaggcggcgcggccggcctcttcgccaagcaggtgcagaagaagtttagcagggcccaggagaaggtaggtggccgggcctcgctgtctgtctggcccacagggagccgaggccgaggccgagcccggccgggcaggaggggcgggcagggtgctcaggggccccgaagggtctgggctgacgagaagggtctcccgctctcccagggaaacgggagcgaggagtgggcttccatgaaaactggcagattggagagaggtcggagaccgccacccgatcttgggcaaggataagggaagctggggagacaacagtctctgggcagaaccttcgacaaccctcaggctgacccagaaaaggtgaaagaaaggaagtgatggtggtggccacctttgtatcaaattttgtgctagcaatccaaaattggtattttacagatgatgaaattggagggtaattttccatagagggcaatttccccaaaaacagcgatgcagcggatgccagcaggcaccccccaccaaaggcttagaataatcctgcatagttctccccctacctgaccctgcctggcctctgggtggtgtttcagctgacgtaagcaggagcccaaatctgcttcttctaccctccctttggcgttggggagtacacctcccagggtgatgaaccacatctgtgttcagagtgtgtccttggttagtgtcaggtagccctgctccagcactggcacttaggtgggctgcccatctattacttgcttggcaatctaaattgtggggacattctctacacattttgatggcatttttgtttctacctgtacagaatattttctttgcttctaacctgagcctctgctctccacctaccaaccctctagtagacaaggcggtttgggaagacatgtcagccagaagaaagagcgagggaagaaagacaagaaggacctgagatagagtttcggttttcctttttttctctctctctttattaagcccaacctgccttctacaacggagaagttttggttttctaagagctgatggacttagaagcatttggatgaacagctctgcttaccaactgaaatatccctattatcttctaaaagtggagcactgctttgagccctgggaaggcttaaaggcaaccagctctcccgagttgatttatcagcagaaaactgatggaatgtagatgtagctcctgactttaagagaccacaatggaagggaggttattttctatcatttgaggtcatgtgaaagagaggaggaaaagggaaagagttcgtgtagccagacttcgttacttcacttaccctaacttcaccttgatcctagtttcagcctctctgaagacttacaaatctggtagacccgagagcagggcctatgggaaggtctagctcgaaacagtgtgggcgagcaggaggtactggagagaaggccacactgtggttgaaaaaaaaaaaaaccctaaaagacaaaacactcatgaatgatagtaattttaaaaagacataccagccaggcacagtggctcactcctgtaatcccagcactttgggaggccaaggtgggaggactgcttgagcccaggagatcaagactgcagtgagcagtgatcacaccaca

SEQ ID NO: 98052 - DNA, 71768 bp, Homo sapiens
  misc_feature (1)...(71768): n = A,T,C or G
atttatatatatatatattatatatataatatatatataaatctatatattatatatataatatatataatataaatctatatatattatatataatatatatatatctataatatatatattatatatatatctatatatctaaaatatatatatctataatatatagatctatatatgatatatagatctattagatatataatatatatatctatatatctatagtatatatatctatatatataatatatatctatctaaaatatatatatctataatatatatagatctatatataatatatattatatgatctatattatatatataatatagatctatatataatatatattatatgatctatattatatatataatatagatctatatataatatagatataatatatatatcatatatatctatatataatatgtatatatcatatatatctattatatatctatatctatagatagatagatagatagatagatagatatagagagagagagagatgggggtcttgctatgttgcccaggctggtctcaaactcctggcctcaaggaatcctcctgccttggtctcccaaagtgctggaattacagatgtgagccatcatgcctggcccatttcctatttctttaatcatgtcctggttgagtgtgtgacttttactgtgtactcactcctatctcttttggaagttgccagggtttacattgtacataaataaatataatatcacataatagcttccattcagtgactgcttccttgatgttggccaccttctgtgccttatcttgttcattccttacaacaatcctatgagatattattgtcagtattgtatggttgaggaaacagactcagaggggttaagtgacttgcccaagtccacacagccagcaaacggaaagtaagcccagttctgacaccaagggctgggttcccaaccactttcatttcacagcatcacatagacagatgattccattcaggtaacgtatattcacctagaagacctgtcttcacgtaggttttgttttcattggttccgattttctttgatttatgtataagaaaattggaaatatttgtgagccaaaaccctaccgcttttttcaactggtataatggctcctgggagaatcggaaggttttatgttacagcttctgatttctcattttctttttaaaatttaggagtataggccaggcgcagtggctcacacctgtaatcccagcactttgggacgccaaggcgggtggatcatgaggtcaggagattgagaccatcctggctaacatggtgaaaccccatctctactaaaaatacaaaaaaaaaaaaaaaattagccgggcatggtggcgggcacctgtagtcccagctactcgggaggctgaggcagaagaatggcgtgaacccgggaggcagaggttgcagtgagccaagatcacgccactggactccagcctgggcgcagagtgagactctgcctcaaaaaaaaaagaaaaaaatttagaaatatgtatttacagagatgtgcacaactcttaagtgtgcaacctgatggatttttacatacacacacacacacacacacatgcctccctttaaccaccgctcaagatcatcagccagcaacccagagattccctcctgcaattcctagtcatcactcacctctttccttcctcaaggtagccactattttgacttctgtcaccatgtattactttgcctgcttttgaactttgtaaaaacattatgcagtatgaactctgttgtgtccaactctttttcctcatccttgcatctgtgacattcatccatgacgctgcgtgcagcagaagttcagtctttgttgcctctctgtagtatttcatgggatgaatatgccacaattcattcacttattccaccgttgaatgacattcaagttgttttcaacttttgactcttatgaaaaatagtttctggccaggcacggtggctcacgtctgtaatcctagcactttgggaggccgaggtaggtgtttcacctgaggtcaggagttcgagaccagtctggccaacatgaggaaaccccctctctactaaaaatgcaaaaattagcagggcatggtggcgggcacctgtaatcccagctcctcgggaggctgaggcagagaattgcttgaacccggggatgggggtgcggaagttgtggtgagccaagatggcgtcacttaactccagcctgggtgaaagagcaaaagttcgtctcaaaaagaaaaaaaaaaagaaaggaaaaagaaaaagaaaaacagtttccgtgaacatttttcttatcttttggtagaaatactcatttattttgggccaatacagctgtatctgttttcaatttcttgaatttactaggcatcgttcagctggttagatgtaatagctttgggctttgttaggctatggaagtttctggagcataaatgtaactttctagtcttagaatacaagtaaacaaatgcgataatttttcttgttaggaaaagtaatttgcaatgaagcacagcatttagtcttcttagcactacagacagtttatataggtgttcttatttgcaaaactggcatatttgtcagaattcttttttttcatttgcaaatgacagacacccaactcaaaccagctttagtcaaaaagagaatgtaatgactcaagtatccagctgccttcaggtttggctggattcaggtgtttaaatgatgtcatcaacatctgacaatgtcatcaacatctggctcctctttctgtttatctcttggttctgttctcctccctgttagcatcactcttaggcccttctctactggtgaccactggcagcttcaggtttaaaatttcctaactttggccggttgcagtggctaacacctgtaatcctagcactttgggaggccgagatcagattgcttgagctcaggagtttgaaaccagcctgggcaacatagagaaaccctgtctctataaaaatacaaaaattaaccaggcatagtggtgcacacctgtagtcccagctactcagaatgctgagggaggaggctcacctacgcttgggaggtcgaggttgcatcgagctgtgatcatgccactgcactctagcctggacggcagagtgagaccctgtctcaaaaaataaaataaagtaaaatttcctagctccaaggccggcagaaggcagagcttctctcttccctacagttctgataaaactcccagaattgaatctcactggctttaactgggttgtatgctctgacagaatcactgtctccaggaagaaaataattctgatgggtcatattccacacctggcccacagggactgactgtgtgggagaggtgttacccagggaaaagtgttaaccacaaaagcgagaaatggatgctgtgcagggacacaataatgaaacacagatgtcaactatgctgagaaatttggatgtgggttggcacacggacattctgagactgtaggtgttggcagaaagttaatattatcgtagctctgattactcaagtctaacccttgtcatttacatagagataaacttgtaaaagttggctgagctttaaaaatgttctacttccttatttcaaaaatattgccgttcatctcatcatgctggcttgaaactgtagagatatgcttgacttttattttccttctcatcctttccctactggatcagccaacaaatcctattgattctttctttaaattttctgccctactaattactctttttctctattccctctgacatgacattggaagctccaggcttatgtatatattctatccccttagccaccccagtgaaataagagcacctctttcccagtaagccttgtcctggtcctggaggactgactgggtttacatgcccattcttgagccaaactctgtggccagggggatggtggacacctgagtcatgtgaccatcctgaccagccagtcaggagtacagtcagcccttcctgaatcacctggaccaagagcgagggagagtaggcaagtaaaaacaacaggtatccaacacacttagaaatgaaaactggaggccaggtgcagtggcttacgcctgtaatcccagcactttgggaggctgaggcaggaggatcacttgagctcaggagttcaagatcagcctgggcaacaacatagggagaccccatctctacagaaaatgaaaaaattaggaccacaagatgcatgcttgtggtcctagctactcaggaggctgagatgggaggatcgcttgagtcccaagagatcgaggctgcagtgagctatgattgtaccattgtactacagcctgggtgacagagtgacaccctgtcaaaaaaaaaaaaaaaaaagaagaaagaaaagaaaaagaaagaaagagaaagaaagaaagaaagaaagaaaactcaaccaagcatggtgactcatgcctataatccaagcattttgggaggccgagacgggtggatcacctgaggtcaggagtttgagaccagcctggccaacatagtgaaaccctgtctctactaaaaatacaaaaattagctggacatgatggtgcacgcctgtaatcccagctactcaggaggctgaggcaggagaattgcttgaacctaggaggcggaggttgcagtgggccgagattgcaccactgcactccagcttaggctacagagtgagactccatctcaaaaaaagaaaaacgaaaagaaaagaaaattaaaactgcatcacctcttatttcaaagtgttaaaagaaaaactttagacaaactagaggtaacagggtttaatcaaacaaagaatgatttgctaatgggacagcctccccagccagaataggttctgagggacttaggtgctgccacatgctgggtcaaagaagatttatggacaagaaaagggagatgacatagaaaaaatggaagtgaggttcaggagcaatggattggttacagctcagcatttgccttatttgaacacagtttgaacaattggttgcctgtgattggccaaaattcagtgattggtacaagagtaggttatagtctgttgacacctcttagttaggtcacagttcattatgtacagagaaatctttaggccaaacttaaaatatgttaggaggtagctttgggctaaatttgacaaaagtatcctgtggtctgtggatcagagctggtggagctcataaaatcttattttcaaactggaaggggtcatagcaattgtctacttaccctagtcctctagtttccattaaccattcttcttttatgcacttatattaatttatgctttgaaccctagaacctcaagtgtaatcaaaaagcacaaaaagtccttgtttctttcaatcctttggttcactggtcccctcccccataaccaagggaatatattgttcaagatgaaagcttagttgcatgtgttaaagaccacaaaaacagtggtttaaacaagataattttatttctctctcacataatagtcttagctgatacaatggctgtgctctgtgaagtcaccagcaacccagcatcctttcctctgttgtgcatttatcccaaatgcaggtcttggctttgtgtgcatgacccaagatggtgcaccgtcatttccgcattccagcccagaggaagcaagatggagaaagggagaaataacctctttcctctaacagcacagctgggaagttgtgtgtatcactgctgctctcatcccattgaccatcctcatgttcataccttggtgcaagagaatctagaaacatagtctttattctaggcagttgtgtacctgactacgaacgaaaggagaacagatactggaagataaccagcaatctctgcagggaagaaagggaaaaaaatctgactttttcttttcttcttgtttttcaggtgaaaaaaaaaaaagatccctgagtaattgcaaatgctgggacagtttaccactccagggtgaagagtccataccaacatgtctgcctactacaggaataactggtctgaggaagacccagattaccctgactattcagggtctcagaaccgtacgcaggggtatttgaaaactcaaggttatccagatgttccaggtcctctgaacaatccagactaccccggcaccaggagcaatccatactctgtagcctccagaacacgtccagactatcctgggtctctggcagaaccaaattatcctagatctctgagtaatccagactattctggcaccagaagcaatgcatactctgcagcctctagaacaagcccagaccatcctacctctctaccagagccagattatagtgaatttcagagtcatccctaccaccgagcatcatccagacaaccagactaccctggatctcaacgaaatcctgattttgcaggctccagcagcagtggaaactatgcaggctccagaacacatccagatcattttggctccttagaaccggactaccctggagctcagagcaactctgatcatcctggacccagagccaatttgaaccatccaggatccagaaagaatctggaacatacaagttttagaatcaatccatacgcagactctctgggaaagcctgattatccaggcgctgacattcaacctaactctccacccttttttggggagccagactatcccagtgctgaggacaatcagaacttgccaagcacttggagagaacctgattattcagatgctgagaatggtcatgattatggctcttctgagaccccaaagatgaccagggggtaagttcagatatatatcccttcactgggagtggatgctgagtgctgaatcattaagtcaatggaatttggttggtgtggtttagaytagggatatatatgacggtttctatgacctgaagttgtggtgaaatgcgcatacctatctgtagaccttacctgggccatggactctcagtttgaggcttcaagcccttacttgaacttaatctttcaccatctcttccttggatcaccttcccattatcccacctcttcctaattcaatccctgtaagacatctagatccacactgttttgaccctgctacgtagccaacaaggttaagacttgacgctcataaatccaaacactttaattaaaattacatcaacagtgatgaattgttatccagaaaatcttttggagatctaactccgtgaagtcgattagttttttatatgagatgtttgcaccacttctttgtttttttttttggtcattttttttcttattttttttatttttcttgagacagggtcttgctatgtcacccaggttggagtgcagtggcacaatcatagctcaccacagcctcaaccttctgggctcaattgatcctcccaccccagcctcccaagtagctgggactacaggtgtgcacctattatgcccggctaagtttttatttttgtatagagatggtgttttgccatgttgcccaggctagtcttgaagaaggctcccagctgctgggattataggcatgagccaccatgcccggccatgtttgcaccacttctgatttttacacttttatttctattttactgagattatcagaattgatgacttttcaccaaaactttactgcagatttgattcactgattatctgcactattttaatctaattttatcaattatagttttcaccattttcagtattcctttaaggccggttttttgttgttgttgttttttatttatttattcattcattcattcattttttgagatggagtttcgctcttgttgcccaggctggagtgcaatggcacgatcacagctcaccacagcctctgcctcccgggttcaagcgattctcctacctcagtctcctgagtagctgggattacaggcatgcgccaccacgcccagctaattttgtatctttagtagagacagggtttctccacgttggtcaggctggtctcaaactcccaatctgaggtgatccacctgcctcagcctcccaaagtgctgggattacaggcgtgagccactgcacctggcctaaggccatttttaagtagcaagtccagtttttccaggtttagattctgtagatctaaattttgtctaaaagattttgatcttctgtcaatttttgttccttgacaaattttaccaaatgcagttctggacaccgacagcattagtctgggttacttagttctaccaaatctaatttttcctgggttaagatttttcatgttcacgttgccaacaaaatgtaattttttttttttttttttgagacagcgtctcactctgtcatccaggttggagtgcagtggctcagttttggctcactgcaacytccatctcttaggttcaagkgattctcctgcctcagcctcccaagtagctgggattacaggcatgcaccaccatgcccagctagtttttgtagttttagtacagacagggtttcaccatgttggccaggctggtcttgagctactgacctcaaatgatctgcttgcctcggcctctcaaaatgctgggattacaggcatgagccactgtgcccagtctaagatgtgattttttaaagtcagtttgtggtttaatcagtaacaatgtttgtcatgtgaagttgtaaccaatatgagtttgattttgcatttactgtttctactagtaatatttatgaatttgataaaaaactggtggcttgtatttatctctaggaacaaggatataggacttgggcgtgcagcagtcctgatgtctttagaacccaaatagtagggttaacaggaccaggtgaaaatgtcctccttggtcttatcacccactgcctgattcatcattccaaagcccacctttgatcctatcactcctttgcttttcatcgtccatgggtccccataacctttggagaaaggccacccagcttcacttatagaatgtttatgaataaggatacgtcgtgttaatgtaagatgccagccaaagaccagcctgactgatctcctcttaagtctcctgtctgccccctgccttgaccttatactctaggtcagtggttcttgactttggctgatccttagcattacccagttatctggggaactttaaaaataatacagatgcctcagtcaaaccttcagaacttctgattcaattctccaggacaaggcttgggaagtggtatatgtagtaaattgagaatcattactcatcagttgattttcatagcatttcctttatatattcagcactttctggcctcacacctttttttatgctgttcttcatccttggaatgccctccctttatgtatgaatgtgtcttctcaatccctgctcagatgtatcttttccatgcagatttctcccaaaactctcagcaagaattatctttcctccgaactccttgggcctgtcttcagatactcaccagtttctacttgtagtataattgctcatagctgtgtctaagaagctgtaccaacttgtactgtgagcttcttgagggcaggtaccccatgttttcctctttgtattctcaccttctagcccatgcctaactcagggttggcatttagtctgcatttgtggaatggaatggaatggatggatggatgaatacattaatgaatggatggatacatggatggatagatgaatacatggacggatagatggatggatgaatgtatgtatggttggatggatggatggtaaatggatggatggataaatggatggatgaatacatgaatgaatggatgggtacatggatggatggatgaacagatgaatcaatggatggatgaatggatggatggatggataaatggatggataaatacatgattgaatggatggatacatggatggatggatggatggatggataaatggatggataaataaatggatgaatacatgattgaatggatggatggatggatggatggatggatgacaatccttactatactcttggttggatagtgatccatcattttggattttagggtgctcagcagaacatcttcaatccagccctcatttcgtcacaggagtgatgaccccgtgggcaktctttggggagagaatgattaccctgaaggcattgaaatggcatccatggagatggcaaactcatatggccactctctgccaggtgctcctggaagtggctatggtaagcatttgttaagccaggatcatatcctgggaaaaaactraaatcactggatttaggggtgcaatcattaaggagacttggcaataggagaattggtgtatccttccaatctcagagacccttktttttacatacaaaagttgagaattcagtgtttagagaagccaagttaattgtcatcaattataaaaaaaatgctaggtaagagttgtggaaaatggggacctgtgcactctgttcctaccagagttggtgaagctcagtccatggtggttatgtggcaatgtgggctcaatgtggcaagatcttcatatttttcagaagccgtgtatttggggttttatgtgaaacctgatgttgatctgttccaaaataatttttaaaagtaaaaacagtgagctgggcaaacaaaaccacattttttgttagctgccagtggccacctgtagtttagcatatcctaaaggcattcaggcaatcagcacgtatgtgttcagaacctactgggggaaaagggagttaagaggtagctctgccctcatgttatttaaagcctaaataggtcaacaaaagtgccacatcaagactaaagaaaaggctgggtgtggtggctcacgcctgtaatcccagcacttgggaggtcgaggcgggcagatcacctgaggtcaggagttcgagaccagcctggccaacatggtgaaaccccgtctctactaaaaatacaaaaattagccaggcatagtggagggcacctgtaatgccatactcgggaggctaaggcagaagaatcacttgaacccaggaggcggaggttgcagtgagccaagatcgcaccactgtactccagcctgggcagtagagcgagactctgttaaaaacaaacaaaaaaaagactaaagaaagttagcaagcaaactattaatatttgaaaaatcatgttgtcctcataatttgttgtgtgtatagataagatgcttagctccaggaggcaaaggaaattctaaacagttttttttttttttaagacagtgtcctgctctgtcacccaggctgatcatagctcactgcagcctcaaactcctaggctcaagcaatcctcccacctcagcctacccagtagcagggactacagttgcatgccaccatgcctggcactttttttatgcttgagaaagatggggtcttgctatgttgcctgggctggccttgaactcctggcttcaagcaatcctccagtctcggcctcccaaagtgctgggattacaggcttgagcctgggccaattctgaacagttcttactttctaggaggaaaaagagacatgttccaggaagccgtttgatggcacaagagaaaaaaaaaatccaggccatgttaaaggaatttggaacctgtggaagtcagaaaagggagaaggtgttcagccaataagaagagaacaagagacccaagtgctgggaggtgcagatggaggattgatgagccttgaggagtagatggggcaggtctggaagaaggcagagaggaggggacaggatgcatagccatgtactaatgaaaacactgactgttaacacatagaaaattttcattccgggcctaattttaaaaattagctgggcgtggtggcacacacctggggtcccagctacttgggagattgacacaggaggatcacttgagcctgggaggttgaggctgccgtgagccatgactgtaccactgcactctggcctgagtgacaaagcgagaccctgtcgcaaaaaaagaaaggaccggacaggacaggacaggaaaggaagggagtggaggggaggggaggggaggggaagagttggggggaggtggagggggagagagggaaggaaggaaggaagggaggaaggaaggaaaaagaaaagagaatattcctttgggagcacagacatcagatagcccagggctattccaaacctttattccaagcattcctccacaggggcaatagaaatcccaaggggggaatatctgctcttgaaaggccagaaaaaaatctcactcttgatgtataaagcagggatacacatgtagtacacaaacggatacagtatatctttggtattaaaacttcttagaggacggcaatgaggaaaaaatgtctcccctgcttaaggggctgataatgaaacaagattgagacatactgtgctactccagtgcaagtggaacgtataactgcaagcaaatcttgagtgtttcctatgccctggagtctctgtccagcacttgacttttattatctcatttaatctgtacaactgcctttcaggcaggcactgccactctccctgttttaacagatgggaaaactaagacttagaaagaaatatgcacaaggtcactcacttactaaattgacagagccaggattgaatcccgtctctctacccaaaacctgacctcttatttaccctgcattactgctaggttgaatcagggcaaatacaaacagattcctgaccacaaagctctatagaacattggaagataaaatacttaaaaaacaaaaaaagcaggtcagtatagctcacttctctgggatcttttgtagggcaaagtttgcagcccttggcaatcacttgtccagtgtcaccccatcctgataaagtgttcactccttaaggagaacctgtattcatctatgtaccctccaaggctctaggtgctcttcctagtgtcacagtgcctggcccacagtaggtgcytgaaaaatattaactgagttaataacaacaacaacaacaacaactataagagttgtatcagctagctattgccacaggaatgctgcataacaaacaactccaaaaatccagagtcgtacaataaacaagcattttcttcttacgggtctgcaaggttggttggcatttggctgaactacgctgagtttgttgtgcttggctctacgtcatgggttctatttagttctagtgtccctcttcttggaccagtgagtgacctagggcaatgtcttcccatgccgtaagctgaaagtgctcaaaatggcaagcagaaacacacggtatctttaaaagccttggcttggaactggcacactgtcacttctgtcatattccattgttcaaagcaagtcacacgactaagcccaatatcaatggaggtagtcaaggtaggggaaatgtaatatttgctgaataacaattaatctactataacagttaatatatattagagtttaatatgttcgaggattatttaatcatttcacatgtgttcactgattcaattcccacaacaatcctatgtgaaggtcctattattatccctatttatttatttatttttcagacaaaatgcccgctctttagtgcaggctggagtgcagtggtgcaatctcagctcactgcagcctttacctcctgagtggctgggactacaggcacactacyaccatgcccagccaatttttttattttttgtagagacagggttatgccatgttgcccaagctggtctcaaactcctgtgctcaagcgactgtcccactttggcctcccaaagtgccgaaattacaggcatacaccaccacacctagcctgttatccctattttagagactaagatattgaagctcagagatgcdaagacacacacccagggggcgcacaactaggaagtaacagggctgggagttgattcccaggcaagaagctccagaaggtcttgcaatgtaattttgcatattgtccccattaaaatgtgctccattttctccatttctcccagctaattgggaggctgaggctggagaatcacttgaacccgggaggcagaggttgcagtgagccgagattgcgtcactgcactccagcctgtgtgacagagcaagtctcaaaaaaaaaaaaaaaaaaagagtggactagagtaaggctatgttagagtgcagtttatatagtcaaacaaagtattattttgtaaaacttgcttttcagttctatatgtataggtgtgtcctggatctcagtgcaaccattatttacacacacacgcacacacacacacacacacacacttttttactgggctccatgactcaagcctgtaatcccaacmctttgagaggccaaggctggcagattgtttgagccgcccagaagttcgagaccagcctggataacatggtgaaaccccctctctacaaaaaatacaaaatattagccaggcatggtggtgcatgcttgtagtcccagctactcaggaggctgagatggaaggattgcttgagcctgggaggtcaaagctgcagtgagctgaaatcgcaccactgcactccagcctaggtgacagagtgagaacctgtcttaaaatatatattaatatatatatttaatgtaattttttatattatatattatattaaaatatatatttatagataatatawatattttaatatattatatttatttttatattatataacatataaaatatagattacatgtaacatataaaaataaatatattagaaatacaaaaaatatataaaatatatagtataaaatatatatttatttttatatcatgtagtttatatgtattwttttcttttttttttttttttgagtcagagtctcgctctgttgcccaagctggtgtgcagtggcgcgatctcggctcactgcaagctccacctcctgggttcatgccattctgccccagcctcccgagtagctgggactacaggcgcccgccactacacccggctaatttttttgtatttttttagtagggacggggttagccaggatggtctcgatctcctgacctcgtgatccacctgtctcrgcctcccaaagtgctgggattacaggcgtgagccactgtgcccggccacatatacatatatttttagagacagggtctcattatgttgcccaggatggtcttgaacttttgggctcaagtaatcctcccaccatggcttcccaaagcactgggattacaggcgtgagctacctcaccttgccaacaattatttttaactatggcttagtcaaatgaaaaaccattgatctaggctgattatatttaacagcactgtttttgtatttttgtcctagtttccacccaagttcttaatcagtagtctgttagaacctcaaagaccaggtctcagtcttattagccgttacgaaccactattagcacatcataactattgcatgccaggaatgtctagtgtggtgagactaatcggcaatrtctccttcctcttccctccagtgaaccctgcttatgtaggtgaaagtggtcctgtccatgcttatggaaacccaccattgtctgaatgtgattggcacaagtcaccccaaggtaagtgatatggtttggctctgtgtccccacccaactctcatttcaaattgtaatccccatgtgtcgggggagagacctggtgggaggtgattggatcatgggggtggtttcccccatgctgttctcatgatattgagggagttcccttgaaatcygatggtttaaaagtgacagcttcccctgcacccactctctctcctgcccccatgtaagatgtgcccttctttcccctatgycttccaccacgtttgtaagtttcctgagaaatgccccccagccatgaggaactgtaagacaattaaacctcttttgtctataaattatgcagtctcaggcagtatttttatagcagtgtgaaaacagactaatacartaagacttaaaggacagtgaccaaaaagtcaaccctggagaaggaacatgtccaagacaatcyacccattgccatttcctttgacctccagtgtggttactgatgcagaacctgcttaacatatcataatggagttttcttttagatgtatagtttgttgtcttctggggatcagggtgtcttcattaggaatcttctggttgcaagtgacagaaacccaactcaaacaggcattagcccagggggaattcattggctcatgtggtagaagcgtatgggggaaacttaaagaaatgaaagtagaagtattagtaccttccagcacctagtacagtgcctggcacgtagtaggtattttagggatatttgttagattaatttgttgaatgagtacagaaatcaggacctcagtctgasgtcagggaactcaatgtcacctggactctggtttcccatccatttctcatctttgtaaaacttgcttttcagttctgtatgtataggtatgtcctggatcctcagcacctctttaagttagacctcattcatctccgtcagagtcaggacttgtccacaggccagagaacacggccaatagcaggcccacgtgagccctctgcttagccacctcattaggaagtcttgcttcctccctgggtccatctctaatgcgggggaaggactctggccagtctaactggagcacaygcctacacttgagccaatcatttttaccacaagggacaagactgggtcacctgtctattctgtggctaatgcctgtgttggtggggacaagatgcattgatcaaagtttttgtgaatattcatataattattatgataatggagtgtggaagcagtcagactggtgaaagatagaaggcgctgcaatcagttaggaagctctctaaggatcactgtgtgtggtgatgaaggttgaatcagaggcagagactgaaaaataaaaaggaagcaacaagccaggcacgggggttatgcctgtaatcccaacactttgggagaccgaggcggtaggattgcttgagcctgggaggttgaggctgcagtgagctgtgatcacgccattgcagtctagcctaggtgacagagtgagaccctgtctcaaaatcaaacaaacaaaaacaaaaaatgaagcaacagaggagagagactagactagggagtgctggagccacaaggcaaatctgtgagcaacaaggaataaagtaatgaggtcctctatacaatgatgcgtgtggagagaagccacttagaactctcacctttcagccccatcgcctataagataaccgttagcctcatccttcaagagatgtatgccttttcagggagggttagatattgctacttggaagggaaaaccgttgggatataaatgatcacactgtctatttggtccccactggggcacagaatggctttaattatcagggagaataaatatgtttaaatgttatgactgctctgtcttgccagcatgaggtttggagactgtatagaaaaaaacacactcagagtgttttttctgttctcttactcaacaaccatcaacacagaaggcttctgtgaacaaatgggtgggggtttctccccacacaccaagaaagcgatcarttttacagcagacatcgctgggtrtcctccaattcaattctgacrctatctacctggagatagtgtcagatcccataggacaaaggcrcagtccccaagactatatacctccttcagaccccagccacatgtccaggccgccggaactttttytttttwttattattattatttttaaggatctcactccgttattcaggctggagtgcagtggcaccatctcagctcactgcaacatccgcctcccaggttcaagcgattcttgtgcctcagcctcctgagtagctggcattacaggcatgcgccaccacacccagctcatttttgtatttttagtagagacggggtttcggcattttggccaggctggtctcaaactcctgacctcaactgatctgcccacctcggcttcccaaagtgctgggattacaggcatgagccacygcacccagccccagaacttctgaccaaccagcttcaagttggggttcccacgacctcctcctttggtttggttaatttgctggagcagctcacagaacttcgggaaacttatgtttactggcttattacaaagaatattacaagggacatagatgaagagatgcattaggtgaggtataggggaagggacacagagcttccatgccctccctgggtgagccaccctccaggaacctccccgtcttcagctatcagaaagctacctgaacccagtcctcttgggccttttattgggaggcttcattacatagacatgattgacaagcatgtagaaatgagactggatggccgggcatggtggctctcacctgcaatcccagcactttgggaggccgaggcaggtggatcacctaaggtcaggagttcgataccagcctggccaacatggtgaaaccccgtctctactaaaaatacaaaaattagccgggcatggtggcatgtgcctgtagtcccagctacttgggaggctgaggcaggggaatcacttgaactcaggaggcggagaatgcagtgagccgagatcaaagggtgtatgatctcatactaatagacaggttggggaaacccagaaagctgtgtctgttcagatccttcttgggctttctgtgcagcattccttcctccagggtttggggcaggaccccttctgaaatgagggagaatttctttatggccaactccaagacagaaaggtggggaaagactggaatcctgccttggggagaaaatagagcaaatgaaaagaggcaggagatcagagagagagattctgttttctgaggcttaaaattctaacattataacaagggctatggtagttatgagccaggaaccacgggtgggaaaaaattatatatatatattwtatatatatatatcacaggaaccctggtagaagaggagtccccaaaaggcagagagtagtaaagaaatagaggaccaaaagatgaacctggctgtcttcatcattttgctttgtgttgaatctgattcacaaaccacatgcaattaaataatagcccaggctgggtgcactggctcacacctgtaatcccaggacttctggaggctgaggcaggtagatcacttgagttcagaggtttaagaacagcctgagcaacacagtgaaaccccatctctatgaaaaatagaaaatttggccaagcatggtagctcatgcttgtaatcccagcactttgggaggcctaggcgggtggatcacttgaggtcaggagtttgagaccagcctgcccaacatggtgaaactccrtctctgctaaaaatacaaaagttagctgggcatggtggtacatgcctgtgatcccagctactcaggaggctcaggctggagaatcacttgaacccgggaggcggaggttgccgtgagctgagatcatgccactgcactccagcctgggcaacagaatgagactctgtctcaaaaaaaaaaaaaagaagaaaaaagaaaaattagccaggcctggtggcgtgcacctgcagtgccagctactctggaggctgagatgggaagatcccttgggcccaggaggcaggcactgcagtgagccaagatcaccctactgcactccagcctaggggacagagtgagaccttgcctaaaaaaggaaagaaagaaaaacaaaagatagcctgataaagtatagctttgatgaattaattatgctgtgtccctaggaagcacctgccacatagtgtgcgtgcttatattcattcatttatgaatgaatattttgagatggaatctcactatattgctccgactgttctcaaattcctgggctcaagcaatcctcccgcctcagcctcccaagtagctgagaatacaggtgtgagccaccacctcagttggcaagaatgaatgaatgatacaccagcatcttttttgttgttgtttttgaggcagagtttcactctgtcccccaggctggagtggagtggagtgacctcggctcactgcaacctctacctcctgagttcaagcaattctccagcctcagcctcccaagcagttgggattacaggcccctgccaccacacctggataatttttgtattttcagtagacagagtttcaccatgttggccaggctggtcttgaactcctggcctcaagtgatccacccaccttggcctcccaaagtkctgtgattagaggcataaaccaccacacctggcaagaatgaatgaatgatataccagcctcttgttacaggaaggggccagagtgaaatgactaagagttctgctttgggttcagagcaatccggatttgaccccagctctactgcttgctggttttgtgacaaattatttcatgaagcatcagttttcttagctataaaatggggttgattttaatatctacttcatagcgtaaatgttgtgctctatttaaagtacttggcctgcagtaatggcaggtatcattactgttaattatcactgttgggagaaggaatacatgggttctagttcaattttgacatttaatgaaagtgtgatgaggaggaacagtgtccgttcagctctctgcacctcaatttctacaactattaaataaacaactaggcctaggtgatttgaaattagatctattggataggaattgtgtttatgtgcctggcactggaacagaaatgtggcttagcaataaaggggtttatttttctcatgtactgagaagtgtgggttaggtgcaatggttcacacctgtaatcccagcactctgggaagccaaggtgggagaattgcttgaaaccaggggttcgagaccagcctggacaacaaagtgagaccctatgtctttaaaaaaaaacaaatagctgggcatggtggtgcccctgtggtcccagatactcaggaggctgaagcaggaggattacttgatcccaggaggtcaaggctgcagtgagttatgatcacactactgcactccagcctgggaaacagagcaagacctcatctctaaaaaaaaaagtttaaaaatttgtacttttttttacatgcggtggctcatgcctgtaatctcagcactttgggaggctgaggcaggcgaatcacttgaggtcaggagttcaaggccagcctggccaacatggtgaaacctcgtctctacaaaaaatacaaaaatttgccaggctactcaggaggctgaggcaggagaattgcctgaacccaggaggcaaaggctgcagtgagccaagatcatgccactgtactccagcctgggcaacagagmgagactctgtctctaaataaataaataaataaaaatttttaaaaagcaaaaaaacaagaagcatggagggaggaagtgcaaagtttgtacagcagctccacccatgatgccctcaaggactgaagccccttctgcagcctttttctctaccatccttagcaggtgaacgttcgttctcttcttttcaaaatgtctggaggaagactggtgaagggcaaattgtgaacccaggcaaactgtccccttagaaagagcattcctggaagccacaagtctcattggctaaaactgagtcacaggcccacccttagccgcaaagaacactgggagactttgagcactatgtctgcacaggaaatggagcttttgctggtgtgagaaagaagaagattagagactgagagccagacaaatagcagagtccactacctaaggcatcaggagataataattgtatcactgtaaacccatgtggatttctacaggcagataaaactacagatataaaatataagttcagccaggtgctgtgtctcacgcctgtaatcccagcactttgggaggccgaggcaggaggatcacgaggtcaggagatcgagaccatcctggctaacgtggtgaaaccccgtctctactaaaaatacaaaaaattagccgggcatggtggcgggcgcctgtaatcccagctacttgggaggctgaggcaggagaatggcgtgaacctgggaggtggaggttacagtgagctgagatcgcgccactgcactccagcctgggtgacatagcgagactccatctcaaaaaaawawatatatatatacacacatttagaatatatatatgtatatttagaacatatatatgtatatttagaacatatatatatgtatatatataagttctaggccagaggcactaaattataaaaaaaaatcttgccctttgactatgagtcatttagaaaaatatcttccttctgtttctagaatcccattgtcttaaatgaaagattctgttttcgatttcttgcctagctaccaagacagaattctctgcaggaaaacactccttctcctgagaaaactcctcaggggttagatgcagggagttatgttgtgatttgtgtaggggtggctttggtgagctcatcctggcattttaaaaataatgtgaatggtgtatccctttgtgatcatcatcactttttccctgcgagtcccaatcaatgcgggtgtgactgctgtatgaagtctcaggaagcccaccccagtggagaagaaggcttgcaggaggcaggagatgctgtccgatgaccacgtgaatgaaatcatcatacaggttgagaatgtttcctctggggtccaaagccacccatccycaaatcagatttttcaagaaaaggtgctgctagactcaagcatcaacatggttttgtcaatatctgacattgatgtgatagactctcagacagtcagcaaaaggaatgaccaaaagggtaaccaggtgctgcggttttcaacatctttgaatgagtcgatgtctcagacccttcatagcctagaatgcatgggcatagacactcctsgttcttcacatgaaactgttcaaggtagtgaaatgctggggaagagaagtaggggagtaggaaaaaaggcttcctcgttgtccacagcatattttactttttagatatcaagtggggccaggcgtggtggctcacacctataatmctacggctttgggaggccaagataagaggaacacttgagcccaggtgttcgagactagcctgggcaacaaagggagacctcattgctacaaaaaaatttaaaaaataataaccaggcatgatggtgcacacctgtggtmmcagctactcaggaggctaaggtgggaagatcacttgagcctaggagttggaggctgcagcaagctctgatggcaccactgcaacccagcctgggtgacagagtaagatcctgtctctaaaagaaggacattgagtaatatggaagggcggaaggttttgtggttgaactaaggaagccaaggacaaaggaagggatcaatttaagacatccctaacaagagcttatttttatcaagcttattttgtatgccttgtgctctgcagagcacctgctttttgttatccatcgaatttttatgtactccctgcactccacacctttgaggtggcatttccgtttgcttgatgaggaaactgaagctcagataaatttagtgacctggaagatctggggcccaaatacaggtctatctgattcccaagactacattcttttttttttttttttttttttttttttttttttgagacaaagtcttgctgtcacccaggctggagtgtagaggcacaatcttggctcactgcaacctctgcttcccaggtttaagtgattctcatgcctcagcctgctgagtagctgggattacaggtgcatgtcaccacacccatctaatttttgtatttttagtagagatggggttttaccatgttggccaaccttgtctcgaactcctggcctcaggtgatctgcccaccttgacttcccaaagtgcwgggatggattacgggtgtaagccaccacatccagcctcaagcctgcatccttaatcgctacactgtctcactttgggctaattcctcctcaccctggtcaggcaacagataggatgtctcttgttggcaagatcatcaggaaaccagatcttagctgagaccttccagcctctctgctcctgaggccaatggagatgctgtttcttttaatttaatttaatttaatgtatttatttgagacagagtttcactcttgttgcccaggctgaagtgcaatggcatgattttagctcactgcagcttctgcctcctgggttcaagcaattatcctgcctcagcctcctaagtagctgggattacaggcacctgacaccacgcctggctaatttttttgtatttttagtagagacagggtttcaccatgttggccaggctggtcttgaactcccgacctcaggtgatctgcctggcttggcctcccaaagtgctgggattacaggtgtgagccaccatgcccggcccagagatgctgtttctgtttcacccccacagtattccaggcataaagtcaagcagctctcaatgatttcagggagaagaaaaatatccctttactcacacaaagcatttagtaggtttagcccctttactgaagaagattggggcatcacctctcacactgctggctccctggatctctgtatattttcctcttccatctttcttcctctcaatctactcacccttcctacccaggaagaggcacaaattcctcatcctcagcagagagatttggtggtcctcttttgggaattccccttacacctcaagtatgtcattacgatgaacattgtatttcccggcgggccattctaaccctgtgctgtgaccaaggagccagcttgctccctctgtccctcagccaccctcggcacggtatcgctgccccgcctgctggcttctttgctacaggatagcaatagcacttctcacatcacatgcagacacaacaataatcagaggaagagacatctgtctttttcttgttttttgctttttttttttttgagaaggaagaaatattttccgagaaatttctcagcacacacctctcagaggacattggctaatgctgtgtcacatgcctgtgcttaaaccagtcacctgcaaggggacaggaccgtgaggattggttcactcagactaaaacttgctctttgggcctagagataggctccacctcaaggaagctcagggccatgtgagggaggcaggtagattcctaaacacaattggaattccattaacaaggaggaaatgaatttggggtagacaatagcatctgccacattgactgcaaatgtgaatatgagttagcaggagaaaaggagggtgtacttctaggaaggtggaagggcattcagcgatagtcaaggaatgtgagaagtctcttgaacctggggtcaggggcaaaaggaagtgatgtgggatattaaagcaagagagccaggcgtggtggctcacacctgtaatcctagcagtttgggaggctgaggtgagaaatctcttgaggtcagaagtttgagaccaccttgggcaacatagcaagaccccatctctacaaataataattttaaaaaattagctggttgtcgtggtgtgtgcctgtagtcccagctactctggaggctgaggtgggaggatcgcttgagcccaggagttcaagaccagcctgggcaatgtagtgagacctcagctttacaaaaaaataaaaaaattagccagacatggtggtgcattgtggtaatcacaacactttgggaggctgaggtgggaggatcgcttaagtccaggagatcagtgttgcagtgggctgtgattgtgccactgcactctagcctgggtgacacagcaagatcctgtctcaaaaaaaaaaaaaaaaaaaaatagaagaggtagggtgaccaaacacgcaggatcttattgactttgctaaatgttttttgttacaggaaagagaaaaacactgaattggaataaagtgcagccattattcatttgctctcactttgagctttaacacatatatgtgttttttttgttgttttcctttgtgatctttgagatccccaactccataaacttcttcccttgtgttacgtgctctgacttcagcaccacatttcagtgttacgattctgttaaagaaaaaagaaattaaattccattaatttctttcataggacagaagttaatcrcatcccttatacccatgacatccagagacagaattaaagccatcaggaaccagccaaggaccatggaagagaaaaggaaccttaggtatggacyaaaggcttttcttctttctcagatttcatgcgaamctcaatcctctacttttgccccatctcaaaaagataagaaataaataagcacaatagaagagacaaatattcctgacagaaaaatttcaaatgccctctgtaggtactcctttctccaggggctacagcttaattcctgctcctgggctggagtgtgggctctgcttggtgagctgctttccaaagagtagggcgtggaaggaagagaggggtgtaactttccagtggagagtctgcctaatactgccttggccaagactcaaggttaacatccccaaagataagtcatgtgatgggggaaacatgtctcctctgtgctactctctcctaaaacccacaaccccagtctaaacagcgaaaaacattaggcaaatcccaactgaaggatattctacaaaatactcaaccagtaccccttgaaactgtcaaagtcatcaaaaacaaggaaagtctgagaaactatcatggagtggaaagttctacagagacgtgacaggctgggtgtggtggctcacgcctgtaatcccagcattttgggaggccaaggtggtgggattagttgagctcaggagttcgagaccagcatgggcatcatagtgagactccatctttacaaaaaatgaaaattaaaaaagagagacatgacaagtaaatgcaatgtggtatcctggacgagatcctggaatagaaaatggacatcggtggaaaaactggtaaaatctgaatagtctggagtttaggtaatagtaacgtaccagtactggtatcttagttttgataaacctaccatggaaatgtaaaatattaacggggaaactagcgagtggtatatggaagttttctttactgtctttgcaagtttactgtaaatctcaaactatgataaataaaatctttacttaaaaaataaagatcagactagtgcagtggctcatgcctgtaatcccagcactttsggaggcttaggcgggcagatcatgaggtcaggagtttgagaccagcctggccaacatggtgaaaccttgtctctactaaaaatacaaaacttagccgggtgtggtggcatgcgcctgtaatcccagctactggggaggctgagacaggagaatcgcttgaacctggaaggcagaggtttcagtgagccaagatcacaccactgcactccagcctgggtgacagagcaagactctgtatcggaaaaaaaaataaactaaaataaaaaagaaaaaatacataaagaccttaggagttttataagctcaggaattcaaaacccgagggtaagggctgttttagccttcagagtttacattaattgttgcttaatctttttttttctttttttcaatttgatatagttggcagaaagtagtagagtggatgcaacaacaattactagtaagtgattcatggatgtaggattttctgaggtttcaaagacaaatttcaaatcctggcagggtggaatagatttgtcaacaagtaaattacaaatggcagaaagtaaatcaggccaagtcaaaatagagattgcaatgggaggaccagaaaggtctgccctcccygactttgctggggaaaaatggagagagggggcatttgagctgggccttgaaagacaattgaccatgacattgggatgggccttcgaggtggaccaaagaaagctaggaaagaaccagaacaaagcagatgtggtgagttcatggaagggtaaggagaccaactgtgactgtgtctttctgaaaacacttccattttgaactctgtatggctgcctctgtcactgaatatgggctccaaagaccttatagcaagatttcttaatatcagtacaagtaacatctgagggctggatctttctctgttgtgggggctgttttgttcattgtagggtgtgtagcagcatctctgatctctatgtacttgatgccaatatcaccccctctccactccttagtttcacaaccagaaaagtttccagacattgccaattgtgtgggggcaaaatccccctaggttgagaatgtgtattagtctgctctcactctgctaataaagacatacttgagactgggtgatttataaaggaaagaggtttaatggactcactgttccacacagcaggggaggcctcacaatcacgacagaggacgaaggaagagcaaaggcacatcttacgtggtggtaggcaagacggcatgtgcaggggaactgccctttataaaaccatcagatcggctgggtgtggtggctcatgcctgtaatcccagcactttgggaggccaaggcaggtggatcacctgaggtcaggagttcaagaccagcctggccaacatggtggaaaccccatctctactaaaaatacaaaacttagctgggcatggtgggcgcctgtaatcccagctactcgggaggctgaggcaggagaatcgcttgaacctgggaggcagaggctgcagtgagccgccatcaggccactgcactccagcctgggtgacagagtgagacgccatctcaaaaaaaaaaaaaaaagaaaaaggaagaaagaaatgaggtctcgttcagttgcccaggctggactgcaatggtgtgatcatagctcactgcagtctcaaacttttgggcccaagtaatccccccaccacagcctctggagtagctgggactatacaggcaggcactaccaacacacccagctattttttgttaatttttttcttaatagagacaaggtcccactattttgctcaggctggtcttgaactcctggcctcagtgatcctcttgcctcagcttccgaagtgttgggattacaggcatgagccaccatgtaactattttttgaatgaatgagttgcaacatttgtatctctcattttctcttgctgttccctacaggaaaatagttgacaaagaaaaaagcaaacagacccatcgtatccttcagctcaattgctgtattcagtgtctgaactccatttcccgggtaagtcagtaaaacaggcacagcaagagggtgaaaacagggagggaggagagtgaggatgaaaggggactcagggggaagatgaaccaaaaatcagagcaatttcattgcccagagccaacrgttagtacaggtgtggaaaagcgaggtgggcatggggaagaactaagaggttgctgagttcattggccaacttggccattgtgagtggcaccttcaacagcaaacctgggaaggtcataatagctccaccttagagttgacataacatttgtaaacatgcctagcatggtgcctgcacttaacaatactccagacatggtggctgtttctgttattatggcacctgctcagtcgatatttgttgagtcaacagcaagccacacctgctttgaatcctgattccaggmttatcggagatccaagaacagcctgtcggaaattctgaattccatcagcctgtggcagaagacgctgaagatcattggaggcaagtttggaaccagcgtcctctcctatttcaactttctgagatggcttttgaagttcaacattttctcattcatcctgaacttcagcttcatcataatccctcagtttaccgtggccaaaaagaacaccctccagttcactgggctggagtttttcactggggtggtaagtcctccacttcccctaccccaagtgcaccaatcacctcggaaacccagggacgtgccttgccggtcacccactcacacctctcattttgcctgggggtcaactgatggggaaagtggatgtttgaaatgttttcctggctgagtgtggtgactcatgcctgtaatcccagcaagytgggaggccaaagcagtggagaccagcctgggcaacatggcaaaaccccgtctctacaaaaatgcaaaaattagcagggcatggtggcacacacctgtaattctggctactcaggaggctaaggtaagaggattgcttgagcccaggaggcagagattgcagtgaagcaagattcccccactgcactccagcctgggcaacagagcgaggccttgtctcaatcatcaatcaatcaatcaataaagtgttttcctgcaaagtaacatacacacatcgtagtagaatttctgtctccagaggcaaccatcttgaacagtttgtttttatccacacacttttttggcaaacatatggacacttctgtgcacgtacagaggcattcttttcttttcttacaaaagatgaattattcattgtatattatctacaacttgctttttttttacttagcaatatgtggtgggcattttcttgtgttggtgtttatagatctatgttttctttctttttaatttttatttctacaaaatacaatgttccttttgaaaaattcctactatagaagaaaactaagagaaagttcattttatatttttttctttgtccaactccccattttgagatatatctttgtagactgtttttttcttcctgtacaaacgttgatagatacatacttgataaaaaaaaaaccaaatagatgacaggcacatagattattatgcttttaaaaataaacagaggataggattgtactataagcccttctttctttcttttcttttcctttccttttgtctttctttctttctttctttctttctttctttctttctttctttctttctttcttttccttycttccttccttccttccttccttccttccttccttccttccttcctccctccctccctccctcccttcctggaccccaaaatgtctttcataacttgcttattcagactaggattcagtcaacaatcagattttacattctgtgtccgcccccgccttaaatctctattaatctaaaataatcagccgggtacggtggctcactcctgtaatcccagcactttgggaggccgaggcgggtggatcacttgaagtcagaagttggagaccagcctggccaacatggcaaaaccccatctctacttaaaatacaaaaattagccggatgtggtggcagaagcctgtaatccccactactaggcaagctgaggcagggagaattgcttgaacccgggaggttgcagtgagctgagatcttgccattgcactccagcctgagtgacagagcgagactccatctcaaaaaaataaataaataaataaataatctccccagcccagccccttttttcttgacattggcttattgcagaaattgggcctactgctatgtagattccaacatcctaccttctggaattgtctgatgrtttcctagtggtttctagaatttgtttctctggcttcttatttcctgtgcactgaaatgtaggcctataggcttgattcgtttcctattaagcatgtttagccataatactggtgacagaggcacataatactggtgaaacgagaggcctggctgtcgtgttcttgctgatgtttcacttgatcactgggccaggtggtaacagctcaatgtctccattgtaaagttacactggatttcttttcaagtctgagagcccagtgacacaatgtccaaattctcagtgcccctttcctggaaaacaaaatgtctaaactgactggcccaggcttcttgtattcaggagaggtcaactctcatgaccataatcgtttaccttttttttcaggagatccacctgacctatggtttattgtacctttcagggttattttagggacacagtgatgtactatggcttttacaccaattccaccatccagcacgggaacagcggggcatcctacaacatgcagctggcctacatcttcacaatcggagcatgcttgaccacctgcttcttcagtttgctgttcaggtatggaagcatctacatttcctgattctgagggtcatgttagatttcagcaaaaatccaagaaattcmaaaattacccaggtaacagtttctctgcagtcctctcctctcctctcctctcttttcttttctttcttagatagagtctcgctctgtcacccatgctggagtacagtggcgcaatctgggctcactgcaacctccacctcccaggttcaagtgattctccttcctcagcctccygagtagctaggattacaggcacctgccaccacgccccgctaatgtttgtatttttaatagagatggggtttgaccatgttggccaggctggtctcaaactcctgacctcaggtggtccacccgcctcggcctcccatagtcctgggattacaggcgtgagccaccgtgcccagcctgcagttttgactttccattgctgtccaattattccttgtcctgcaatataaaaataggagtttggacagaggaagagaggtttttctgtgcttttaaagaaattggtcagcctgataataagggtgcagttaccccagcaatgatatgaagggaagaacatgatagataactatcagagaggaggtacaaatggaaaatacacatatgaaaggctgggcacggtgctcatgcctgtaatcttagcactctgggagtctgatgcaggctgatcacttgagtccaggagttcgagactggactgggcaacataccaaaaccccatctctactaaaaatacaaaaaattagcctggcttggtggcgcacgcctgtgttcccagctattcgggaggctgaggtgggagaatcacctgagcccattaggtcgaggctgcagtgagctgagatcagtctactacactccagcctgagcaactggagatcctgtttcaaaaaaaaaagagagagaaagaaagaaaagcaacwtgcaatctctgtattagtttgctagggctgcctagcaaagtacagcagaccattggtttaaacaacagaaatttattttctcatggttctggaggcctgaagtccaagatcaaggtgtcagcaggcttggtttcctctgaggcctctctccttggcttgtagacggccactgtctcctgcctgtgtcttcacatggttatccctctgtgtcttaatctcccttttttataaagatgccatttstactgaattrggacacaatttaatgaccccattttaaaaaaatgtaattaccactttaattaattaattwatttattttgagatggagtctcactctgttgcccaggctggagtgcagtggtgtgatctcagctcactgcaacctctgtcccccaggttcaagggattctcctgcctcagcctccctagtagctgggactataggtatgtgccaccacgtccgactaatttttgtaattttattagaaacggggtttcaccatgttggccagactggtctcaaactcctgaccttaagtgatccacccgcctcagcctcccaaagtgctgggattacaggcgtgagccactgcgcccggcctgtaattaccactttaaagaccctacctccaaatacagtcacattctaaggtactagggggttaggacttcaacatacgaattttgggaagtacacagtccaacccatagcaacctgactgccagcatactaattcaaactaaagtgagattttgttttgttctgtcaaagtaggaaatgattttattattattattattattaatattttgagacagagtcttgctctgtcacccaggctggagtgcagtggtgtgatcttggctcaytgcaacctccgcttctcgggttcaagtgattctyctgtctcagcctcctgagtagctgggattacaggctcatgccaacacacccagctaatttttctatttttagtagagacagggtttcaccatgttggccaggctggtcttgaactcctgacctcaggtaatcccccctgctgggcctcccaaagttctgggattataggtgttagccatcatgcccggccagaaatgattctaaagttgctgttactgagtggtggcaaatttcagaacagcagcatccgtccatcttgtgcagcatttttgtgtgtgtgctcagggcttcctgggcctgagacagcccatgaccataacagtgccttcatcaagtgcttgctgctgtaagcactgcatagactctttggaaggctgaataatctcccccgaccccccccagagaagtctacatcctaatccccagaactggtgaatatgtaacttcgcataacaaaagggactttgcagatgtgactgaggatttttaaatggggagattatcctggattatcccagtgggcccaatggaatcacaagggtctttataagaggcaggcaggaggtcagagagtagcagggagatgggaagatgctaccctgctggctttgaagttggaggaggtggccacaagccaaggaaagaggacaccctctagaagctggaaaagacaaggaaatggattcttccctagagcttccagaaggaacatagccctgccaacaccttcattttagctctgtggactcattttctgattagctgggtgtggtggcatgtgcctgtagttccagctactttggaggctgtggcgtgaggatggcttgagcccaggaggtggaggctgcagtgagctatgactacaccactgcactctakcctgggccacacagcaagacctcatccctaaacaaacagaaaacacaaaaacaagaaaagacattttctgacttctgatctctagaagggtaaaagaacaaatttgtgttgtttttagccgctaagttggtggtcatttgctatagcagcaacagggaactgggtggattacttgaggtcaggagttcaagaccagcctagccaacatggtgaaaccctgcctctactaaaaatacaaaaattggcygggcgtggtgatgggcacctgtaatccctgttacttgggagactgaggcaggagaatcgcttgaaccttggaggtggaggttgcagtgagcagagatcacaccactgcactccagcctgggagacaagagtgaaactctgtctaaaaaaaaaaaaaaaaattctgtgaggtgagttttattgttattccctctctacagatatggaaactgaggctgagaatcagaaccattcacaagacaaaaatcccccagttggcagatccagggttgcaagccaggcctgtgcagccccaaaaccagtgcttgtttaaccactgtgtggtgaccacaccgctccaggccaacagcttggggctaagtcttcacgttgcctttcaccattaataatagggctgccctttgttgaagccctgcactcccagtgacggccataataaccttcaggtgttctgctttctgccttctctagcatggccaagtatttccggaacaacttcattaatccccacatttactccggagggatcaccaagctgatcttttgctgggacttcactgtcactcatgaaaaagctgtgaagctaaaacagaagaatcttagcactgagataagggtaaggcgagctcactttactcatttgccatcggctggtctccttcccttctccagtatacctgtaacttttctttttttttttttkgaattggagtctcactctgtcgcccaggctggagtgcagtggcgcaatcccggctcactgcaggctccgcctcccgggttcacgccattctcctgcctcagcctcccgagtagctgggactacaggcgcctgccaccatgcccggctaattttttgtatttttagtagagacggggtttcactgtgttagccaggatggtctcaatctcctgacctcgtgatccacccacctcagcctcccaaagtgctgggattacaggcgtaagccaccgcgcccagctgttttttttttttttaacggaatctcactccgccgcccaggctggagtgcagtggcatgatcttggctcactgcaacctctgcctcccgggttcaggcgattctgctacatcagcctcccaagtagctgggattacaggcacctgccacctcacttggctaatttttgaattttttagagatgaggtttcactatattggccaggctggtctcaaactcctagcctcaagtgatccacccgccttggcctcccaaagtactgggattacaggcgtgagccagccaaggcaatgattttcaacccagagaaatctggcccctcagggggacatttgacaacctctagagacttttttgattgttacaattgggaagaggggtgctcttggtatctagtgggtaagaggccagtgatgctgctaaaaatcctacaatgcgtagaacagcacctgcagcagagaattatgcagcccaccatgtcaatagtgcagaggttgagaaaccctggtctatagacacaaacttattaaaaaaaaaaaaaaaaaaaaaaaaaaaagcagctgggcatggtggctcatgcctctaatcccagcaatttgggaggacgaggcaggcatatcatgaggtcaggagttcacgaccagcttggccaacatgatgaaaccccatctctactaaaaaaaggacaaaaaagtagccgggcgtggtggcgggcacctgtaatcccagctactcaggaggctgaggctggagaatcgcttgaacccaggaggcagaggttgcagtgagccaagatcgcgccactgcactccagcctgggcaacaagagtgaaactccatctccagaaaaaaacaaagagcaagctgattttataaataaaggggctttaaatttttttttttttatgattttcgagacaaggtcttgctctgtcacccaagctggagtgcagtggtgcaatcataattcactgcagtgtcgacctcctgggatccagttagcctctcccacctcagcctgctgagtagtggggactatgggtgcacaccaccatgcccaactaatttttaaattttttgtagagagagaatctcactatgttgcccaggctggtcttgaactcctgggctcaagtgatcctcccacctcggcctcccaacatgctggaaattcaggtgtgagccaccaaacccagccaaataaaggggcttcaacaagagggttgcagatgtgagcttctttctcagtgtagatacccaaccttattcttcaagaaagaattttgtgacctcagtgtgcttttcttaagaacatggtcccgatctattaattccaactgtttctgaaagatggaagcagtgtttggagattcttggcccatttcagagtcctctatgggtctcccataatccatgttcatcatgaatgttccccctctctctcacctgtggatttgggctggattcatgtctctggatgtggcaagcattccctggggatctttgctagcagtggagagggatctctggataaacttgactttcatttatttttatttatttgtttatttatttatttgttgtttgagacagagtctcactctgtcgcccaggctggagtgcagtggtgccatctctcctcactacaacctccacctcctgggttcaagtgattctcctgcctcagcctcccgagtagctgggattacaggcatgcaccaccacgcccggctaatttttgtatttttggtagaggcggggtttcaccatgttgtccaggctggtctcaaactcctgacctcaagtgatccacccgccttggcctcccaaagtgctgggattacaggcgtgagccaccatgcccagccataaacttgactttcttatgtttctaggagaacctgtcagagctccgtcaggagaattccaagttgacgttcaatcagctgctgacccgcttctctgcctacatggtagcctgggttgtctctacaggagtggccatagcctgctgtgcagccgtttattacctggctgagtacaacttagaggtaaccaacaccagggtccagggcagagagaaccaggtgaagggatgagatgctggaggggaagggtggtgtgcagcctacggttcaacccaggatctatggccagcagcatcagcactagcagagaacttgttaaaaatgcaggggtgaggcacagtggcttacacctgtaatcccaacactctgggaggccgaggcaggaggatcacctgaaacccaggagttcgagaccagcctgggcaacatggagacttcatcgctaaaaaaattttaaaaattagcctgtcacrgtggtgtgcacctgtagttctggctacagtggtggtcattcattggtgactacagtttcacatgaatggagctcagctgtgtcgtttcacagccctgrggccaggccttgccttgtttgatctcagttaattcttgcaacatctctatgagtcatgtgatcatctctccattgtacagatggagaaaaggggctcagagaagctaaggatctggccccaggccttgcagcttacgtgtggggagggagccgcattggaacccaggttaccctggctccaaaactaccaccaaaaatgcaagtggtgcttttgaaccatccagaggtagacggaggtagggtgaggccatgcagggaggatatgggaatgtgagatatcagataaattcattggaatccctgactccaaggcccatggaaggatgcctagcagaagtgcagtcccggctccactcccagccaaatgccagagtgctgcctcctcctggaggcccagtgcctctcccagcctcacacaaaagtgcagcacagggccaggcacagtggctcacgcctgtaatcccagcactttgggaggccgaggcaggcagatcacttgagatcaggagtttgagactagcctggccaacatggtgaaaccccgtctctactaaaaatacaaaaattagctgggtatgatggtgcacccctgtaatcccagctactcgggaggctaaggcaggagaatcacttgaacctcggaggcagaggttgcagtgagccgagatcgtgccactgcactccagcctgggcaacagagcgagactccggctcaaaaaaaaaaaaaaaaaaaaaaaaaaaaaaaaaaaaccagcagcacgggctagcagagacacgycaaccccctaattcagaactcagagagaggtgaagcctggtgaaaatgaacaaggccacttatgctaaacaggagggagcacatcctcattgccctgggcatcttggtaaaaaagggaaagccacagaatgattgttcgagctcaggctcctgagtcagacacacctaggctccaatctgccacttccttgctgggtgaccctgggcaagtgtcttcccctccctgagcctcagtttgcttggcacggggtaaggaaattaatggtagcttaacaaaatagttaacctagccgggcgcgatggctcatgcctgtaatcccaacaccttgggaggccgaggtggatggatcacctgaggtcgggagttagagaccagcctggccaacatggggaaaccccatctctactaaaaatacaaaaattagctgggtatgttggtgcgtgcctgtaatcccagctactctggaggctgaggcaggagaaccacttgaaccgaggaagtggaagtttcagtgagctgagatcgcgccactgcagtccagcctgggcaacacggtgagactccatctcaaaaaaattaaaataaataaatagataaatagttaaccgcagaggagctacttctcgggttttctatcatgggagacttttgagtgaagcagaaaggggtacagtgtacaagtcagccctccgttctctccccmatcccctgcagttcctgaagacacacagtaaccctggggcggtgctgttactgcctttcgttgtgtcctgcattaatctggccgtgccatgcatctactccatgttcaggcttgtggagaggtacgagatgccacggcacgaagtctacgttctcctgatccggtaggtgatgtgtcgcgcccaacaccagcctctatttccacagagagaagtgggatggcagctagaaaggattatgctttagtatcaaagttttttctccagagaggaagaatttcaaaagtaaggtgtggctgggcgtggtggctyatgtcagtaatcccagcactttgggaggttgagtggggaggatcacttgagaccaggagttcgagaacagcctgggcaacatagccggatgctggctctacaaaaagctggatgcagtggcatgcacctgttagtgccagctactcaggaggctgaggtgagaggatcacttgatcccaggagtttgagcttacctatgattgcaccactgcactccagcctgcgtgacagagcaagaccctgtcttaaacaacaacaaaagagtgaagtgtgtttgtgtggtgtgggcttttgctcaaagtcatggcttgattgctttcctaattgctaccagcaggggattgatgtagttctcaagtatgggatgtacagatgggcaggcagtgcacgcacaaaggctcctgggctgaggacgggactgaaatcatccagcgttccccttagtcaagctgtgagtcctggtacccactgcctcaggcgggaggaagggcccatttttgtaattccaccacccaaacaaaggtgggaggagtgctttgggcaactcactggcacccatggggtgcctttttgtgattcccacaaaggcatcatacgtgctagaagtgatcccagagttttgatacacaaagcctggaactgcccaaattttgtccctctagtttcttccctkactcgttcctggttatggtggggtttataagtacaggtctgtaggccgggcatggtggctcatgcctgtaatcccagcactttgggaggccaaggcaggtggatcacctgaggtcaggagtttgaaaccagcctggccaacatggtgaaaccccgtctttactaaaaatacaaaaattagctgggcktggtgacgcatgtctgtaatcccagctacttgagaggctgaggcgggagaatttcttgaacctgggaggcggaggttgcagygaaccgagatcctgccactgcactccagcctgggtgacagagagagactccatctcagaaaaaaaaaaaaagtgtaggtctgtacaatgcagactgagtttctttgctgatcagttccagagcccttgccttaccacggtctgtgagatccggctcccggccagygctccagcctcattttctccccrtccttcctgctcactgcctgtccccgtcacagacctcctaagcgttcacaaatatgccaaaccatattcccacctctggacctttgcatgggcctggaatgttcttcccacacatgaccacatggcttgcttcttgactgcattttgcgttcttcaaacatcaccctcgtgttgcactcttccttgcacaccccattaaaaataacagctccctaccaccttttctcctctgcagtataattttctttcttttttttttttttttttttgagatggagtctcattctgtcgcccaggctggagtgcggtggcatgatctctgcagtataattttcttaccacttcctgacatatttgtatttatttattatcttcctctcccacagtttatggggaaatctttgccttgttcacagtgtctgggatatcataggtgtccaagaatgattggtgaatgaataagcaaattggtcagtcagttgattatatccaattcatattatgaaaattccagccaggtgcagtggctcgtgcctgtaatcctagcactttgggtggccaaggtgggaggattgcttgagcccaggagttcaagaccagccttggcaacatggtgagactccatttctataaatatttaaaaattagtcaggcatggtggattgcacctgtagtcccagctactcaggtggctgaggtgggagaagtgcttgagcccgggaggtcaaggctgcagtgagccatgaccacaccactgcactccagtttgggtaacagagtgagaccctgtcggaagaaagaaagagagaaagagagagagagaaagaaagaaagaaaactctgactatattcctatgccctcattattccccacatcccagccaccgatccatggtgccacttttaaaagtttgtatagaaggggaaatgttaggtctcactgcaccccataaccttgcatattgagtatgatgggcataaaataccatctactagatgatggaattgtaaagactgagggggatgattcaataaagaggttggcagtgtacgctgggtcagcacccaataaacattatgtacatttactatcattataatgggaagtgaaatcagatcatttggagatgcaacaaaagagaatgtatcagtcagaataagttaggttatactgcagtaacaaccccccagatctcagtggcttcgaacacaaaggtttatttcttgctcgtgttatatacacagtgtggattagcaggagggaccttcttatgttagttactgagggatccaggctcagagagaagcagccatcttgaatatcgttgatcgccattccaaagggaagatgaggagttctggagagtctcacaggggcattaagtgctccagcttagaagtgacacacattagctgggtgtggtggctcacgcctgtaatcccagcactttgggaggccgaggcgggtggatcacgaggtcaggagatcgagaccatcctggctaacrtggtgaaatcccgtctctactaaaaatacaaaaaaaattagccaggtgtgrtggcgggcgcctgtagtcccagctactcgggaagctgaggcaggagaatggcgtgaacctgggaggcggatcttgcagtgagctgagatcgcgccactgcactccagcctgggtgactgagcaagactccgtctcaaaaaataaaaaaaaaagaagtgacacacattgcttctgttcacaattcattcactggaactagccatgtgcccccctccaaccacaggggccaggaatttctatcttaccatgtgccccaaaggagctatttgcagacagaatgaaagactgccattgaaggtaatcataaatgttgtctcttctgtttagaaacatctttttgaaaatatcaatcattggcattctttgttactattggctcaacaccgtggccctgtctggtgaagaggtgagattctatgcttctctgccttaagtttggtttcttagcatttgaccaacagggaggacaggggtttctcaagagccatcacactccgtatttggtattaatcccttgtgggaagagaatgaaaactaatctggaaagcaacataaggcaaaatgggtctcaacaaaaaagctcaggttctagagtcaggaggacctgatttgaaggccagctgtgctgtgtcatcttccgagtcacttaatctctttgagcctcagttttctcatctgtaaaattgggattaaatgatatcatgtgtagtataagttcagtgcccagcatatgcaatagacactagtaattttagtgctagtctgtcctaacagctttggggttggacaaaattctttttgatccttgatgttctatttttcctgtaacctagataccctgggctttaccaatatgtaaactcataaatgctggcagtaacaattatgtcctaatgctgactgtttctggccgtccttcacttaactacagtttctagtcttcactgacctcagagaatgggtgcctgagggtggtgtcccatgtggatttaggaacaagccagcctccctggccttctcattgggatgcctctgcccctgctactgcatcccccatgagaatgtgccttcacatcacacagcaatccttagctgatggtcattgtgagctctcagatacccaggatgccctggggttggaagtagagtcaggaatcaggagtctctctctatttctctgtcacccattattcctgggccctaaaatagctctgttgtgtctatactcaaaccatcttacatgaacatggcaccctcaacttctctccctaattgtcgaagagattcaaaatcagccctccaagttagtatggttagagcagataccatattcttcttccatgcattcatccattcatgcatccatccatccattcccccatcattcatttatccatccatgcatctattcatctgtccatccatgtatccatctatccattcattcatacatccatccacttatccatttatccatccatgtatggatccatccatccatccatatatttatctattcattcatgtattcatccatccatttatctaaccatccatccatttattcatccacgtattcattcatgcatgcatccatctatctgtcaattcatgtattcatccagccatctattcatccatccattcatccatccatctatatacccatctatccactcatccatcatccatccatttacccatccatcatccatccatccttgggctgtgcacccaaaagtttcctctcctccttcagccaaatctaaaagctcccagtctatcagctgatagcactgacttcctgcagaagttcctagccactagtttcataaactgactaatttgagcttccagtttacactagcctactaaacctctaggccactttcttaatcaagcagacattaattgattttttgtaaggtaaataagcaaaaagagtgaaggcattcttagccattggcacttctggctctgttgaagaaaccgattacccttggctgagaaatgggatccagagrggatagggcagggaagaaaagttttacggggagagatcatgaacagggaaagtttgggtatgtgtggaaggcaagctttaatgggrgaaagaaggaaacccaaaagagaacaacatccctgggaacaaactcagctgcattttttcagagtgggtctacttttttgagtacacaaggacttggtcaaacccaaccattagctatgtcctgatgggtacatagagccaggaacagaggagaattgagctgaggccacagccccttcccacatcctgactcttgtttgccttccagtgttgggaaaccctcattggccaggacatctaccggctccttctgatggattttgtgttctctttagtcaattccttcctgggggagtttctgaggaggtaaatatttgccattcttaagtaattagggcctgatgctgtaaacagaacctgattcctggctgagtgggacatacaggtgcctgacatactcaaagcgtgcgttgttccaagtctgcctgttgtccttggggatactgttcacttctaaattagctaaaatttcaccttaacctgacagttctgttgtcatagttcactcggttcagttgaccttttacaaccttttgaaaacaaattctaaaaataaaagacagaaactgagccatttgaaatcttatccagccgagggcagtggctcacgcctgtaatcccaacactttgggagaccgaggcaggaggatcacttgaggccaggartttgagactagcctgggcaaaataggaagactctgtctctatccaaaaaaaaaaaaaaagaagaagaagaagaaaaaggcaaagaaagaaaagaagaaaaaaagaaatcttatccactgtagataatttcaatattctagtatatattcctccagatttttctatgcacacattgctctgtgtgtgtctttactatataatgctatataattttcaaaagcaaaaatggagtcacactgcaacatattgtagaatttgcttttactaatctgtcactatgccttgacatctttccatgtcagtacatgtagatttatctcattgttttaattgaattaatgtattaattttatattagatatctatctatctatctatacagaattgaggcactgtcactgtcccatgtctggttttttaaatttagtaattcatttttttaataatatgatgagcctctcattccttatagacatttatgtatttccgcaagctgctctagtaataagatggtctgatgttgattattttctcagtggatagattcaatgccaaatttcctcattcatttttgccaaaatgtgcttttattctagcctctgtcgagggcctggacataaaggtgaaaaggtttggccgggcacagtgactcatacctgtaatcccaacactttgggaggccaaggcgggtgaatcacctgaggtcaggagttcaagagcagcctggccaacgtggtgaaaccctgtctctmctaaaaatacaaaaattagccgagcatggtgrtgtgtgcctataatcccaactacttgggaggctgaggcaggagaatcgcttgaacccgggagatggaggttgcagtgagccgagagggcgacattgccctccaccctgggtgacacagcgagactccatctcaaaaaaaaaaaaaaaaaaaaagtgaaaagatttttttttgacagatctttttttttaaattggcaactcatctttatgaataaattaatatgaaatcaagtttccccagagtaaatggaaacttggtttccttcttgtggatttagaacacagggaaacataatttgatagcagcaaccaaaaatttaaaaatgtttatttgagttgagaggtgctgagttcatctggttcatgaaaaaataaggtttaattagcaaagaggggtataagataatagtgggataatttaaatgttcagggtaacaaatattctctagaattttttaaatcactttagcagtacccccactagactgcattgtgttaaattagttttccctcaatcccttcaattacttcttcaaaaacatgcttatagatttagaacttttgaaaaattttcaagggaacttacgactttatttcaagctggggagggtctcttttgttgattgtcctagtctgtgggggatcttctgaaagtgggagttatggtttgggtactaaactcagtatgttttcacagaatcattgggatgcaactgatcacaagtcttggccttcaggagtttgacattgccaggaaygttctagaactgatctatgcacaaactctggtgtggtaagttttgtgactcagcaaaatgcccagtggttcccacatgactgtggagctggtgttttggtggcaaagtcccagaatctgttgtttttaaagctgcaggggtgatamcccatccagccagtctgagaaccatgaatttagcatttagactatcattttcctttatgagagcttaaggacttcagacaagaatcagcatagagcagggatcgcaacctggaagcccacaggtcgtgtccagctttgcaggtgtgtttcttttgtccctaaaaatatgaattaaccactgctatggtctcaatgtttgggtctcccctcaaattcatatgttgaaaccttacttccaatgtgatggaggtggggtctttgggaggtgatttgatctttgacatggcccttaggaataggattagtgcccttataaacaaggcctgagagaccccttgccccttctaccacgtggggacatggagagaaggcaacatctgggaatcactaagcagggcctcaccagacactgaatctaccagcaccttgatcttggacttcccaacctccagaaccataagaaataaatttctgctgttttatttatttatttttattttttagacggagtctccctctgtcgcccaggctggagtgcagtggtgtgatttcggctcactgcaacctccgcctcctaggttcaagtgattctcctgcctgtctcccaagtagctgggactataggcatgtgccaccatgcccagccaatttttgtatttttagtagagatggggtttcatcatgttggccaggctggtcttgaactcctgacctcaggtgatccgcccaccttggtggatcccaaagtgttgggattacaagcatgagccaccacacccagcctctgctatttataagccacccagtttatggagttatagttatagcagcctgatggactaacacaccacctatatttaaacttcaggagatttcacataacacctaaatttctggcttctctccagaaacatctggcttctctccacaaagatctgtggcaaactgagcatctccagtttgtcacaatctccacctttaactgttgtctgttagcattgatttgccattttgctttgtccttaggttgtttcaatgcaaactttactttgcatccatgtctccacagcaatgggagaataaagaaacacacagagagggctgtgtgtttcttatatttgatacaccatttggtgggttctctatagttttttggatttgtgacgtctgttttagaaactctgcgtgcattgagaatagccaactggttgcagcaaatatttttacaaactcacctagacactgcaaacaattagccagtggctgtgtttccttatttatttatttatttatttatttttaattttcttattatttttttgagacagagtcttgctctgttgctgaggctgaagtgcagtggtgcaacctccacctcccgggttcaagcaattctcatgcctcagcctcccaagtagctgggactacaggcatgtgccaccacacctggctaatttttgtattagtagagacagggtttcactatgttggccagactggttttgagctcctggcttcaagtgacccacctgcctcagcctcccaaagtgctgggattataggtgtgagtcaccatgctcagcctatttatttatttttgagacagggtctcactctgttgctcaggctggagtgcagtggcatgatcatggctcactgcagcctcaacctcctgagctcaggcaatcttcctgccttacttttccttacttattttaacatgatgcagttaatgccggaactctgtgtggtgaatcacattcccaggttccatctgatggggtgttgctaatttgaaagtattggatttggaactggataaactgaattctgaggctggctctgccactcatggagatcactgtgcttgtctgaacctcagattcatctgtaaatgcacataagaatagctacctttaaggccaggtgcggtggctcatgcctataatcccagcactttgggaggctgaggtgggtggatcacctaaggtcaggagttggagaccagcctgacaaacatggtgaaaccccatctctactaaaaatacaaaattagccaggcgtggtggtgcatgcctgtaatcccagctactcaggaggctgacacacaagaattgcttgaacctgggaggcagaggttgcagtgagccaagatcatgccatggtactccagcctgggcagcgagagtgaaactctgtctcaaaaagaaaagaaaagaaaagaaaaggccaggcacggtggctcacgcctgtaatcccagcactttaggaggccggatcacctgaggccaggagttcgaggccaacctggccaacatggcaaaaacccatctctactaaaaatacacacaaaaaattagctgggcgtggttggaagtgcctgtaatcccagctacttgggaggctgaggcaggagaatcacttgaacccgggaggtggaggctgcagtgaacagagatcacgccattgcactccagcctgggcgacaagagtgaaactctgtctcaaaaaaaaaaaaaaaaagaatagctgcctttgaatcatgttgaggattaaatgccatggtaaatgaaaacgctttgcaaacaccaatatgtcatacaacgggaaagttttattttctgactctttaaagttgccctgggtgatttggctgtctgcaaataactcaaagttaatgagtttattttttagagacagtgaggacctttcttttgtagtttaggtgatgtgtttgcatgctgctagatcacccactggcaatttggcagtttacaaagtcctttcttccacattatttcaactaggatgccattgggcaagttacttaaactctctccaaaccttagttttctaatctttaaatggtacagatacctactcacagggttttcgaggggattaaataggcatggtggctcacgcctgtaaccccaggactttgggaggctgaggcaggcagatcacttgaggtcaggagttcaagaccagcctggccaacatggtgaaaccctgactctactaaaaaatacaaattagccggctgtggtagcagatgcctgtaatctcagctacttgggaagctgaggcaggagaatcacttgaaccagggaggcggaggttgtagtgagccgagatcatgccactggctgcactccagcctggagatagaacgacactccgtctcaaaaaggaaaaaaaaaaaaaaaagaaattaccattatgacttctgggcctttgagatttttgttgataaatcatgaataagcaccatcaaaaacacatcttttttttttttctccatggttatttcagttctaacctttgcgggttttaggagaatattgcctttgatgatgagttttacaagaagataatataatgacagaaaaggatatatgttagggacagtrgtagagatgaagtgaggaacatgtttcccaagttttagtctattgtacactagcctgcctattttttggtatagtgacgtttcacctgtaccattatctacttaattttttttattatttgccttttttttttttttttactcaaataagtttttttttaatgccatggtagatgataactgcttttcatcagcctcccaaagtgctgggataacaggagtgagccaccatgtccatttattcttctcaaaaaaccctgtgagtaggtactagtacgtccaccatttaaagattagaaaactaaggtttagagagagtttaagtaacttgcccaacggcatcctagttgaaataatgcagaagaaaggcctttgtaaatggccagactgcttttcccaacatcggcaatcttcctggggtcagtaagaccctagatgtcaaaacgtcaggtgcctgccaccacgcccagctaatttttgtatttttagtagagatgggggttttgccatgttggccaggctggtttcgaactcctaacctcaggtgatctgcccgcttcggcctccaaaagtgatgagattacaggcatgagccaccacgcctggcctctcacatatatttttaagggagtctttatttacaatcataaatggaaaaccagtgccatttgaaagaaatcacaaataactggaaaaataaaagcaatcccattccaaaaagtcattaaattctagcgagatgttacagtttgctaaggctctcagcccgaagcctactcctttcttgttaaaaaatgggagaatggcattctagaaccacactgagattttctccttttgttgctcacgagcaccgcgggagagttgtaaagggaatgcctttctcatttggaactcagtgctattcagtgccttgtccctacaggacctcagaccttgaataccatgggggaggaagaaggagaggggcaaggcatgtgggacatgctagcttagggcatgctgaataccatctgttggtttaataggtgggtgggagatttctctataaaatctcttttccagagctgggaagaaggcagctgaggatactgggtatggtgggaatctgcctaatttgctgggatggaagcaggccccctctgtrttcgtttgctggggctgccataacaaagtctcacacactgagtgccttaaacaacatcaatttcatatcttacagttctggaggccagaaggccaagatcaaggtgcgggtggggttggtttcttctgagggtcataagggagggatctgtctcaagcctctcyccctggtttatagacggccatcttctccccatgtctttacatggtcttcatttctgtgtgtgtctatgtcctaatctcttctttttttgttgttgagatggagtcttgctctgtcacccaggctggagtgcaatggcacaatctcggctcactgcaacctccgcctcccaggttcaagcgattctcctgcctcagcctctcaagtagctaagattacaagcatacgccatcatgcctggctaatttttgtattttttgtagagatggggtttcaccatgttgcccaggctggtcttgaactcctgacctcaggtgattcacccccycttggcctcccaaagttctgggattacaggcataagccaccgttcctggcctcctaatctcttcttttagggacaccggttgtactggattagggcctcctacagtgatctcattctaccttaatcacctctcaaaggccctgtctccaaatacastcacattctgagatattcggggttaaggcctcaatatatggattttggggacacacaatccaggccacaatatcttctttctcttccccccaaccatcccagattcaccccgactccttgtgtctccgccagcctctgacactcaccctctctccctcacaggattggcatcttcttctgccccctgctgccctttatccaaatgattatgcttttcatcatgttctactccaaaaatgtgagtcagtccgacattgccatcaatcagctttgttcagtcacctgtgacctggtggcgcttaaagctggggaagggggctctgcaaaggtgtcaggaagccaggcctggctggggtccctctgccgctgctccggctgcagatgggaggtggctgcctctctctcttcagatcagcctgatgatgaatttccagcctccgagcaaagcctggcgggcctcrcagatgatgactttcttcatcttcttgctctttttcccatccttcaccggggtcttgtgcaccctggccatcaccatctggaggtaggagaaggtggccttgggggaggttttagagactgggtggatgggtgtgtgttttaaaacgtaggttttattataattcaggtgtggtgaggccgggtgcagtggctcasgcctgtgatcccggcactatgggaggccaaggcgggtggatcacttgaggccaggagttcaggaccagcctggccaacatggtgaaaccctgtctctactaaaaatacaaaaattagccaagtgtggtggtgcatgcctgtaatcccagctgctcttgaggctgaggcaggagaatcacttgaacccgggaggyggaggttgcagtgagccaagattgcaccattgcgctccagcctgggtgacagagtragactctgtctcwataaataaataaataaataaataaataaataaataaataaataaataaataatgtaggtatggtgaagcccaacaggtcaggaatgaccatcactaaaaagatagtttattactcacagttcctgagaagagggggcactctatgccacaagggaccacacagggaagcatcagggttgttcaggaggcagagggagtgaggggaaacgggctagaggctttattgtggttttctatggtaaggaatgggcaaggcaggggaagcaggtttagggttggctggtttgtcagtaggctgtgggatatggatccgccctgagttgtctggcacctggccctggggtgattagggcaggggagtggtggcccagagtgtgagagcctgataaagggggcggttgcgggtgtgggatctggattggttggtttgcatttgaaaggtgtgctttgtaagctagcccagggaagggcagctagccctgggagctggagtcagtaagaccccagatgtcaaaacatcagaataaaaagacatgcttaatacagtgcctaactcaagttccctggctaaccaacagacactaaaagccagggagggaatgcatcctagtttgatcaccacccatccgatgcccacggtcaggagtagctttctcacttctgccaagaactgaagcttcccagaatggggagatgcccccccaccccgttcctccacatccagaacagaacttcatctaaattaacagaaaggcaggactcatctggctcctcccacctctccaaccccacttccctttggctccactgttccccgccccaccaccctcaccccattcctggaagccagcaagcccctcccaacaagggcagagtcctctgagtgaagtccttttcccactccctttgcttggctgcctcctctccaccctctgattctcagctccaaggccctctccaagatctgatcttcacagccctccttgtctgctctcagttccccactgcttctctctctcagacctgagtttctttccttcattctatcattcataatcaggaatgcctctgtgtgagtctttaattgttactcaacgattgtccgtttttcccaccagaatgtaatcccaatagggcaggaacttgcttaatatgaagtccccagagcctgactagaacagtgcttaacagaataagccatggttgaatgaacaattgaatgaattaatgaacaagggagatgatttttaggacacatgtgaaactggggctctcagttccttgctccacaacacccttgctcctcttggcatatccactctcttctctctcttccttgctccacaacgcccttgctcctcttggcatatccactctcttctctctcttcctcaccagttccttgttgccctatagtttctgctcattcctccatagctaacaggcttccctctttatgcttcttaattcaatttctttctttgagacagggccttgctctgccacccaggcaggaatgcaggggcgcaatcacagctcaaactcctgggctcacgtgattgtcccacctcagcctcccgagtagctgggactataggcacacatcaccatgcctggctaattatttttttattttttatttttttgagacrgagtctcactctgtcatccaggctggagtgcagtggcrcaatctcggctcactgcaagctccgcctcccaggttcacgcccttctcctgcctcagcctcctgagtagctgggactacaggcgcccgccaccacgcccagctaattttttgtatttttagtagagacagggtttcaccgtgttagccaggatggtcttgatctcctgaccttgtgatccacccgcctcggcctcccaaagtgctgggattacaggcatgagccaccgcgcctggcatgcctggctaattttttttttttttttttttttagaaatgggtgtcttgctatgttgcctaggctggtctcgaactcttggcctcaagagatccttctgccttggcctctcaaagtgctggaattgcaggcgagccaccatacttgtctttaatttcatttctttttttttttcagacagggtcttgctctgttgcccaggctgmagtacagtggtgtgatcacagctcactatagcctcaacctcctgggctcaagtgatcctcccacctcagcctcctatgtagccaggaccacaggcatgtgctgccatgcccagctaattatttttttgtagagatggagtctcactatgttgcccaggctggtcttgaacttctgggctcaagcaatcctcccaccttgacctcccaaactgttgggattagaggcatgagccatagtgcctggccttaattcaacttcttaagaaaaaaagtctgactgcccccattcatatcattgagccaagttactgcagaagtcactgcttggcctttggattggctgctgttgggtcagctctgatctgagagcmggtccttagagtacaggtcaccccagcaaggctgagagcaagagggtttctttgggaagtgggtgtgattggatcaggcaagacttgatgttttcaggcccagagcccagaagggacaccctgattctagaataaycatccctgagtcttgtgctagagatgttcttccatctttgttttaccagattgaagccttcagctgactgtggcccttttcgaggtctgcctctcttcattcactccatctacagctggatcgacaccctaagtacacggcctggctacctgtgggttgtttggatctatcggaacctcattggaagtgtgcacttctttttcatcctcaccctcattgtgctgtgagtgtggtacccggggaatctagcagggaaagccaggagctctcgagggaaacagcagtagggatgtttggttggaaagcaaatggctatagcatagctcagtgttctgggtgactctacccttgcataggtagttttctttccttccttccttccttccttccttccttccttccttcccttcctttttttcttttctcttctcttcccttcccctccctccctctctttctccctttctcccttccctttcctttcagttccgttcctttcctcttcattttttcttccttccttccttccttctttctcccttcccctcccttcccttccccttctttctcccttcccctcccttcccttcctttccccttcccctcccttcccttcccttccccttctccttccttccttccttccttccttacttctctctttcttttttggttgagacagggtcatgatctctcactcaggctagactgtagcggcatggtcatggcttgctgcaacctcaacctttcaggctcaagccatcctcccacctcagcccccaagtagctgggcttgcaggtgtgcaccactacacttggctaatttttaaattttttggagaaatggggtctccctgtgttgcccaggctggtctcaaactcctggcctcaaattatcctcctgcctcagcttctcaaagtgttgggattacaggtgttagccaccttgcccaagcttgcattgatagtttttttgaagttacttagcctggtgcagtggcttgtgcctgtagtctgagcttcttgggaagctgagatgggaggattgcttgagcctaggagtttgaggctgcagtgttctctgatcgtgccactgcactccagcctgggcaacagagcaagaccccatcactgggggaaggggggaaaggttatatatactatcttcttgtcttagggattttttttttttttttttttgagacagagtctcgcactgtcacccaggctggagtgcactggcgcgatctcagcacactgcaagttccgcctcctgggttcatgccattctcctgcctcagcctcccgagtagttgggactacaggcacccaccaccacgcccagctaattttttgcatttttaatagagacrgggtttcactgtgttagccaggatgatctcgatctcctgacctcaagtgatccgcccgccttggcctcccaaagtgctgggattccaggcatgagccaccgtgctgggtcatcttagggactttttttttaacttattctattaagaaagcaatacctgcttttctcctcttaaggagatgacatgcccagagatgctcaattaattggtctgaagaggagctgtggcatgggcttatttcccccttcaggaaccattgttccaatgtatttaacctataactctccctgacatgacttttcagaaacatgtttgggccaaatccatctgcaagcacagattccagttcctttgcatccagtggaaattcagagcctgcaaaacatttgcaagagtgtcattctttcttttctcctcttccagaatcatcacctatctttactggcagatcacagagggaaggaagattatgataaggctgctccatgagcagatcattaatgtaagtccccttggatccctctgatgtccgccctcaccctttttaaaygctgtataaacatcctccaaaataaagagaatactacaatgaactctcatatccctgctctcagccctaacaaccatcaatgtttttatattcttatttcatctacactttctcttcccagcaaatcccttatttttattcttagtatttatttattttaattatgatgatkatkattattattttgagatagagttttgctcttgttgcccaggctggagtgcagtggygcaatctcggctcacggcaacttctgcctccagggttcaagcgattctcctgccccaacctcccaagtagctggaattacaggtgcctgccaccatgcccagctaatttttgaatttttagtggagacagggtttcaccatgttggccaggctggtctcgaactgctgacctcaggtgatccacctgcctcccaaagtgctgggattacagccatcacacccagccttattttatttttttagaggtgggggtcttgctatgttgccctggctggattcaaattcctgggctcctgcctcagcctccggagtagctgagattacaggcaggtgccactccatctggctccctggattattttaaagcaaatcttaggctttatattattttttatttattaaaacttagatatatatatatatatatctctctataagataaatacttttatttcatttatttatttattttgagacagagtttcactcttgttgcccaggttggagtgcagtggagcaatcttggctcactgcaacctccgcctcccgggttcaagcaattcttctgcctcagcttcccgcatagctggaattacaggcgcctgccaccacacccggctaattttgtatttttagtagagatggggtttctccatgttggtcaggctggtctcaaacttccgacctcaggtgatccgcccgcctcggcctcccaaagtgctragattacaggtgtgagccatcgcccccagctgagataaagacttttaaaaataactacaatatcatcatcacacttaaaaaacttamcaataatttattattatcatcttatatccaatgtttacatttccccaactgtccccttaagtgtctttttatactagaactgcacaaatcaggatctgaaaagggggtacatgttgcatttggttaatgtctctctctctctctctctctcttttttttttttttgagacagaatctcactgtgtctcccaggctggaacgcagtggcatgattttggctcactgcaacttctgcctcctgggttcaagtgattctcctgcctcagcctcctgagtagctgggattacaggtgtgtgccaccacgcccagctaatttttgtatttttagtagagacggggtttcaccatgttgactaggctggtctcaaactcctgacctcaagtgatccaccygccttggcctcccaaagtgctgggattacaggcgtgagccactgcgcccagccaatatgcctaactttcttttactctataaccatttaccacttcccctccccacttcctcttttctttttattgttaaagaatgcaggtcatctgtttcatattttccatatcctacatatatcttttttttttgttttgacatggagtcttgctctggggcacgtgcctatgggggatactggaaaccatttttcctggstattgagacgtggcatgtaagttgcttccagcagccgacttctggaggctactttctcaagcctgttaggggaattgctttagaggagaatattacagtgcaggaaggcyctgggggataattyggttttactgtgaaatgtttcttttctttcaccaaaagatggcagtaacctccatccaacttctaggatcctagctgcctgaaaaccgacgttcttcccatcaattgctttctcaattccataccatcattcattcatatttttgtttctttctggttttgttttccttcttggtaggagggcaaagataaaatgttcctgatagaaaaattgatcaagctgcaggatatggagaaraaagcaaaccccagctcacttgttctggaaaggagagaggtggaggtgagtctggaggctgccttggggacccctgggacacgagcytgcctccatgtaaaaagcgcrtcagagaactacagaccaagctcttgggatcatggaagggcccttcactctctgtcttaagwatttctgtggtttttacttaaaaagtaatattcatggcyaggtgcagtggctcacgcctgtaatcccagcactttgggaggcctacgcgggtggatcaagaggtcaggagtttgagaccagcctggccaatatggtgaaaccctgtctctactaaaaatacaaaagttagctgggtrtggtggcacgcacctgtagccccagctacttgggaggctgaggcagaagaattgcttgaacccaggaggtggaggttgcggtgagccaaaatcatgccactgcactccagcctaggtgacagagtggcactctgtctcaaaaaaaagtaatattcattttttcagcacttttcatgcctgtactttttctaggtgctggggttacggtgaacaaaacaaagcccccgccctcatggaacttgcacgcttgtttttcacaaccccgataatacagaagtagatcccactgagatgaaaagggccctgaaatctcatctcactatgaatacttcagtgtctattcttttttttttttttttttttgagacggagtctcgctctgtcgcccaggctggagtgcagtggcgggatctcggcgcactgcaagctccgcctcccgggttcacgccattctcctgcctcagcctcccaagtagctgggactacaggcgcccgccactacgcccggctaattttttgtatttttagtagagacggggtttcaccgttttagccgggatggtctcgatctcctgacctcgtgatccgcccgcctcggcctcccaaagtgctgggattacaggcgtgagccaccgcgcccggcctacttcagtgtctattcttgcaaatctatttccctaggcatctgcaaacatacctgtatctaccaacactttaatttacttgtttattacaaaagtgaggctatattatacaaatagtatcataacttccctcccccrcagcccaccactaaatactatatcttgaacgatgtttaattctgtacatatttggatatttgggttgtttctatgtttttaaatacttaaaacagtaggtaatgaaacattttgttacaattattttttgtgcgtttataatcgcagctactcaggaggctgaggtgggaggggaggactgcttgaggccaggagtttaagaccaacatagcgagannnnnnnnnnnnnnnnnnnnagaagaatcgcttgaacccaggaggtggaggttgcggtgagccaaaatcatgccactgcactccagcctaggtgacagagtggcactctgtctcaaaaaaaagtaatattcattttttcagcacttttcatgcctgtactttttctaggtgctggggttacggtgaacaaaacaaagcccccgccctcatggaacttgcacgctcgtttttcacaaccccgataatacagaagtagatcccactgagatgaaaagggccctgaaatctcatctcactatgaatacttcagtgtctattcttgcaaatctatttccctaggcatctgcaaacatacctgtatctaccaacactttaatttacttgtttattacaaaagtgaggctatattatacaaatagtatcataacttccctcccccgcagcccaccactaaatactatatcttgaacgatgtttaattctgtacatatttggatatttgggttgtttctatgtttttaaatacttaaaacagtaggtaatgaaacattttgttacaattattttttgtgcgtttataatcgcagctactcaggaggctgaggtgggaggggaggactgcttgaggccaggagtttaagaccaacatagcgagaccccatcccttaaaaaattttaataattaggcacggtggcaygcaactgtagcctcagctactcaggaagctgaggtgagaggactgctcaaacccaggagtttgaggctacagtgagctatgatcccatcaccgcactccagcttgggagacagaacaagaccctctctctaaaaaaaattaccctgggcacagtggctccctcctgtratccccagcactttgggaggccgaggcgggcttatcacttgaggtcaggggttcgagaccagcccagcaaacatggtgaaacccatctctagtaaaaatataaaaaacaaaaacaaacaaacaagaaaacttagctgggtgttgtggtgcacatctgtaatcccagctacttgggaggctgaagcacaggaaatcacttggacccaggaggtggagattgcagtgagccaaggtcacaccattgcactccagcctgggcaacagtgcaagactccgtgtcaaaaaaaaaaaaaaattaaaaagttattttttgtgaatatttctgccacaaagcacgtacatgacaatgttaatagatattgctatatcattcccttaaaaagatttaatcaatttcattcttaccaagagaatataaagatacatgaaaccctgctctaattccaaagccttgcttgcttcctgagtgtcctgaaaatacagatgaacagtaaatccaccttaacgcaaataccacttatgttggaaattgtgatcttgacagaagtgactgacaagtaatttaccatctgtgcaaatttatactgtcagcacaatttaggtaagggatctagaggcctaaaggtagattctctgaaggtgaggaccacgtctgtgcacttgtcaccccacgtcctaatttattacctggcataatatgaatgctcagtgaatatctgtggaacggccaggtgcggtggctcacgcctgtaatcccagcactttgggaggccgaggtggacagatcacttgaggtcaggagtttgagaccggcctgaccaacatggtgaaaccctgtctctactaaaaataaaaaaaaaaaattagctgggcgtggtggcaggcacctataatcccagctactccagaggctgaggcgggaaaatcgctggaacccgagaggcggaggttgcagtgagccgagatcatgccattccactccagtctaggagataaagcaagactctgtcaaaaaaaaaaaaaaaaaaaaaaagagtatctgtggaatgaatgaatggaatcactctccctaaaaaacaaaacatgttcaatatttctatggcggagacttggccttaatctctcatcccttaacttctataaaatggtgaggggctcacaaattgtgccaaatatgtgacaagacccaraatctgcattcttcctccgtgacgtggctgcttgtttttttctttttcagcaacaaggctttttgcatttgggggaacatgatggcagtcttggtgagtaattaaactgggacagaataagacactaatttatttctggtgaaatatcctaagacaagtgtaagaattgctcatgtgtccrttactttttsagttgcaaattggatccaaactggcttaaacraaattccaagaataattcttgctttaggccttgcctaacgcaggaactcacagtgtcaccagaacccggtttctttcagttccgttcttacccatgttagttccttttgcaatagactctgcctaataagtgcaagacagctttatcaacttcttatatcttctcagagtcagtctggtgggaaagactgagggacccaggattctcayggtgtttcataggatctgactgggtgatgtccccgtctatgaaccaattgttgtgggtgcaaaaatgtggcagttcccttgatcacatgatttcatctgtagatgcaggtggtgcaaccatgaagaccatagggaccaagagtagggaagggtgacttcctaaagaaaatctggggctgatgccaggagagcgaattctgggcaggaaacaaacaagcaaacccatttatttttgggggatagcatttactgatgacttccagtgatgggagttcaagggaaggattatagaaactaaaaggaagaggcaaagaaggcatgagaagctatggaatcttgaaggcaagctggtctttcccttgtagagatggggcagagtgtgcctgcgttaacttctctttcctgtgtcaaacctagacttgcgatctagaagatcagttcaagaaggtaatccaagggcctgatgactcttttggtaacsagacaccaatcaaataaggggaggagaygaaaatggaatgatttcttccatgccacctgtgcctttaggaactgcccagaagaaaatccaaggctttagccaggagcggaaactgactaccatgtaattatcaaagtaaaattgggcattccatgctatttttaatacctggattgctgatttttcaagacaaaatacttggggttttccaataaagattgttgtaatattgaaatgagcctacaaaaacctaggaagagataactagggaataatgtatattatcttcaagaartgtgtgcaggaatgattggttcttagaaatctctcctgccagacttcccagacctggcaaaggtttagaaactgttgctaagaaaagtggtccatcctgaataaacatgtaatactccagcagggatatgaagcctctgaattgtagaacctgcatttatttgtgactttgaactaaagacatcccccatgtcccaaaggtggaatacaaccagaggtctcatctctgaactttcttgcgtactgattacatgagtctttggagtcggggatggaggaggttctgcccctgtgaggtgttayacatgaccatcaaagtcctacgtcaagctagctttgcacagtggcagtaccgtagccaatgagatttatccgagacgcgattattgctaattggaaattttcccaataccccaccgtgatgacttgaaatataatcagcgctggcaatttttgacagtctctacggagactgaataagaaaaaagaaaagaaaagaaattagctgggtgcgatggcttatgcctgtaatccyggcactttgggaggctgaggcaagcggatcacttaatgtcaggagttcaagaccagcctggccaacatggtgaaaccccgtctctactaaaaataaaaaaactagctgggcgtggtggtacatgcctataatcccagctactcgggaggctgaggcaggagaattgcttgaacctgggaggcagaggttgcagtgaggcgagattgtaccactgcattccagcctgggcaacagtgagactctgcctcaaaaaaataaataaataaataaataaagtaaattaaaagtcttattcaaaccaaatatgaaactggtggtgatgtgtggaatgtgtgtgtgtgtgcacatatgtaatgaatacgtgtgtgtataatgtttttgcaggtttgccaaatgattcacaagccacgtggctgttcttaacactgaaaggtccagcagaaaggtgcagttactcaggagagaggagcctcctcttaagtaatcactcgcataaaacctaattggaactgaatttagaaagcagttaagatacattcgaaacacaagcacccaaccagtgctgtcatttattcccttttttttttatttttaagagataaggctgggctgtgttgccagctttgactcaaactcctaggtcaagcagtcctcccacttcagcctgccaagtagctgggactacaggcacacgccactgcacttgaccacgcactttttcattcacttatttttttcattaattcacttcatcggaggaattaatttcttttggtgtcatctttggtaacagttgtatgtagtgttcatccatccattcattcaacaaatatggaccaaatagtggtgagcaagatggtgaacaattcatggtgctgcctgtctagcaggtttagacatgaatttaattcttaagcaataattaattacagttgtagtagatgctctgaagaagcacagggactaagggagacttgtctgtggggtcagtgcaggcaacccatggaagtgatgttggaagtgattttattccccttggggtcatcttagtgctgtttgtgcttttttctttgcttttttttgagatggagttggagcctccctctgtctcccaggctggagtgcagtggtacaatctcagctcactgcaacctccccctcctgggttcaagtgattctcctgcctcagcctcccgagtagctgcgattacgggagcgtgccaccaggtccggctaatttttgtatttttagtagagacggggtttcaccatgttggctgggctggtgttgaactcctgacctcagatgatccgctcgcttcagcctcccaaagtgttgggattacaggcgtgagccaccgtgcccggctgctgcttgggcttctacaatgaaatctgaactctctctgaaagcatcacttctgctcattcaccagatgctaagtgcttccatctagaatgcttctcccttcacctccatcccttgtctccacttcagtgcagccctgcttctcctggaggtgtacatgcagtggatagtggctcatgcctgtaatccccgcactttgggaggctgaggtgggcggatcacctgaggtcaggagttcgagaccagcccagccaacatggtaagaccttatctctactaaaaatacaaaaattagccgggcgtggtggcaagcgcctgtaatcccagctactcaggaggctgaggcaggagaattgcttggacccaggaggcagaggttgcagtgagctgaaatcgcaccactgcgcttcagcctgggtgacagagtgagactgtctcaaaaaataaagaaactactgtacatggaaagcattttaaacagtctaggacatggtaggcagtcaataaatgttaattagcaaggattttacatgcactctttcatttaatcactaccaccgcaagaatactacccctattttacagataaattcagtaacttacccaaggtcatatagctggtaagttgctgaataggaaggcagacttggctttctctgattccaaatcctgttattaaccctatactaagccttccaaggaagtgcttaatagtagttattaataccttatttcatcattcaaattctccaccttttgaggccctgaccatcttagcataggacctaaatccttaatttggcctggctgaatcaaaggtaaaatggatttgggataaagatcaagagacagagatctcatggctctccagagatcttcccacaacacaaagggatattattattattatgaaatttttaaagattggagtcaaactctgtcccctaggctgtagtgcagtggcacgatcctagctcactgcagcctcaacctgctaggctccagtgatcctcccatctcagcccctatttgtaaattttttgtagagatggggtctcactatgttgcccaggctagtgttgaacagcctgttgaacagctagtgttgaacagaggtatctttttttttttttttttttttttgagacagagtcttgctctctggcctaggctggagtgcagtggtacaatcttggctcactgcaacctctgactcctgggttcaagcaattctccttgcttcagcctcctgaatagctgggattacaggcatgtgccaccatgcccaactaatgtttgtatttttagtagagacggggtttccccatcatggccaggctggtctcaaactcctggcctcaagtgatccacccacctcagctcccaaagtgctgggattacaggtatgagccatcatgcctggcctgatgtatcttctttggtcactttttcctccttctttcactctagtcataacatggcacggaagtacatgcagtttagacatttgttgcactcaatgaacaaatctttgttgtttattttaaaattcaagacaatttttttgcaaatgctgattcaaaacgtaccaatccccatctatcatgcctatgccaatacaatctgtcacaaaaaagtttgcttctcattgtcacatagctatggggactggtggccttctaaaatcactgtccagctgctgcaagtgtgaggccagcaacccacggcagggatgcaggagggaagccatggctaagctgtgggcctggacaaaggccacagatggggttgaaaggtgagaagcggtaagctagaggagacagacggcgttgccattaaaaacaattcaacttcattttaatgttgctatgtaagttcacaataaaatccctggaagttcaaattggaaagagcagtttggggtcatgggctcaacaatataaaggcagattcagtgaggggtaagggtagtggctctgggggcagactgacctagatttgaatgccagttgtaccagactcaagacaccttgggtaagtggttttatgaagtacctcagttcttcatcagtagaaagagtgctaacacctccataagacttttgtatggattgagtaagataatgcatgttaaaccacttgtatagtttctggctaactgtaaacaagatgttctagaagttctagttatctttttttttttttttttttttttttttttaagagtcaggttctcactgtgccaccaaggttgtagtgccgtggtgtaatcatggctcattgcagccttgaacttctgggctcaagtgatcctcccacctcaacctcctgagtagctgggaatacaggcatgcaccaccatgcctaattttttagagatggggtcttgctatattgcccagtctggcctcaagtaatcctcctgcctcagctttctgaattgctgggattatcggcatgagccactgtgcccagctaagctgtgacttttgaggcaaccccttcccttccacagagtttagtttcctcatttgtaaaatgaggacaaacctagatatttttggaagtttcttccagttctaattgcctatgatcagatcacatctgttgcagagcttcctaaaaagcctggaaaaatgcaactctgccccctggtggtttgcagctctctattcaagatgctataaatccctcattggcttcaagacctccctaccattttggttgctgtacactgaagcctcactggattgcatggtggcttccccaaattccgtatgccttaggatatgatgcttggcacacagttttcctttagtgctccttttaataattttattagtatggccacaagtttgatgtctacagtacatgttaacatagctgagtacaaatatttgaaataagtgtggcaagttttaaaatgtcaactctgagttatcatgcatgtcccatgcatttacatctgcatctgcaaactgtacaattcaatctgtgcttatcctcactgggtctccctgtgtgcctcagctagggcagggcaggggctcttgtgcgttttttcagacccagattttcaagagcaacagtgttgaactctggcatgccatggtgcatggtggcaacaccgggtttagctttggttcaggtaaaaatgcagtgaccaactattgcatttgtgtgagtcacctgattccccagggcctgggctagcacaaagggtattttgatatccctgtatgaggcccctggcagtttctgaacccgtttcgtcccaccgtgaaagtctagaagtgaggttcgcagtcttctaccatgctgtcagtgatatagctggaaccaagatgggattcgtagtaactcttttcatcaaaggtattaacagtccaaccaacaacctggattcctttagctgaccacttcttcaagtaggccctggggaaagaggaaagccaatcctgttagaataataagcagctgtctcaggaatccataatggccactaagtatggtgttcactgcataccaatggtgcccagagaatgcctcctaactggcctctgcactgtgatcagagggactgttccaaaacccaggatgccatgaacctcctctacactgtcccagcttaaaacatttcagtagctcactaatgatcgccacccccaaatgtccttggcacagccactgaaggtgtgcctgacctggccccgacctgtctccttggcttcatctcacaccacattccccctttcttttctgtgctgattaattttaaattaattgaaagaatattaattttctttcacttcctggaaagaaccatgttccttcctgccagagcacattacatgtatttttctctctgatctggattcctcccaattcccactcacccttcagatcttagcttaactgtcacttccttggggatgctgtttctgacaacccagaccagattagattatagcccatgcacagttttctctgacatagcctgtatcttagttttaactttatattgattggatttttatttgattagcatctctcactctcccacttggctataaacgtcacgagggcagagatcatggctttgattctttacccactgcatcttcagcttctcaacatggaaccttgcaatagtataggcacttaccaaatatttattgaactgaatcatgtatgtctgaaataatactagacctacaactctaattagctgaaatatacagatacagaattgccaaagaaatgattccgagatcgctagcaggttaggaaatggaaattttatggggagaggtgggggagtgcctataacataagacggtagtggggaggctggtgcccacaggatgtcttcactgtggttctgcccaggatcctgtgttggctttcaaaaaaaccagtcacagaaataaaatcccttgctcagcatagtgtcacaggttcattttttttcttcaaaatacactaaaaaaccgaaaatatgtgatcgactcggtctgaaaacagtgaaatatgcctgaactcttcccacctaagaagcgaaattggtaatccaatttagaggtatggtaagctttgcaggtcagaaccaattcaggttgtctactctgttaatccttcctttcaaataagagcattcaggatgtctgtctgggtaaaataaaaaaccttccaacttacggggatacaaaatccttttgcatgaggaaagctgaaattccacacaggtaccacaagatattatgcatgctccaatcgagcaaaatgtccatcataacaaatataaaatgtttccagaaagtatcatagcgtggtttcccatctcctgtatggcttaggctccaaggtctgtgagttaatgctgttattacatcccgatctgtttgtctcatctgcaaaggaatttggggaagtaaaat

SEQ ID NO: 98053 - DNA, 18743 bp, Homo sapiens
gtggtggccgggcagaggggctcctcacttcccagtaggggtggccacctcccggacggggcagctggccgggcagggggctgaccaccctcctccctcctggagggggcggctggccgggcagaggggctcctcacttcccagtaggggcggccgggcagaggcgcccctcacctcccagacggggcggctggccgggcggggggccgaccccccgacctccctcccggacggggcggctggccgggcggggggccgacccccccacctccctcccggacggggcggctggccggcggggggctgacccccccacctccctcccggacggggcggctggccgggcggggggctgacccccccacctccctcccagacggggcagctggccgggcagaggggctcctcacttcccagtaggggcggctgggcagaggcgcccctcacctcccggacggggcggttggccgggcgtggggctgacccccccacctccctcccggacggggtggctgccgggcggagacgctcctcacttcccagacggggtggctgccttgcggagaggctcctcacttctcagacggggcggctgccgggtggaggggctcctcacttctcagacggggcggttgccaggcagagggtctcctcacttctcagacggggctgccgggcagagacgctcttcccctcccagacggggtcacggccgggcagaggcgctcctcacatcccagacggggcggcagggcagaggcgctccccacatctcagacgatgggcggccgggcagagacgctcctcacttcctagatgtgatggcagccgggaagaggctctcctcacttcctagatgggatggcggccgggcggagacgctcctcaccttccagactgggcagccaggcagaggggctcctcacatcccagacgatgggcggccaggcagagacgctcctcacttcccagacggggtggcggccgggcagaggctgcaatctcggcactttgggaggccaaggcaggcggctgggaggtggaggttgtagcgagccgagatcacgccactgcactccagcctgggcaccattgagcactgagtgaacgagactccatctgcaatcccggcacctcgggaggccgaggctggcggaccactcgcggttaggagctggagaccggcccggccaacacagcgaaaccccgtctccaccaaaaaaatacgaaaaccagtcaggcgtggcggcgcgtgactgcaatcgcaggcactcggcaggctgaggcaggagaaccaggcagggaggttgcagtgagccgagatggcagcagtacagtccagcttcggctcggcatcagagggagaccgtggaaagagggagaggggagaccgtggaaaggggagggggagagggaaggggagaaggagagggagagggagagcgagaggctgttatttttctttttgagacagagtcccactctgttgcccaggctggactgcagtggcatgatctcagctcactgcaacctcttcctcctgggctgaagcgatcctcccacatcagcctcctgagtagctgggaatacaggagagtgccaccatgcctggctaatttttgtattttttagtagagacggggattccccatgttgcccagtctggtctcaaactcctgggctcaaacaatcctcccgccttagcctcccaaaatgctgattacggacgtgagccaccacacccagccttgtatatgtttttaattggccgtttgtatttcttttatgacttgtttgttcatgccctgtacactagtccttctcagatttaatatgcacacaaaccacaatcactttgggatattattaaaatgcaggttctcagctgggcgcagtggctcacacctgtaatcccagcactttgggaggccgaggcaggtggatcacgaggtcaggagatcgagaccatcttggctaacatggtgaaacaccgtctctactaaaaatatgaaaaattagccgggcgtggtggcgggcacctgtagtcccagctactcgagaggctaaggcggtagaatggcgtgaacccgggaggcagagcttgcggtgagcagagatctcaccactgcactccagcctgggtgacagagcgagactctgtctcaaaaacaaaaaataaaaaataataataaaatacaggttctgatatggaaggcctgggatggggcttgaaattctccctgtttaaccagctcccaggtgatgacaatgctactggtgtgtggcctaccctttgagtaatttttttactgctacgtaagagcattttatatagtaagaacaatatattgatacaaatacttctccaggttgttgccatctaactctttttttttgagacagagtctcgctctgtcactcaagctggagtgcaatggcacgatctcggctcactgcaacctccacctctaaggttcaagcgattctcctgcctctgcctcccgagtagctgggattacaggcatgagccaccacacctggctaatttttttgtatttttagtagagatggggtttcactctgttgaccaagctggtctcaaactcctgacctaaggtgatccacccgccttggcctcccaaagtgctgggattgcagacatgagccactgcacctggcctgttgtcatctaactttatgataaatgttgccctggctttatatttgtatgtagtcaaatatgttaatagtttccttcatgacttccgtatttcaaaatggcaggtgcttagttcctctctgtgtcttttccaccacaggcaacagatgccctttatgaggtgtttttgggaaacaggcttcgagcagctacgttccgactctttcctcagcttctcatgacactgcttatccagattcatcacagcatcggcctcaccatgtctgatgtcgacatcccaagtggcctgtacacagaacaggaagtgccttcagaggtcacccctttgtggtactgcccatcattatttcattgacattaagtaacacgtactaagcactgggcactgtggtgaacacagggatagccaagatgtagtcccaactgaaggggagcttacaaccttcaaccctcatgagccatcaagatgaaatgcccaggaatcattctgagctttcattggctatctttggttttattagtaacaaggtaaatttggctatctgggttatatctgggttagccaaatgtgatattgtgttagccctttcctaataaatcaagtacagacagaaacaaaacagcctaaacctacctccaaaactgtactgatccaccatgcagtgatttctgctttctgttttattgcatggagagatatttttaagtcccattagagtctcagtagaaatttcttagtgttgttggttgggcatggtggctcatgcctgtaatcccagcactttgggaggctgagacaggtggatcacctgaggtcaagagtttgagaccagcctggccaacatgtgaaaccctgtctctactaaaaatacaaaaattagctgggcgtggtggcacatgcctataattccagctactcaggaggctgaggcacgagaatcacttgagcccgggaggcagagattgcagtgagccgagatcgtgccattgcactccagcctgggcaacagagcaagactctgtctcaaaaagtaataataataataaagacgtttcttagtgttgctatggcacatggatttctttcagagaaagtactataatgtgacatatttaagaacaccagactaagtcagtagacctgagttctagtgcagttctcattcatccattcaactagttctataccctgggcaaatctattgttctgtgcctcagtttccttatctataaatggaaaggtcaggcaaggtgatctcaaaggaccattccagctttattattttgttttattttttgagacagggtctccatctgtcacccaggctggagtgcagtggcatgatcatggctcactgcagcctcaacatcctgggctcacgtgatcctcccacctcagcctcctgcgtagctgaaccacagttgcctgccaccatgcccagctaattatttttattttttgtagagaaggggtctcactgtgttgctcaggctccttccagctttaagattctctgatgctaggtccgggataacagttcagtaagtagcttttaaaggcagtggacggccaggcacaatggctcattcctgtaatcccagcactttgggaggccaaggcaggaggatcatttgaagctaggagtttaagaacagcttaggcaatagggcaagagcctgtctctacaaaaaatttttaggctgggtgcagtggcccacatgtgtaatgccaacactttcggaggccgaggcaggaggactacttgagctcaggagttcaacaccagcctgggcaacgtggtgaaaccctgtctctataaaaattagccaggtgtgttggaacacacttgtggtcccaactactcgggaggctgaggtgggaagattgcttgagcttaggagattgagactgcagtgagcagaaatcgcgccaccgcactccagcctgggagacagagccagaccctgtctcagaaaaaaatttttttttcttaaattattggagcctgatggcacatgcctgtaatcccagctgccctggatgctgaggcaggaggatcacttgagcccaggagctcaaggctgcagtgagccatgatggcacccttgccctccagcttgggtgacaaaacaagatcctgtctcagtaaataaataaataataaaaacagtggagataaatagtgtggggtaaattgtatctcagtaaagcttttaaaaaagcagtgtgtgtctgtttagcatcccagatcatttcttttatcatagatttccttctaaactcctggggaaatgagacctagttagatttctttatgctgagatcttgtgtaaagggccttacaagttattagagcattaagactcttctggtctcactactgcacttgactagtcttgaaagtaggccgggcacggtagctcatgcctgtaattccaacactttgggaggccgagacaggcatatcatctgaggtcaggagtttgagaccagcctgaccaacatggtgaaacccagtctctactaaaaatagaaaaattagccaggtgtggtggcgtgcacctgtaatcccagctactcaggaggctgaggcaggagaatcgcttgaaccagggaggcagaggttgcagcaagccacgatctcaccactgcactctggcctgggcaacagagcaagcctccgtctcaaaaaaaaaaaaaaaaaaaaaaaggaagaaagaaaaagaagaagaagaaagtaaaagaaaaaagagaagagtcttttgggcaatttggaaagcagagaattacagtccagcagttgtcaatgcatgaccctcctcactgagaatgggatgactgtgtgctggtaagttggagggacctgttcaaatcacccacactgttttcgtttgatttagctttgccatgcaggctacaaagactctcctcctcagaacatgctgcttgcaggaattcaacatcatggaaaagaataaaggatgggctctcctgggaggaaaagatggccatcttcagggactatttctccttgccaagtaaggcttccttgtcatgcatacacccacctgttctaaatcggcattgttttgagtatttatttcccttctagttatcacagcaactaaggttgaataacctccttataagagggtgggcaaatatccataatgctaggcaaatttttcagaggtcctggccctaccgtatactatcctgtagctgggcaagaacttctagagggtccccagccctgagacaatgccctctggatgggagcattcctgagagtcattctgttggtgttgtgttttgcagcgcattgctggaaagaaatcagctccttgcacagaaggtcatgtacttattagtccctcttcttaaccgagggaatgataaacataaactcacatctgcaggcttttttgtggaggtaagactcattstttagaagctggattcaggaagcctatgaagcagcaatccctgccttcctaggctacatcgagttagtggcatgttgggatctgtttcaagagtgagatagaaataattttcagattcaagggcaggcgcggtggctcacgcctgtaatcccagcactttgggaggttgaagcgggcggatcacctgagttcaggagttcaaaactagcctggccaacatggtgaaaccccgtctctactaaaaatacaaaataattagctgggcatggtggcgggcacctgtaatctcagctactcgggatgaggcatgagaatcgcttgaacccgggaggcagagattgcagtgagccaagatcgcaccactgcactccagcctgggcaacagagtgagactccatctcaaaaaaacaaaacaaaacaaacacacaaaaaagaaagaattttcagattcaagcctctcaaaaatcttctttccacwcatgcataattcagtattctttgtgtacctatagggtaaataaacatcatcctgtatgttctgtaatagagatttaaaaggaaaatatgtactttagcattggtgggaaggtagctccccacatgaaaaagggcttaaaggtcattttttgggctgatctctgggttctttcagcttctccggagtccagtggccaagagactgcccagcatatactctgttgcccgctttaaagactggctacaagatggaaatcatctctttagaattctcggcctgaggggactgtacaatcttgttggacaccaggagatggtaggaggggcccccagaccatggattcttttcttttcttttcttttcttttcttttcttttcttttcttttcttttcttttctttctctttctttctgtcyctctctttctttctttctttctcttccttcctttctttctttcccttctttctttcctttttctttctttccttcctttcttcctttccttctctttcttttcttttctctccttccttccttctttctttctttttttttttttctttttttaagatagggtcttgctttgtgacccaggctggagttcagtgacaccatcgctgcgtgccgcagcttcaacctcccgggctcaagtgatcctctcacctcagcctcctgagtagcggggaccacaggcacatgccactatgcccagctgatttttaaaatttttgtagagacagagtctcactgtgttgccagggctgctctcgaactcctggtctcaagtgatctgtccacctcagcctcccaaaatactgggattacaggtgtgagccacagcgcctggcccagatcactgattcctaagataccaattaatcaccccaaaataatacctaagaaactgaaaatagctgaagacaattgggtagcctggggacaggagtaggtgggagagggtcttttttcctgcacatccttttgtatcatttaaagttttatgcctaagaaataggcaagtactgactatttaaaaattaatgaaattggccaggcgtgatggctcacgcctgtaatcacagcactttgggaggccgaggcgagtggatcacgaggtcaggagtttgagaccagccggaccaacatggtgaaaccccatctctactaaaaatataaaaattagctgggcatgatggcacatgcctgtaatcccagctactcagtaggctgaggcaggagaatcgcatgaacccgggaggcagaggttgcagtgagccaagatggcaccactgcactctagcctgggtaacagagcaagactccgtctcgggaaaaaaaaaaaaagttaggccaggcacggtggctcacgcttataatcccagcactttgggagccgaggcgggtgaatcacctgaggtcgagagtttgagactagcctaaccaacatggagaaaccccgtctctactaaaaatacaaaaaaattagccaggtgtggtggcacatgcctgtaatcccagctacttgggaggctgaggcaggagaatcgtctgaaccyaggaagcggaggttgcagtgagccgagatcgcactattgcactccagcctcggcaacaagcgygaaactctgtctcacaaaaaaagagaaaaaaagagttaatggaattaaatgaaataaataaaaagtccaaattatatatattcataatagttgatagctgcaatttgcaggggaggtatactcattatcacaacctggacagcatttaggtattgttttatgccttgtaccgtgttgccccatggagtagattgaaaagaccattgatatgctcccaagatgcttgtcatctaaaaaaaagatcactgacattcatgttggaagaaagctcatcttccataggcctggtgagaaaactaagcctaagccagaagacatgaggaatttctgaagcttcagttttgtcactggagttctattctttttttttttttttttgagacagggactctctttgtcacccaggctagagtgcagtggcacaatctcggctcgccgcaacctctgcctcccggcttcaagtgattctccaagtctccaagtcccagctttccaaatacctgggactacaggcatctgccactacacctggctaatttttgtatgttttagtagggacagggtttcaccatgttggccaggctggtctcgaactcctgacctcaagcgatctggctgcctcacccttccaaaatgctgggattacaggtgtgagccaccacaggtggcttggagttctattttatttatttatttatttttactttttttttttttttttgagacagagtcttgctctgtcacccaggctgaagtgcagtggcacaatctcggctcactgcaacctccgcctcccgggttcatgccattcccctgcctaattttttgtatttttagtagagacagggtttcatgtgttagctaggatggtctcgatctcctgacctcatgatccgcccgcctcggcctcccaaagtgctgggattacaggcgtgagccaccacacctggcctatttttactttttaaatttttttagagacagggtcttgctctgttgcccaggctagagaacagtggcatgatcatggctcactgcagccttgaactcctggccttaagcagtcctcttacctcagcctgcagagtagctgggattacaggcatgagccgcttcaccaaatattttatttaaaaatatttggggccaggcgcagtggctagcgcctgtaaccccagcacttcgggaggccaaggcgagcagatcacatgaagtcaggagtttgagaccaacctggccaacatagtgaaaccccatctctactaaaaatgcaaaaattagccatggtagcatgtgcctgtagtcccagctacttgggaggctgaggcaggagaattgcttaaacccgtgaggcagaggttgtagtgagccgagattgcgccactgcactccagcctgaatgacagagcgacatactgtctcaaaaaaaaaaaaaagaaaaaagtgtttctgaagcaaaaatgacgaatgtcagtgtatgttaattctggttgattrgatacattaatatcgctttattctacttactttttcttttttttaaaactggcttcctaacttgtgtttatattctacttactttttcatgtgtacgtttaaactttacaaccctgagattgtttcctttcagtagtttcagaagagcagaatccccattcagaatgagaagaacccttaagtcctcggtcaaattctgcttgaattcctgccaggggatccattttcacactgctataaagatactccctgagctgggtaatttataaacgaaggaggtttactagactcacaattctgcatggctagggaggcctcaggaaacttacaatcatggtggaaggcaaaggggaagcaggtacatcttcacaatggcggagcaggagagagacagaaagcaggggaaactgccacttttattttattttttatttttattttttttgagattgagtctctctgtgtcacctagggtggagtgcagtggtgtgatctcagctcactgcaacctctgccatttgagttcaagctatagcaattctcctgcctcagcctcctgagtagctgggactacaggcaggcaccaccacaccaggcttttttttttttttttttttttgagacagagttttgttcttgtaacccaggctggagtacaatggtgcgatctcggctcactacaacctccacctccctggttcaagctattctgcctcagcctcccaggtagctgggattacaggtatgtgccaccatgcctggcgaatttttgtatttttagtagagacagggttttgccatgttggtcaggttgggctcgaactcctgactgcaggtgatccgcccacctcggcctcctaaagtgctgggattacgggcgtgagccactgtgcccagcctaatttttgtatttttagtagaggtggggtttcgctgtattggccaggctggtctcgaactcctgacctcgagtaattcacctgcctcggcctcccaaagtgctgggattacaggcatgagccactgcacccagccaaaactgccattttaaaaccatcagatctcctgagaactccctcactatcatgagaacagcatgggggaaacagccctcatgatccaatcacttcccaccaagtctctccctctacaagtgggaattacagttcgagatgagatttaggtggggacacagagccaaaccatatcaggatctttgagcctctgtttggatatcttgtgtgtttgggagctcaccgtggcctgagctacctgttccactttcccttgttagcagagctcttccttacagtgagcccaagcccatagccctagaccttccctgcctggtcccacttttgcccttgaggcaactcaaagcagctctgcccctcttctatgtatcagacctccagtactgagaraaggccatcatatccccttcttctcccttctggatctaccacccctaacaaaaatcagtgagcactaggtactgagtaaagatggggagcaccccctttggtaccaggtgacgtgcgatttggagaaaaggtgatatgctccctttggccatgcagagagaagacakcaagagcctgttgccatacattgtagacagcttgcgtgaaaccgatgagaagatcgttctgtcagccatccagatactcctgcaacttgttagaacaatggatttcactaccctggctgccatgatgaggaccctgttctccttatttggtgatgtaagacaatcagagaggacagactttcctaggaggagggtaatgggcataacagcaaacagaagttggtatagtaataaatacactctacttggtataggacttttactttcagagcatttcaaacctcctctcttaagaccctactaggtaacctgtgatgttgatagggcagatgttattgtttttcaggtttaaccaaaaaaaaaaaaaacaactgaacatagaaacttgctaaggtactaccctgctttgtgatggggaaggggaaaacattgtctttcccttcaagaactatcagaactgggtcaagatggtggatgatacttatgtccctgtcccaaatgccatatatttctcaagaggaaatgcatagagcacaatgaccagcatccttggaagagtaaaacataccaaggctgggatttcgaakttcarcaaagcagcctgtgtgaatggttcctgcctgtaccaggcacgaggtttgccgactacaggtgagactatgtgcatctctcacttgtagggtgagaaaacaagtagtgccaaagcagcaagtcttactgtgtccatatatagagagagagggggagggagacggagtcttgctctgtcacccaggctggagtgcagtggcatgatcttggcctactgcaacctccacctcctgggttcaagcgattctcctgcctcagcctcccgagtagctgggactacaggcatgcgccaccacgcccagctaatttttgtatttttagtggagatggggtttccccatattggccaggctggtcttgaactcctgacctcaagtgatctgcctgcctcagcctcctaaagtgctgggattacaggcgtgagccactgcgcctggcctgtgtccacgtatattttatttcttgccttcagctacatacagctaaatagcctcattgtcaggactggcttttcaacccctcccaggttgttacaagctaagcacgcacacgttcagtgaattgcttccctttggctactcccttcccaggtgagatctgatgttcatcgtttctccgtgactctctttggagccgccataaagtctgtaaaaaacccagataagaagagtatagagaaccaagtcctggacagcttggtcccactacttctgtattctcaggatgaaaatgatgcagtagctgaggtaaggcctactgtcggtgtctctcatccctcaaacttcaaatccagagccaactctgcaaagaaaagaagcattcatatactcatatagatagatacatacatacatacatacattcatacctacatacatacatagacagacagacagacagacagacagatagatatacatatatatttttgagacagggtctctgtcgcccaggctggagtgcagtggtgtgatctcggatcactgcaacctccacctcctgggttcaagcaactcttctgcctcagcctcctgagtagctgggattacaactgcccactaccatgcctggctaatttttgtatttttagtagagatggggttttgccatgttggccaggctggtctcgaactcctgacctcaaatcatctacctgcttggcctcccaaagagctgggattacaggcatgagccactgtgcctggcctgacatttcaatttttcgtgattacagttctgcaattattttacctgtttccttgtgcacgcatatgagagtttcttgagggcataaaacctcaagtagaatatctaggtatctttaactttttattagatatttataaatcactaaacacagtggctgaagtaatttatatgcccatcagtagccaaaggaatttttatggcccaaacatctagtggacctgagataaaatactggcttggagattcatcagaggtgttgcatggtgtatgggtggcattctgagaacaatgaactagaaaagagacccacttgctaaattttgctcaaggatgtggatcaggaagagatcagtcctctagagttccttccttccaacccagagatgccacaaggacagaagtcaggggctacacttcctttgtagagtgacagaaaaatggcataggaacagtaagtggaggtgggagcttcatctctagggcacagggtaatgggaattcctgcccaaacctctggtctagggattacatctgcaagctgtcacttttgcccaacaccagtggtttctacatcctccccagaaccctagggtttttgtggattccacgtaaggactatttggagaagttggaggaggagggcaggattctagttcctttccgctcttctgctctcttttatcagtttttcatattgtactttagtactagttttattgaagaaagattacctctgtttaaaaatgaggctgggcacggtggttcacgcctgtaatcccagcactttgggaggccagggtggatggatcacccgaggccaggagttcaagaccagcctggccaacatggcaaaaccctgtctctactaaaaatacaaaaattaaccgggcatggtggtgggcgcctataatcccagctactcaggaggctgagggaagagaattgcttgaacccgggaggtggaggtcgcagtgagccaagatggcactgctgtagtccagcctgagcgacagcatgagattccagctcaaaaaaataaaaatgtttgaaaatgctgatctatggtcatctttttcacaggagagcaggcaagtcctaactatatgtgcccagttcctgaagtggaagctgccccaagaagtgtactccaaagatccctggcacatcaaacctactgaagcaggaacaatctgcagattctttgtatgtgagcaataatggctttgttaactcttcaacatactgagagacctattttcttctgacacactatttaatgacagaacatggcatgcaagaaacatttcccatttcttttcacatcagcagttgatatctatgacctgttttttattgtggatttatgtttctatagttccctcccaactgagtcacaaagttagtttcgattgccactcttagtcatgaaaagactggtggactcttaggagcccttctaacatgggtcagaggctacaaggtcaggttgatgctgaaaaagttacttatggactgaattgaaatggagttatatattgcttttataactatcttgaatcctttccttgactagaacggattgttttactgtccatcagagcatgtccagggagtcccaagcaagggctgccatgctgtgtggccatgcagcatgatggcagcatgccactggttctgccaggacccaggtggtatcatttctcttcacgaactccacagaggctactgtgtctgatctcagggtcaagcttgagcctgggctgcctcaggaagcccatccatggttttctagaagctgaccctagaaccacctagcagaccctaggactgactattcccaggagtcttccatatgtatcacctctttaggacccacagaagctttctgtgatcggacttgcagtgcccttgtgtcggggtttccattagggattatctgtctgatctgcacccaaacctatagctgatacactgatgacagtatttacagaaggaaatttggtgctgtcaactacaagttgtccatgttaattaagccataagttctatcaaaataaattcctattttccccctcctttttttttttttttgagacagagtctcagttgcccaggcctcagcctcccaagtagctgggattacaggcttacaccaccatgtctggctaagttttgtattttttagcagagctggggttttgccatgttggccaggctgttctggaactcctgacctcaggtgatccactcagctcaacctcccaaagtgttgggattacaagcatgagccaccatgcccagcctccccctcctattcttgaggtgcctatccttataaaagatccactgagaggtgccttccttcacccaaaagccataacaggccatagagaacccaaggattaaaacttcctgagggggctgggcgtggtggctcacgcctgtaatcctagcactttgggaggccgaggcgggtggatcacaaggtcaggagttcgagaccagcctggccaatatggtgaaaccccgtctctaccaaaaatacaaaaaaaaaattagctgggcttgggggcaggaacctatagtcccagctacttgggaggctgaggcaggagaattgcttgaacccaggaggtgagggttgcagtgagccaagaccgcgccactgcactccagcctgggcgacagagcaaggctccttctgaaaaaacaaaaacaaaaacaaacttcctgaggggagcctgcaagctagcaaaggagataaaacctcgatgtaaaaaagtgcgtgccaggagaggagtacctgcaaaatgctcagagcagggttaggtcaggcaggcaagcagtcaaggacaagctcatagggaggcagaactcaaggtggaacttaaagaacaaagacttagatacagagaagccaagatggctttagaaacattacaggcacaatatatggcatgagtgggtacaagcaaggggcattcacaggatttagaataacttggtctaggggcttgttattctggtataatactcattcagcaactgtagttatttcaaacactactgtactctctctgatagagtgtctgaccccagaaactgtggtaaggctgatcaatagagtgctgctgcttcactgctttatacttacttttttccacacttaggaaaaaaagtgcaaggggaaaattaacatcctagaacaaacactgatgtactccaagaacccaaaacttcccatcagaagatcagcagtcttgtttgtaggtacaaagaaagtcctttcattcctacagtcacttttgtcctgtactttcccaaattatgttgtcaagcatcccttctttttttcttttttgagacggagtctcgctgtgtcacccaggctggagtacagtggcgccatctcggctcactgcaagctccacctcccgggttcatgccattttcctgcctcagcctcccgagtagctgggactacaggcgctcaccatcacgcccggctaaatttttttgtatttttagtagagacagggtttcaccgtgttagccaggatggtctcgatttcctgacctcgtgatctgcccgcctcggcctcccaaagtgctgggattacaggcgtgagccacggtgcctggccctctgtctttgttttgttttgttttgttttgttttgtttttgaaactgagtttcactcttgctgcccaggctggagtgcagtggcacgatctcagctcactgccacctccaccttctgggttcaagtgattgtcctgcctcagcctcctgagtagctgggattacaggtgcctgccaccacacctggctaatttttctttttttttttttttttgagagaagtctcgctcttgtcccccagatttgaatgcaatggcttgatctcagctcactgcaacctctgcctcccgggttgagattctcctgcctctgcctcccaagtggctgggattaagtcgcctgccaccacaccctgctaatttttatattttttagtagagatggggtttcaccatgttggccaggctggtcttgaactcctgacctcaggtgatccgcccgcctcggcctcccaaagtgctgggattataggcgtgagccatcgcgcctggcctaatttttgtatttttagtaatgatggggtttcaccatgtcggccaggctagtcttgaactcctgacctcaggtgatccacccacctcagccaccaaaattgctgggattacaagcgtaagccaccgcgcccagtcagtatccccatttttatgtatgtatggtgtgggggttttatgtgtgtaggcgggggtggtgatttgagacaaggtctcacttcgttgcccaagttgaagcacagtggcaccaccatggcttgctgcagcctcaacatcctgggctcaagcaatcctcctacctccctcagcctcttgagtatctgggactataggcatgtgccaccatgcccagccaatttttttttttttaagagacaaggtcttgctatattgcccagggtggtcttaaactcctgggctcaagcagtcttcctgcctcagcctcccaaagtgctgggattacaggcattagtcactgtacccggctgtgagtcactgcacccggccaagtatccccattctttatgaagatgaccttggaagaaggggccctgttacctataggtaactaccaggcacctggaagcccagtttttggaatctgcctaattatcagaaggccgattctgccggctgcttagatgtcttaatgataaaaacttttagatattcatttccaagagcaaaagccagatcacagactcactgactttatcctgcctttaggccttttatcgaagtacatggatcacaatgagctcaggaggatgggtactgactggatagaggacggtaagtgataacagtccttgaatttggggtgtacccatattttggaaggtatccgaggcagccagtgtgggaaggctttatagcagagctgagaccctgagctctagaaaacctggtttttgtagcaggaatcctgttggtgatttcagctgaatgacagtcccatcccagtccagtttcccctttaggaaaggacatcaccctatttgtctggaagctagctttgatgagtctcagagacagttcctgagccttgtctgtcagcaaataagacattacctagaaatactatcttagtaaattatgatgattcctcataagtaccacagagatgactgcagtactattttctataagccgttgtcctgtaacttaggtaggacttggtaatagagatgttttatagtcacatttttctttaattttttttctttaatgtttttctttcaaatctcctattctgagaaacaggcattctttttttttttttttttttctttcgagatggagtcttgcactgtcgcacagtctggagtgcagtggcctgataatgggtcactgcaacctccacctcccgggttcaagtgattctcctgcctcagcctcccgagtagctgggattacaggcacgcaccaccacgccctgctaatttttgtatttttagtagagacggggtttcaccatgttggtcaggctggtc

SEQ ID NO: 98054 - DNA, 766455 bp, Homo sapiens
  misc_feature (1)...(766455): n = A,T,C or G
tgtgttcactttagtctctttccaattttcataaaccagaacacaaaaacatgcatatttcttgcttcctgaccttagaatttggtctcaatgtctgtcctctggataatatgagatgatatggttctgagcattattttagattttgggtagtgctcccaaatgcaggacaaatatacctggagataaaagtgatgttttggagaagtcctgattgagtttaataagacctagatattcgacctgactcaattaagaacaaccggctatctcagaattaacattttgagtgataaagcttctgcttacaagccgaataaccatcagcatgatacttactttctttgggcataactgtccttacctttaagtcagattggaccggttggtccatctctaatcaacctttcagttcccaagtttcagtttccatttaattgttaaaaattaggatcatcaacagaagcagctctctatacaaaataggatacctgtatatcatggcacttggaggggacaatcacttcgagaaatcaggattccaaattcgtaagaggaaggtaccttctgtgaaacttgtgccgtggatgagtcttgttcttactcctattgacaatccctgcctgacatagtacaatgtgggagaataaaaacgtgctgatcttcaaagttattgtgcatcatgggttatgtggaaggggtggaaacacttcactgaagcatgaaaatttcagaaaggaatggggaaagtaagggactgacatgaaggtggcagtctcaggctgccaaacctgagaactgaagcgagtagaaacaacatacaaagtacaaatataaatcagggaatcactggaatttagttgaattccagtggaattgagtctcgtctcttgcaaaatctaccagggattgggtaagtatttatgtttttctgttccaaaactatttgtatctagagccttaattgtgatcgccatggataaaagggtagtgtcttgataataatagttctgccaggcacagtgactcacgcctataatcccagcactttgggaggatgaggcaggtgaatcacttgaggccaggagttcaagaacagcctgggcaacatggtgaaaccctggctctactaaagatataaaaattagctgtcatggtggtgtgcatctgtaatcccagctacttgggaggctgaggcatgaaaatcatttgaacctaggaagtgaaggttgcagtgagcagagattgtgccactgcactccagcctgggtgacagagtgagactctgcctcaaaacatatataaaataaataaaataagatagttctaagaaatatctctgttgtgtttactatgttcaaatatttcagaatattattttccttttctcactgaaacttatcttttgggtaaatcataaccccactgcttattcttttgtaattcttcattgtatctaacacagcatcctgcaaggggttagttagggctggatgaatggagttgattggccataaaatcctactgcgtaatgcattagtgtgtttcttaggattctttcctttatgtgactttactgagggagtgaatgattctttgctacttccccagaagcagagagagttggtgagtatgctgatatacagctacgtaacaccgcatactgcagcaattgcctgtgtttgtcttctcccagggattccaaatgccagctactggccctgggcctgtagataaaaatctttagctgatatggtactttaaattggaagatcaatctccaagtgccttgaaagcattcagcttcaaaaattcatgaaagtaagaagaatatgactttgtttaagagaaaaggtagctcatgattggcgctacagccattgtgatgtgtgaattggtttctgatgttcagctctgtggcgataaataatctgacatctggggcaatgttctcttgtctcataatcagcaaatgttttatcttcaatggctgcatttgaattctgcaaaaattattacggtcgaaattgaagggaaacctaacagttttgttttgttttgaatatttggctttcgtttctttagctactagtttaaagggaaagttcaactgttttgtaagccatttgctgtaagagagtcatgactgctgttttgtgcaaagcaaaggagtctaaagcataatactgcatagaaacactgcttttttcttttctgactctctcaatgtaagtatgcacaaactttctttccaatttatgcagtgaagctgttgcctacctcaacttcaaatacttttctcagttcccccatcaatacttaaagaggttgttgttaatttctgaaaaatatcccttcccccaaattgctcatgtatcaggctactatttacagtaatctaagtgaatagatatcattcacactctcacaacctcagaattacaaaaatgaggcaaaagagaaatgagactagcccaaaattccatagaataccttccttcctagtcacagtagaataaaactctcctgatttgcagaccgaagcctccctccatgaaggtgttgcctctcctgtgacccaagccaccgggccaactccctgaaggtcattcaaggcttgagatgactcattccaactccacttggggccacactctttttggtggcaggtgcctgggcacttattaagctgtttagtccagaactctgttgactcctttccagagctcacggagagccagactggtgcctggaacagagcaaatgctcaatccctgggtgttacctccccatcccaacaacactgccaaaaataaatgttagggcttgggaaggagagccatataaatgatgaatggcttagaaatagataaagaagttcaggtcgtcttagagacatgtaagctgaaaatgataccaatattcttcctcctgcaggggtagcacagttgtgcgttcatgattccctcttgaggctcactatagagtgggagtcaggaaccaccccctgcttctttagacaaactcagcttccactgttttttaatagtggctgttacatacaattgtatttgtaccagggattgtaatcctattttacaaagaaaaaagtttgtgatacacatactctattttcactggattttatatgagataaactgtcatgggcatctgcttattcatctgtcaaatgagacattgaatttttttactctgagcaaactgcataactctccaaggagattgttgtacgtgggttgtctctgacattggttactagagacaggcatcagggtgagaagttaggactcctgtggtccaaccttgcctgcccgcaactcactgacctcctctgaccctggtgcttccatctgtaaagtcaagttcttggactaaatgagctctgacagaccttccagctttaaaagttatataatctcaagtctggaaaactttcttaagagaaaagcaatttataagatttatgtctaagaggattttaaggagaaagataacacccatctgtctttctctctgtctatctatctctccctctctcaaatgcatgtgagagtatttttctgaaggccaggaggatttaaagaccctttctttaaagactctgtcacttctgtgtttctagggttttcaattctctaatactccagtttaacgctgtttcctggggcattatagatttcacttgtgtaaattcttcttgtgtttttgtgatctctttcaaccagaaatgagttttgtttctttatttttgtggctgttttttgtggggtttttttttaattgaatatagtagctgacttaagttacatggttatattcttcctaaattcatactttagggttttattttcttttttcagcttcatgtaggtctgcttttgaataagtcattgaagcaattgaatgacatttttgaaatcttgttttataagttcacttccacacactagagtctattaaatggaagggacatattttcactccatagtggaaagttaatgcatagaacaggtaccaagactcagcttttctccatgtttgaaatcaagatgctttggttctttttagcaaaaatcttgctaaagtatgaggtgacaggcatgagaaggtacaatgccactaaatatgaaccacattacaaaaacaaatgttcctgagctggaaataaaaattagctcctcaggaacttaatgaaacacgaggtataaaatggtagcaaaataatctttaatagtgatcttcaaaattgttggcatcaggactttctcaggtacagaggaacagtgtgacacagcagctgatgacattatttttcgttcctgttaactactcaaggaggtgacagctgtgagtgttgtacctaatagcagaagtgagctcacctcaaattataaataccaagggtaatgtagtgataacttctctcacctaaatattttgccctcttggttaataaggccttctgtttcacctgagagatcatttcttttttgaaattgctgttgtgagcccaaggaagagaaagtatcttggagcagaagagaaaaaagcagtctccccaaacatctataagccctgccctgccctgcctccaacaaacttccagcatctgctgaactccgaagtgcgatttgcttagtgggatctaaaccctttgctctataaagaggaacagaggtagttacctacccaaagatgcatggctgaaggatatgagcttaaaggctatcagacataactgtggacagtggaataggacagagagagaagagtttataaatatatggatatggagaaattgaaacttacatggtcacgcttggtggctcacgcccataatcccagcactttggcaggctgagacgtgaggatcacttaagcccaggagtttgagaccagcctggggagcatagtgagacccccgtctctacagaaagcaaaataattagccagtaatggtaacacatgcctatagtcccagctgctgggaaggctgaggtgagacgattgcttgaaccgtggagatagaggctacagtgagctatgattgcaccactgcacaccagcctaggcaattgagtgagaccctgtctcaaaagaaaaaaataaataaacttgagaaacaaatgcagaaatccatcattactgaacggttactgtacttctatagagtaaaagtgttgcctgactcatttgggtaagcatatctaatatgcatagccaatattcacttttttttttttttttttttgccagaacattcaaccatgtcaggccattaacttgctgggatccttagtactctcgtgtagccaggtgcactcttgctctttttcacatctagtctctttattttaaaaaacaaaattccatacatccttcattcatgtattaattcaggagctctacactgagcattttactttgtgcccggcagtgttctctgcattggaaatgaagcatgagcaaaagaggctgaaatttgtcctcatgtagttcacatctggagggagtatacagcaatgaacaaaataagtgattacaacatataaggcataagatatggtgaggagtacaatggagagaaatagagcagggaaagggaggggagtgcctcgggattttcaataggggagtgaagggtacagcctcgctgagcaaggcatatttgcatagagacataaatagatgcacaagtgccctatgtgggtatctgagcattccaggcaaaggcagcacatacatgggcgggaggccggagggtgcctgaccaattcaaggcactgcatgtgaaccagtgccctgaagcagtgggagtgatggacaaggatgtggccggcggggtatgaaggtcaggcagggactcaatgatgacttaggccttactctgaggaacaaaggaagccattcggtaggtttttaagaaaggagtaacgtgattcgactgactttttaacaggattgctctgctgctgtgctgagaatagtctgagagggagagattggaaggtcgtttttaagcttgagaatggtaatagacatccaggtggagatgactaggcggcagatgagtctggagttcagggcagctctccatcgatatttctagctcgctttgtctacagtcatggtaagtcmacgtgtctaaatgtctcccctttccccccttgagtaattgaacagattcggcagtctctataagaaaatgttaaaacaggcagttaggcagttagttaaagtagagagccatttgtgagcctgatttgctggaaaataataaagaagaaaagaaagctgtacatcaggataagagaaatcctcatgcagtaaagtcttcaaaaatgttacagactccaacgagtcaatatcctgaaggaactgaaagtatggttcgggctcctgctctgttcttcatttcgccgtgaaggttattgttaattatttcctttgagctttaaagtcagcattcatgcttgtttcctcattattttcccactaagctaattaatgcagttgcacaggaaccccaagataggcttttggagaggcagcaagggtttgcagtgaagacccgagtgaaggcccagggaactcaagtgccaagtctaacgctaccatttgggggtgactttgaccaaaatcacgatatttttttcatctctcgcaccaaatgccatattaatactcccaaaattaaaatggttttgctttgtcactggcatattgaattttagatcccagtatatcctgagttctcagatagtgggaatttgaagatcaaatagaaataagagtgaaaacctaggttaaatcccaagggccatgatttagtgaccttccaaaagacatttaatcctcttgactgcaatatcgttacatcccaaaccttgctgtgaaaaatatatgggataactttttttttaagatggagtcttgctctgtcacccgggctggagtgcagtggtgcgatatgggctcactgcaacctccatctcccaggtttaagtgattctcctgcctcagcctctggagtagctgggattacaggcgcctgccaccacgcctggctaattttttgtatttttagtagagacggggttttgccatgttgggcagactggtctcaaactcctgacctcaggtgatccgctcggctcggcctccgaaagtgctgggattacaggtgtgagccactgcacccggcctgggataacatttttaaggacacttttcacagggaagaggcatagaaataaggcagtatattgtagctatgaaaaccacggaagctgaagccaaggccgcatgggttcgaattctggttctcytccttactagccaggtgaactcagccaagtatcttaaccttgtatgcttcaacttcctcatctgaaaaatgggaataagagtataatgtctaatatagctggtggttctaaagattaaatgacttaatacgtgaaaaatrcttacatcagtgtgaaacacatggatgcactcagtaatgatttataataaatattactattactgctagtaatatagtaatactattgttactgccattttcctctttctcttcctcatccttctcctcctccttcccttccttctcctccttgtcctattacaactactactactcctccaattcaggtgaaattccaaacataaccgaagcattttagacactagcagaattctaagccattatcattgaataaaataagagagcttatctctcatggggctttacaatcttgaaacaagatatgatgatgaaagaattggtatcttattcccattctctctcgctttttctttccttttctttttctgaaggaagaaataaaggtaaaatgagctaacaaatgtcacaacaaattgaaaagaaaccaacaactaactgacttgagtgcttcttggacaacccttcttgcttttcttcaacgttttttgccattcttcctttgtccagtggtgaattaacagaaccttgttttctgttctaagcaattaccctcgagacggaagtcctgataaacaagaaagagatgctggggatagagggtgggtgtgtggggagacacagaaagcacccctgacctttcaccctggggtttgacactgtgcgtccccaggccagcactggcccttgggaggataactgactcctcactgcaatgagaggttgtgaccaattctgttccctgctgagttctctgcaccccagaagttagagtttcaaaggtgtgaccatatcscagattgatgctaacaatacagttagtgtgcacttttatgttactggaaaatcatccattttcacccagaactgttatacataaatgctttgtcctagaaattctaaataaaatttgtttggccttcctgaaatatcatctgccatggctattttttttccttttttttatcaaatcaggaagtgaaaaatatcagttagaaaatttcctcagcatctatgttaagaacttcataaaacctaattacattttaccacattttataattctgtcatgctgctcctactgggggatatcatacatgcagcccccaaatagccccaagatacacacacatactttaataggaataaacacacacactcttcagtgataataagatgaagacgtatagggaaggtttgtttcccatcagcaagtggtactgaaacacttgcaggttttcagtggtaacgtttgaatatatatttaagggatttattatgaaaagcttcycccattccatgaggatgacttggagacttgcacaggcaaaacagatgagtcggggccctgtccccaagatgagtcggggccctgtccccaagcccttggctttgttttcagcttgtaggtgtgatcatattaggtgaataaaagagtatctttgcatttcattgatataaatgctcccagcctctctagaaatagcagaaaaatcaaatcttacttgaaaaagaagcctaatgcttcttggcaaagcgataccacccaagcggattctgatgatacatcattatttcctgctgtaaggtcaacgaattgctctgggactctgtgttatctctgtgctgctgtagtctggaacttgctgctcatttgaaagtctagggctattgcttataaaaaataatagctttgctaagattaatacttttgagggattggaatgtttgttttgtttcatttaaaaaacagagcaatagagctgctaaaacagcaagctttgtcttttttctgaaatcccttacttcactaaagaaatgtgcaggaaaatctctttgtaacataagctcccaaaaaagtacatatgtcttttgcagattttatgtcacaattgtaacttatcacaatatatgttttcataatgctgatgaaagaaaagttgtgcacaaaatattgaaacatcagtagcaattaatatgaaaatattcggattttacagaatactattatactgataatacccctcatgaattgaatgtcaagtaccgagcactttcctaagcaaatgtacaagcttatacactttgaatattggagcaatgttctgagttataccagtagcagctaacaacgtagcagaccacagctatcacaattgctaagttgaacaatgtgaaattgctaatataagatcacttttaacctataaaatggcaatttcctgtgatttaatcttgctatatttataacaagaataagggagaactgtttatagaatcttacaaactcttcagaaaatgtactaatagacacttgctgcattgtgagaaaagttctaatatgataggctattctaagtacttggctaagaaccatttcgttacactggatgatagcggatatcactgagatgcatacagtttggatttgtgttatgccccrgcacctatgaactaaaagcaattccatcctatatccattagccttttaatatccttgtgatgttgatggtgacataatcctacctattttatggctgaagaaaatgacacacagatcatgtaactgatccattgtctcttaaatatttgggctcgggaggggaacaacctttgatatagaatcaacgaagaatgaccagcagtatttattttattttcattgccatttcccccatcactgatttggcaactcatagttctcattactctgttgcaactaacgcagtatttactccaaaagatataccgcatgaatttctataagagtaaataggtgaattgtgtaaattaggtagtttttttaattttcaagagtgaatttaatatattatggtactatcagaaatctagaaacatctcaaaaagtctagaaattaaaagatgttattaaatattaaatgtaatttttggtaaatggaaagctaaagtcatttgttaaattcttaacaaattcacagtaatctgatctgtgtgtggttgtcttaagcatcttcccctcctacgtaggacttgaagggggaaggtgaccgttgttagtccagatttcctactgacactcttatccaggaaaatatatttcaaattattatcttgatagaatggactatgtattagataagagatatttttgatggacttgtgattatgtgggatatatgagttcttaagatatgcacaatgtctacaacttcagatggtacagaaaaaaaaagagcaagaaagcaaaataataatcgatgaagttacaccatgggcacccaggtgttcgtggcattactattaatttttctgaaggtctgaacaatttgaattttcaaaggtagggataaaatgttccaaaatatagctaccttaatttttaaatgccattttgacattgtatacctttcagccacagtgtagggtaaaaaaaagataagcgggtttcatttttttccaaaaatcagaactacacacctgactgaaacatcccactttccttatttcaaaattagtaaacatttctgatgccaaggagatatcccaaaatgataatatttatcactgaagtaagtgctcttagaaagaaacatcatgggacatgaggatatcacggaagatcacgttgctgtgacattgttttgttttgtattcaaatttgtctgtgtcatcatgagttagttactgaaatctctaacacatgtactataaagtggcctcaaaataacttgttatatgatgagatcattgatgaagaatacttcttgccaaggggatgagttctcttctcataaagccccagaaatgcagagccttgggaggatctggcaggaagtccacaaaagcaaaactgaggacaaggctgtcctcagactgtgcccatccgtggtcagtccacctccaaatgccttagagattatagcaatcagacttatgagttttgtttcggttacgtaaggdgtacttgttatattccaggcactgtactccgcagaggcactttttaaccgaaaagaactattaaggaactattattgcattgattttacagatggggaaattagaaattagaaagattttaaataatgtgttccaagaaactggtgttttaggtgtccaagaatgattctactaaacactacagcacaaggcacaagcctcacaacacaccatctaagagcggtgagagggcaggtgagtcaactgagcactctcccctttctttctgacactttctcaccaaaccagtgtgatgagggccactgaggactgctccatggccactttgtgtcagtgcatctctagccctcatagtgagtactctttgggtgacctagccctcatcgtgggtactacatgtgtgacctagccctcatcatgggtattacatgtgtaattgccctcattgtgagttactatgtgtgtgatctagccctcacatgggtactacatgcatgatctcacctttatgtgtactgcatttgtaatctagccctcatcatgggtattacatgcatgatctagccctcacaggtatgctacatgtgtgatctagccctcaggtgggtattacccatgcgatcacaggcccaccaggtatcgggttcctagtgccactgcctgcccttcccgctttcttcctcccaggtgtgcaaatgtttctgaaaagaatttttgaatgagcatgcaaggtccctttgttctgccacttccyaaagaaagttctgactctttttttgaagtggaaagtttttcctaagtttgcatttccaagagcagatttaccccaaatcctccttaatgcctggctgcttgtgttctccttcatttcagatccatgtgccagaattctgggcggactttctagcacccactggagcagtcagctgcgagagctgattgtgtccttgaaaaggtgatccaagaacaaaattaattccagtggattaaaaaaagaatgcataaaatatttcaagatgaatcttgataggttcgtcatatggagaatagtctttgtcccctaaaaagcctggggagaaagctataatcttccyaaaacaaagaaatggagtgtattttattgtratgaaaagacacattctacaaaaaatcagaatcatacattactaggtcgagggctttgaggatgaaggggaactgcttttgagaagcagatatgtctggcgcctgatggttttcatgatggaagcaaaataatgtatcatttttctatataatggcagatgaccatcccagataaatgactataagggatagcttgatttaccctttccacaatgtatgtatatttcaaaacaacatgtggtacatgataaatatatacaatttttatyatcaattaaaaataaatttwaaaatgtttagaaaactaatgataaggaaaaaaatcttagaacagtatcattggcctgtcaatagtcaatggaagtattgcctaagtttctttccaaaatattcaggacaacaccaatgtgtaggaatctaatggcagtccacaaaaacaatttttagaaaagtaaaagaaatacttaaaatactttttattggtggcatcccatatcctccagccagtgctgttggattttgcatttctatttgtttcagaatgatggtatattatttccttttcctccttcatccatgtaactaagatttatctctttgtaataagtgctctgtaatttctatcgtatgtttgcatttcatatgcgaccattttttttctaagagttgtgttcatagctgacacagctttgatgttactttatggacttacagtgagatttcattatcataactgacaggaaatgaaaggcagtctatgaaaattcacagactggttcatttatcaatgctgtaagcgaagtgtgtttctcagataatagcatcagcatcacctgggaacttgtcagaaatgcgaactgaggggcctaactccagacttaccgaatcaagaactctaggagtgacctcagcaatcagtgttttaagaaccacagggcattggaatccccaggaggacttgttcaatcacacattgccgtgtctcatccacataaattctaacagacataaccagtcacaggcaagttttgtgcagtgataaaagatgtgactcaagccctgggtaacttattgttttggcttttaataaaccaaaaatgaattgctcaagttaaccaaaaaagaaatgaaaaagataacatttttctcctttagttctcagtacgtcgattaaactggggagtaaagtaacagtgaatgataggcctatgaatgctgacatgaaagagcgggcacatcttgtgctatatttgttttccatcatcatttagccaaaatgaaattgtgtaagttcgtatgattgcatagtaaccacatggaacttttgagaagcccatcatttgttgatcttttcaacagcatgcattggaagagatttgaaacttttgccaatttgtaacaaaatactttccaaatttcagtgctctcacaactcagttcacatcagaaaagaagaaattatttctatggatcataactggaattatccaaaaggctctgattatgtgaattatgttaggacacttatgatttttattctatttgtttcattttcatagttatctatgtataggaaaagaaaactgatgcagagtttaatctcttttttgacattttcattctggtcttacataagttctactttcaccagaaaatctgatttcaagagattataattagtctgatattgatgttccagaaacctattaaaagacttactttcttaggaatctatgtcatcttcttttttctcattttctttctaatatctttattttgattgtattttcctctagcagtgtatttggtaaataaagttaaggcattatagtggtcattcttactgataaattatacctactagattttaatgcataaatatagatgtaataagatrcattatcaaggctataaggaaaactacaagtaagaaaattcttcacatttttttaaatttaaaaaatgcatataaacactgtggaaactatgtaaacagtaattattcactgggatttcctggcctattaaaaacaactatttgaatctgaaaaccagtttgcatttcagtaaaggactatttggttaattgacaattcctaacacaacaagtaaattacaagacaaaggaaatgtctctttggaggactaacttgacatgcttgaaagactaagaagatgaaaaaagaggtttaaataaacaaacagggcatggaaaaggaggataaaagatatggggaggaaattatattaagtaggtcctaatggattcaatgtggatttgcagactcatatccagattgaaaaatactcttgaagttggaccaacttggacaatctgcactgagaaaagtagtaatctctctttgtaaaccttccaaataaatattattttagattctgtttctgaaaatatccatcaacacacaggcaactaaggaggcctgtatagtttgattttaaatcgaagacactttgtttagcatctcatttgaggaaacgggtgttgagatgctacaatttagttgtggctccagagccacttaccctgaatatcacatgaatgtgggctaatttttataatgtgagactattttttaaagcagtatttggtaccacttccatacgaaaaaaagaagaaatcaatttttatagttttctttttatttagggaccttctgagtacataactaaaaaactgcagactaaaagctgatcattctcagcaggtaaaattgcttattcaatactttaatgacycaaaacttctaaacaaaagattttcttctttcttcagttcctttgtttaaaaaacctagaattcatcaaataaatgatgaaaaaaactaattttttttaaatgatgtcaattatccctttaggatttaggagatagatcaaaacacagtccttcacacatctcatgcttgatgacattgtaaagctgaagatttgaaaagtgcaaatgtgatagattctctcagttgctattttggtaacttctccttggcaaccataagatatgaattaaatcttgcaatcagagctgctgtacggtatagactgtgataccaacagcactctctgaagttgtgcactgcacaacactcccagcatcacatagtggcccactttgactattgcctactcagtgataaagtctaccacagatgatctgagttatagttctcaaattttgatgttcatgcaaattatgtgaaaagtttttattgatgatttttcctgtattctacttcttcagacattataattcaataatttggggtggagaggggcatttttcaaattcaccttattgaaaagtaattccaagtaatttggatgcaggtggtccacagattactcttggagagatctttgcctaaagggcacccatttctaataatatgaaagcagctcctattgccagctcatttgctttcagtaacctgaaagggtagttacatattttgattagaattaatagtgctgctatacatatataatccctcattatcttgtatcatcatgttcatatttactgaataaaacttctcagyaagtagttactgagtaagttttttgaaggaaggataccaaaaatcgagagtgaaaaagaggtattatttctcaaaacttctacggtgtatttacatagttaaaaaatttcaacactgagacgtcttttctgcttctatttaattaaaggagaacacaattcatcaaaatgttgtcaagaagttgtcaaattgacttaaattaaaaagctagctttatgctttctgatgatctaagtaacttcagatatcaggcttttttattctatgtatcarggatataaacctgaccttgggttttcagtagaaaatagtttggaatgtctatttagattggggtcataattcacagaagttcttctaagaacgtttacagataccatctcatttaactcacaatattttgaagaaaatagcattatcttttataattgatgaaacagagaggaagcctaccttgtacaaatagaaatacaaattgagcatcccaaatccaaaaatctgacatctaaaatgctccaaaatccaaaacattttgggcaccaacaggatgcttaaaagaaatgcttactggagcattatggatttcagatttttgaatttgggatgctcaaccaggatgctatacctgaaatactttaaatggcatatggcatctacagatttttcttcaggtaagagatttaacggaatgtttcacttggcatgtatgataatattgcatcataatatttttattatagctttacaactcataactcatttggcagtagtcatgatcagtgatatgaaataattacaaagtgattcatgttaacataacttagtttaagttcaataattcccgctgtcactggagccatttgtacatattgaatttaatctactcataactcaggcaaaaattgcttcctttttttttttctttataaatggagtcttttagggcctcttgctgaaaaaagaaactaactctggataacataagcaagcaagaatgtattagaaggatcttgaggaaactaacaaatttgaagagarggccgcagagtcagtctcagaaaaggcaggaacctggacwttccagagctgtgggtggcaggaacagtgtggctgaaccactcaacccccgtccttccccagaatcaaggcattaaccctgaccgttttttctgtctttcatttctccactcagttgaaaatcctaacaaaaggaggcttcagggtctccgttagcttctaggacttatcatcataccaagactgcgcccactggaggaagggaaattccccaaaaagaactaggtatactgctgagaaagggaatgaatattactagcaaacaacaacaagtataaatttagagtttccagtgcaggatctacaggtgtatcctgtccttcagatcacaaataggcaaggaccgaagcttcagatagcgtggtaattaattggcgagttcaggattagtaacagaaaggcacacacagtcatttcccgacttccctctgtcctaacactgagctactcgatagcttcagacagtgaactctgagaagagtggagaaagcacagtcttgactaaacccctaatgttctatgtcagggtgaatatgcctgaaccagaaggagcaggggagacgtgactcatttatttagttttcaagggtaggagaactgtttatatgtttttcccatgctaaattgtgccacgaagcacatctctttaactgctcaataaatgtttgctaaattaaaatgaaggaataagaatagaagacctatatgcaaacaattggttattcaatattctggcgactggtagagacatggccttacatgtttgtaaatcagctagaaaagacaattgcgcagttattattttattttatctagtagaagccacctcgcttaagataaatatcagtgaaagtagctcaacatggggaataaacaacattgcattaaagcattaagataactcatttaagggagggaaaaaaatatttataaaacttaaagagtctaagctataaagtgcagcttgtaaattagggtgtcacttttgactgatgtttgaagakattggttcagtataaggcagtggcacataagtgaacaaattcctaagcgttgtgaggaagaggtgtaaaagcacaaggaaaatgattgcaatctccttctaccacaccgtgcttcagtggcacatttactaggtgcagtttgcacactatccttccaagagacataatggacttgatgaagacccagcgaaaggaatgttaaatgactaaaggaattatggcacttctactgataatcattacaattatgtccaacactgctttagtccttactgtatgtaatccatgtgggagttcattttcatgtacttactgattgaaacctcacaaaatcctatgaggcaggtaatattattttatcctcattttacagataaagttaacaaggatcagaggctttaaatggcttgcccaagtcagaaaactaagtggctgaggcaagatttgaacccaggcaatctggtcctaaagttcmtgctacatgaagatagagaaaaaacattgaggccaggcatggtggctcatgyctgtaatcccagcactttggaaggctaaggcaggcggatcacctgaggtcaggcattagagaccagcctggccaacttggccaaaccccgtctctactaaaaatacaaaaattagccaggcatggtggcgcatgcctgcaatcccagctactagggaggctgaggcaggagaattgcttgaacccgggaggcggaggttgcagtgagccaagatcatgccactgcactccagcatgggcaacagagtgagactccgtctcaaaaaaaaaaaaaaaaaaaaaaaaaagacattgaaattgaaatttataaaactgtaaaccatgttgacagacataacttgggtttatcttttatttctcaaaacactgaaaatgggttgtattttcartcaaataagagaaagtgttcatttaagcagtgctggcaaaaacaaatgaacaaagaaatttttatgtaacacattattccaaatggtgctaggaattaaaaaaacagcaggttcaaacaaagcttagataatttcatggattatagcttgatttgcagagtaactgctattttacaggcmaacatgagcaattcccaagtggttcatatgatgttactctcacgatgtctcctctggcccccagttacccctcacatttgaggggagggagtgcagcaagctcagtgcttccccagttttctccattgaatatatgcactttttgaatttttaaaatcaaacaatttttctaaaattcaacttaataagtggttaatgggtgtccactatgtggtgggcccgtgagggtacaaaatgaatgtgtcattcttctaatttsaaggagtgcttcaccaagggacagaagaatatgtgcttccaataagctggaaaacaggtttgagtagggtgttcgaagagagacaaaaatattgtgggtaagctcagaaaagggaacaaccctgactgggcagaagtcaggaagcttcacaaatgaagtaaagtcatctctgaaattttctttttcttcccatatcaagaaagagaaggggagaacaagggaggggaggaaggaaggaagatttaaacacaaagttcagggttcacgtgcacatcctttttttatgacatgcctttcttttacttcttttaaactattcttttagatttgttttcgtgaataagtaaaacaggaaaaaaagaacgtcagcatctatccaaattgccgtgagttgaaatgggtgtagtgagagttgatgctgagacttgtagagagttgacatagtatataattactacagttatctgagtggcactaaatttgttcacctgtcattcttctagtggtatatatttgctaaaatatgattcaaagaagtgtyattgtttttataatttgaagaacaaaaggcctgtattatataaaatattttccatttaatatattctttctataaaagttaaaaatccaaagaaatctttcaaagtaaattattgttctcagaaggaagggtagaagagtttatacatttgraattaaattggctgggtgcataactaagaacatrttgaaaatgtacagcacttgaaccctgctgtgttatcatcatagtgaatcacaagttttgcttggttactgtcaaatggaaatagaaattaaatttaaacagagcttattaagacttgttagtctgaagagcacttcatcagctttaaagtgtatgtaagtgtcatggctaattaaaattgagttttagtgcaactaacataattttctgtcttaaaaatatgctatctgggaacctctccagtactttgtcaagatgttcttggtaccattattagtaatcattagggaccattatagttaatgtctatttgaccttccatccaagaaactaaaaaaaaaaaaaaaatagcaaaaaagaaactttacatggcttgtgtttggaggacagttcttkggtgtcattttttatagatgactggaattttgctcaaactgagtcagaagtgaaaattaagatatttaaatattgaaatcatgcttctcaaaatattttaaaaacgtatgatgtagtatagcatgacaggaggaaaatagaatacatttgtattatgtttatttgtattaaaataagtataggaataaagaaatggtaatggactgtgaataatcaaaataaagttgaaatactttctcagatcccctgtgatgttatctgtttcctatacagctttctatctccatcaaaaagtatcttttatctccaattaaaaactaattgatctctgagggggttttaacatatgcgcatattccttgataatactccctccaggaggtgaagcttaattcccttccctttgagtgtwggccaaacttaatgacttccttctaacaaataaagcatggaaaaggagaaacagtaactttacagtagagagagccagcatacaacatcgtaaccaggccgaggttaacaataacagtgataaatcatgttgatataatgtaccctgtgatattatgtgatgagaaggcacctcacctctgaggtaatctccccctaaatccataactccagcctattagtgagaaaaatatcagacaatctcaaactgaaagaccttatgcaaaacatctgaccagtaagctttaaaatgtacaatttttaaggtcatgaaagacaaggaaataytaaggaattgccacagattagaagagactaaggagacacaataacaaacttcaatctgttttctggcttagatcggggccagggatagaacataagtgggaatactggggaaataagtaaaatctatagtttaggtcataactccgtaccagcatttcctagtttttgatcattgtgatttgatcatgtagaatgttaacatgaggggaagatggatgaaaggtatgggagactgtgccaatttttcaaccttttataaatctaaaataattttaaaataaaacattttaaaactaacaaattcatgagcagtcatgattctcctcattactcagtagctaagcttcaaggtggtccctataatcttgacttctgtgttcccacacttgtgtggtttcctttgagagctgacctgtgtacaagatttctgcagaagtgagggtctgtggtttctaaggctaggtcacaaaaggtgctggcggtttcaccttggtctcttgagttgcttgctccagggaaagctagctttcatgcggtgaggtcccttctgctgccctaagtcccatatgagaggagctagtgcatttttccttgaccatggattgagttacattccagaggtccacaaaccagatagtgtaaaatttcttacatttgttatgctggagctttgtttccttgttcttaatgtctgattttaaagttgatagtaaattttaggctcttgcacttctttctgcaaaaaaatggcttttacattacaacaacattgtcttataaattctcttgcacttttataattttaagaccttcattcataaaatgacacattcattacatcagccattagactatttcaaggtgctgtttagttrcaaaaagttcrttatcgagaaaacaagtctaaccatttataatttctcacaatttctctccagtgtgcactgacttctgactaatttctctcctatgtaaagaagaatacctttagccacatttaaattcaagttaagcttctgtcaaatgtgattttaaaaaaaaatttaaggacccctcaatagaataagagatcacataattttttgctataatgaacattacattttctgaccaccaacatctgtttctttgttggatggcgggaattcttgggatagtttgtaggttttatgctcattgttttctctttgtaaaattaataggtgtaaatgtgacaaaatgaatccgtgatttaataataccttacctttaaacttcaagctcacctcttagtaaactccaaataattatgaaatagttattattcaatttattcagttctacatgaactgaacaactatgtattaatacttattattaatacacaatgggcttaacctattagggattgcacatcgaccaatagccacagaatttcattcttagtgtcaatagcatattccctactaatgtgtgcatcttgtagacatttaatgttcatttcttctctatgaatattctttcctctcaattagatacattagctttgatttaaacaccttctgaatcattcattgtcctggaaggaaagaggatttactcagatgatttaaatgaagaaagtttttaaaataaagaatttgtttactaaggaaagaaatagaggatatggraggatccagagaatagaaatggtaggaatgagttattaaaaaaaaaayagaactgaaaacaaaggaagaagcaagccccagggarggctagagctctaacagagagatcacacagtgggagtggtagtctttaaaaatctaattgcttcacagtaattttgccaaagcagtgaaggtgcagggaggaaataccccagtttctctctcagcctatctgataatctcttgctttactgccattacttcccacaggcaaaatccaatcaaaacccagctagcttggcaggctgtcctagagatcagccacccaggcttccagagcagggcagagaagtatgaaaattgattttggaaagggggctaatggagagcaaacaccataagaaaatgctttattggcagcaagcattttgtctttccaggtcatattttaaatatgcttaaatataaggaaaaatttatrcgtgtttgagatttcatgtaaatatttatataagttgaataattataatattcctgaatatgacatttatttcttctcaagagataatatttctgacaataaataagaaggaaaaaaactacctggtaggtaatcttgaaattaatttgtataaatttgagcaagtattgaaacaaaccaaagtggattcctattcaggactgtggacaagtaccacggacagctaccacagcgctgctttttaggttttttgtttgtttgttttatttcaaattatttatttttaattttggagtatgtagtaggtgtatctatttatggcatacatgacatattttgatagaggcatgcaatgagtaataatcacatcagggtaagtggggtatccatcacctcaagcatttatcctttgtgttacaaaccatccaatcatactttttaagttatcttaaaatgtacaattattattgactgtagtcaccctgttttgcggtcacatactagatcttagtcattctttctatttatgtacccattaaccatccccatttcctccccaccttccacttcccagcatctgacaaccrtcattctattttctatctccatgagctcaagtgttttaattttagctcctacaaataagtgagaacatgtgaagtttgtctttttgtgccaggatattttacttaacataatgacctccagttccatctatgttgttgcaaatgacaagatctcattttttatggctaacagtactccattgtatttatataccacattttcttcattcatctgttgatggacactgaggttgtttccaaamtttgtctattgtgaacagtgctgcagtaaacacgggagtgcagagtgcagatatctcttcgataatacgaattcactttctttgcataatatatctagcagtgagattgctgggtcatataatagctctatttttagatttggagaaactggcaaactgttttccattgtggttgtactaatttacattgctaccaacagtgtatgagggttcccttttctccacatcctcatctgcatttgttattgtctgtcttttagataaaagccattttaactggggtgctatagcattgtagttttaatttgcatttcatagatgatcaatgatggtgaccaccttttcatatacgtttgttatttgtatgtcttcttttgagaaatgtctattcagatattttgcccatttttagttgcattattagactttcttcctatggagttgtttgagctccttatatattctggtcattaatctcttctcagatgggcagtttgcaaacattttctgtgggtttatgtcttcactttgttgattgttccctttgctgtgcaggaacttttaaattgatgtaatcccatctgtccactttggctttggttgcctgtgcttttggtatattaactcaaattgagcttccccatgttttcttgtagtagtttcataatatgatgacttagatttaagtatttagtccattttgcttttcttaatatggcaagagacaagggtctagactcattctccttcatatggatgtccagttctcctagcaccatttattgaagagactgtcatttctccaatatgttcctggaatctttgttgataatgagttcactgtcgatgtatgaatttgtttctaggtcctctattttgttccattggtctatgtgtctgtttttatgccagtgtcatgctgttttggttactatagctctgcagtataatttgaagtcagataatgctagtcttccagttttgttccttttgctcaggatagctttggctattctgggtcttttttggttccatataaattttaagattgtttctctatttctgtgaagaatttcatgagtattttgatagagattgtattccatctgtagattgttgtaagtagtatggacattttgagtatttattcttccaatctataaacatagaatatctttccatttttgtgtcctctaatttctttcatcaatgtttcatagttttcattatagatctttcgcttctttggttaagttaatttctaggtatttaattttatgtgtagcaattatcagtggaattattttcttgatttctatttcaggttgattgctgttggcatatataaatgctactgatgctttatgttgattttgtatccttcaactttattgaatttgtttatcaaataatttttgtggagtccttaggtttttccaaatataagattacataatttgcaaacaaggataatttgacatcttcttttccagtttggatgccctttttttaaaattttttttgttgactgccctagctaggaattccagtattatgttgaataaaagtgctgaaagtgtacatgcttgttgcttaccagatcttagaggctaggctttcagtttttctccattccatatgacattagctgtggatctgcatatattgacttttattgacttttatctggtgttttccttctatacccagtttttttagggtttttatcatgaaacaatgttaagttttatcaaatgatttttcagcatcagttgaaatgatcacatggttgttatccttcattctgttgatatgatgtgttgatggatttgcatatgttgaaccatctctgtattcctgggataaatctcacttggccgtgatggatgatgtttttaatgtgttgttggattcagtttgctagtattttgttgaggatttctgatccatgttcatcagggatattggcctgtagttttctttttcttgatgtgtcttcgtcttgttttggtatcaggacaatactgatctcatagaatgaggttggaagtattccctcctcctctgttttttagaacagtttgagtaggatgtttaaatgtttggtaacattcagcagtgaagccatcaggtcccaggcttatctttgctaggatactgtttatggtagctttgatctggttacttcttatttgtccattcaggttttggaytttttcgtggctcaatcttggtaggcttcatctcactaggcattttttttttcatttcttctagtttttctaatttattgcctgacagttactcatagtagcctctaatgatcatttgaatttcagtggtattgggttgaawgtctccttttccatttctaattttatttatttgggtcttctctctctgtattttgttagtctggcaagagttttctcaattttgtttatctttttaaaaacaaacttttcattttagtcatcttttgtattgttttcttcatttcattttcattaatttttgctctaacctttattattactttttctttaataattttgggtttggtttgctcttgcttgtctgattctttaagatgcaccattagtttttttttttatttgaagtttttctacatttttggtggaggcgcttatagttayaaaatgtcctcttagtactgcttttgctgtatcccataggttttgtatattgtgtttccattatcatttgtttcaagaaattttttaattgcactcttaattttttcacccacttactaatcatttgggggcatattatttaatttccatgtgtttgcatagttttaaaaatttctcattattgatttctagttttattacattgtggtctgagaagatgttcgatatatttcaatttttttaatgtcttaagactagttttctggccaaacatatggtttgttttagagaatgattcatgtgctgtggagaagaatgtgtattctgcagccgttggatgaaatgttctgtaaatatctattaggtccatttggtctaggtgcagattaagtccaatgttttgttgatttttctgtctgggtcatctgtccaaggctgaaagtggggtgctaaagtcttcttctattaatgtataggggtctacctctctctttaagtctaacatttgctttaaatatcagggtgttctaatgttgggtgcatatatatttacaattgttatatcctcttattgaattgaccccgttatcattatataatgaccttatttttctcttttttatagtttttgttctgaaatctattatgatgtaagtatagctaccgtgctcttttttggtttccatttgcatggattatctttttccatcccttttattttcagtgtatatatttctttataggtgaagtgcccttcttgtaggcaacaagtctttttttaaaaaattttatctattcagtcactctatgtcttttgatgggagagtttagtccatttacattcaatggtattactgacaagtaaggacttattcttgtgattttgttacttgttttctggttgttttgtggtcttcttttccttcttttcttccttcctggcttccttttagtgaaggtcattttctcttgtggtctgttttcatttattgctttctatttttttgtgtatacactgttttttttttttttgagtttaccatgagtcttgcaaataatatcttataatacactagtttaaacagataatgtcttaacactgattatataaacaaattaacaagcaaagagaaaactaataaaaactctatactttaactttgtccccacactttttaactttttgttatttctatttatatcttattataccacctatgccttgaaaagtttttgtagttattatttttaatcagattatcttttaatctttctactcaagatatgaaaagtttacccaccacagttacaatgttattatattttgttttcctgtgcatttaccgttaccattgatttttataccttcagatattggtcattaaagtccttttcttttagactgaagaactctctttagcttttcttataggacaggtctggtgttgatgaaatatttcagcttttctgttggtcttgaaatgtctttatttctccttcatgttcaaagaatatttttgctggatatcctattctaagatcaatggtttttttctccttcagcacagtatatatataaggccactctctcctggcctataaggtttccactgaaaagtctgctgccaggtgcatcggagtttcattgtatgttatttggttcctttctcttgctgcttttaggactctttctttaatcttgacatttgggagttttattattaaatattttgtagtctttaggttaatctgcttgatgttctataacccttttgtacttgaatattgctacctttctttaggttggggaagttctgtgttattatccctttgaaccttctacctctatctctctctctctgtcctttttaaggccaataactcttatatttaccctttgggggctattttttagaacttgtaggtatgcttcattcttttttattaattttgcttttatctcctctgtgtatatacaaatactctgttttcaagctcactaattctttcttctgcttgatcagctctactggtaagagacactgatacattcttcagtatgtcatttgcattttcaacttttttctgcttgatttcttttaataatttaagtatttttgttaaatttatctgataggatcttgaattccttctctgcgtttccttgaatttcattgagtttcctcaaaaaagctattttaaattctctatctgaaaggtcctatatctctgtctttccaggattggtccctggtgccatatttagttcatttggtgaggtcatgttttcctggatcgtcttgatgcttgtagatgttcatcagtgtctgggcatagaagagttaggtatttatggtagttttcacagtctgggcttgtttgtacctgtccgtcttgggaggattttccaggtatctatgggatgtgggtattgtgatctaagttttaggtcactgcaaccataactgcattaagtggcacccccatccttgtaatgctgtgactcttccagcctcatagaggcttgaagatctgaccgctgaaatggatgattcccctctggctagagctggtttaaatgctaccttcatggttcttggtagtattgcatgagatacaaaagaattttctggattaccaggcagagcctcttgttttattcccttactttctcccaaagaaacagagtatctgtgtgtgcatgcatgtgtgtgtgggggggtgtgagtgtgtgtacctgaagctgggggagcagtgacataagccttcctgtgggcatcaccactgtgaatgcactaagacctgaagccagcacagcactgggtcccccaaaagcctactgtaaatactttcttgctacctcctatgttttctcaaggccttagggctctacaatctgcaggtggcaacaccagccaggcttgtatccttctcttcagtgtagtgagtccccctggccccaggtgggtccagagatatgggcccagagccaagacctggagacagatacctttggaacctacctggtgctctattccactgtggctgagctggcacccaaacacaagacagttcttcccactcttctctcccctttccacargcagaggcgtcttcctccgtgtctgccaccaccacaggcctgcaggttgtattgccaggctactgccagtgttcactcaaggcccaagggctcttcagtcagcttatggcaaatgtggtcaggcctgaaactcacccttcagggatgtgggttcccatatggcccagggcaggtctagaaatgctgtccaagagcttagcctggtatcacggaccccaagatcccccttggtactctacctccttatggccaaactgatacctagtctgttttctttactcttgtttctgcttttctcaagaagamggggtctctcctcatagccatgacagctgtgaaacagttggtcacacctgaagtcagcacatctcagagtctcacccaatgcccagagagtgtggttscccacagtgtgtgctacctggctactgctgctgattattcagaggccaaaagctctttagtcagcccgtgatgaatcctgccaggactgagttcttccactcaaggcarcaggttcccttctggcccaggttttgtctagaaatgtcaaccaggagttagggcctggaatgagtgtctcargactctgctcagtgttctatgctcattctcatttctctaactagaattttccaagttgtatctaaatgattgaagctattatctgactggttatataaaaatgtcatgaggttacagctaagaattaagttataatgatttagctctttartgtagacattcaccttcctatggcaatgatatgtgccataaggatgctctttggactacttctctgttctctgtatagactgggaagggtgatattttatgttatagtagtggattctgaaaaaagtgagtctgacaccactaatacactttcaagaaaattttgcatttctgacaaggaaatataaacatttagagtagcattcagaattatagtaatgcctttacatatctggtgaccattttaatatctattgttgttacataatcttgagatttattaaaataaatgatgaaattctgcatgacctcactaaccacacttttctaactatgtaaactagattatttcctgtaaacaaatgcgatgatactgtgatctttgcacatcttattcaaatgttgtgagtacccactgatacctcaaagtgctatataaaaggctgcaactattttggtacataattgtagactaacacactgaaatacaaggtttcaaacatggatctgttcttggaatacttcttccatttggaaaatataagaaacagtgaactaggccagtctcactctctaataaattatacattttattcctgcataaacatgtttcaaactcagctggagataagaaaatgtatttttatatgtttattaaatattaatttaaaggtcagcaatatttataaaacatctgtagggtataaagtataaaaatgtactraatgcttcacacaccrtttaaaaagaaaataataacagtattttattttattttattttcttagagagacaggggtcttgctatgttgctagtacgatggtcttaatctcctggacataagtgcttctcgtacctcagcctccagagtagctgagactacatatttgtaccaccatacccagcaaaaatctttaatatgtgtttatcatttcttttatttcttttctgtttatggtcattccaatattttaactatgtcctcttattttctttctacattttaactcccccaaattagacattattatggttttattcagtgagtgcctgtatcagtttacccacatttttgccactttcttgtctatcattattcttgcatctcagccttccatcttgtatcattttttttttttctgtctaaaacatatctttkggaattccctatagggaaacaccactggcaaaacaaactcttcattttttttaatttatattaaaaagtccttaattctgccttgttcttggaagatatttttactcaatatactattctaagttgatagtattttcttttagtttttatattactccactaactcctgacttccattgttgttgctgaagaattagttgtctaactatagtgaatcacctraaaagcaaactgcaaatgagcatatctttatctgcagttttaccctgatgtacagaattgttaattgtttgatttatcatgctgggaattttggtgccttgtatatcaggtactccaagattcaaaaatgggcacgggctctgcctcatggagtttatgagagaaggaaatgagagaaaacaaaataaacaccagaaacaagcatggtttagggcaaatggttaagcattatgtttggggcatattgaatatcactttaaggcatgtaagcagagacataaagtaggcaattggatatatgtgtcagaaattcagagaagtttggactgaaagcatatgtttgaacattatttaagtaaagaaagaaaataaaatcatctgatgaagctgtctaagaagagaatatagaatgaaaagagatgatgttttaggagagaaaattgagaaactaatatatttaatactcaaggaaatggggaatgagaaggactgaggggcaacaacaaggttttgggaaaaaatcaggaatattcgtgttcaaagatgcaagagattcttctgaaaagactgtttcaaaaagaaggtagtgatcaactatttgaaatgctgcttagagagatcagctaaagtcacactgaaaaatcgccatttaacttattgacatgtaaatgcgaagagataaccctgaagtcagattttaagcaggttgagtagtaatggggagggagaaaatggaggcaaaaagtcatgtacaagtcaacatagagtaaagtatgaggcagtaaaaaatacctttaaaatttcagcaggcacactattgcaagggttgattttgtgctcaaactaccgtgtactgtcagtcaacttcacgtctgctgatgtcctgcatcttccaggaccagggtgaagcagcaggtgttattctgaggcatcgttggtcttatgatggaagaaaaagagaaaggagtaggtgcatgcaattactctaaaagctgcttcttggaagcagcacacataactttcatatatattttattgatgagagaaagtcacataaccaaacctgatgtcagtgaggcagcaatagagagggaatattttaattaaatatataatctgtcatatgtacagagagctcttttgattatttttattgtaaatgaggaaaatgggaaacaagaagccatataagttgagagaatttttttaatggagataattgataatgtttaattataacaggcaagggattcaattgtaagaaaattattgaatatgtgggaataagagcggatggttgctattttgaggttcccgaaaacataggattcaagttacagtcttgcattgcacagtaaccagaatacgttctgagaaatgtattgccaagcaagttcattgttgtgcaaacatcaacaaaaacctagatggtagagactactatgtactacatgatatagcctattgctcataggctacaaacctgtatagcatatgactgtactgaatactgtaggtaattataacatactggtaaatatttgtgtatctaaacatatctaaacatagaaaaagcacagtgaaaatatgatattataatcttataagaccactgtcacatatgtggtccactgttgacctaaaatatcattatatattgcwttgctgtgtaagaagaggccctggacctagatagaaagaatttcttccctgctcatcaaataaacatttttaaaaagagtaagagttcatctagatagatttgtaggtttgttagggaatactagatggaatttccatatatatgatggcttcttcttgtgtgaagtagatcataagaaatttaccatgtcaatggagaacattaaggaatttgtccaagcttgaggcaaatggaaacgttttgaaaaaatcactatgggagaaactagagagagtggaaaataaaaatatagtcaaattgcttatccgtcctgagggccatttgatgttgttgatgacaaatttacagtgtcgccatccaccctcttctgatttccccacctgtgcttgcacaaatggaggcaaaataacccagttgagttgcactcatgcacagttgggattttgccagatggaagtgaagaaatgagaacaaaggatactaagttcttggcaagagtcttaatgaaattatgagccatagaatctaaactggaaaaagaaggaaagagagatttagattttatgtactgtctttgttcacagatgtaaagaaatcgatcccattcaaaacagcatacaaaatacttaggggtaaatttacccaaggaggtgaaatacactgaaaactatagagcattgatgaaaaaactgtagagaacacaaataaatggaaaggtattctgtgttcacagattagaagaattagtgttaaaatgcccacactacccaatgtgatgtacagattcagtgcaatccctatcaaaattccaatgtcatctttcatagaaacagaaaaaacagtcctaaaatttatatggaaccacaaaagacctagaatagccaaaacaatcttgagcaaaaagaacaaagctggaggaatcacactacctgacttcagaatctattacaaagatgtattaatcaaaacagcatagtcctggcataaaaacagacacagtgaacaataaaacaggatagaaacaccagaaataaacccagccatttatagtcaattcatttttgacaaaggtaccaaaaactcacaatagagaagggacagcctcttcaatgaataatattgagacaactgaatatccacaaacagaagattataattagatgcttagttaataccatacacaaaaatcaacttaaaaatggattaaagattaaatagactaaagacatgaaactataaagcaactagaagaacacataatggaaatctccgtaacattggtctgggcagtgattttttagatatgaccccaaaagcacaggcaacaaaataaaaaataaacaaataggattacatcaaactaaagagcttctgcagagcaaaggaaacagtagtgtgaagaaacattgcatggactgggagaaaatatgtgccaaccatatatctgataaggggctaatattcaaaatatttaaggaactcaaacaactcaatggcaagaaaacaaataacccagtccaaaaaaaatgggcaatggacctaaatagacacttctcaaaagaagacatacaaatggccaacagatatatgaaaaaatgtttattatcctaatcattagagaaacgcaaattaaaaccccaatgagatatcatcttatacctgtaagaatggctattaacaaaaagacaaaagataacatgttgacaagggtgtggagaaaaaggaactgttgatgggaatttaaattattatagccattatggaaaacaatttggagactccttaaaaaaaaaaaaaaaaaaaaaaacaaagatagaactagcataagacccagcaattccacttggtatatatctaaaagaaatgaaataaatatatcaaagagatatctgcactatcatgcctattgcagcattattcacaatagctaggatgtgaatcaacctaagtgtcaatcagtgggttaatggataaagaaaattgtgtgtgtgtgtgtgtgtgtgtgtgtgtatgtatgtatacacattttctttatcacttaagtatatacacacaacagacacatagccttaacctggaggatattatgctaagtgaaataagccagacacagaaagacaaatactgagttttacttatatgtggaatcttaaaaagttgaattcatagacgtatagagtagaatgatgactatcagaagctggggtgggacatgaatgaggaaaaggagatgttggtcaaaaggtataaaatttaatttagatcggaggaataagctttagtgatctattgcacagaatagtgaccataatcaataataatgtattatatattgcaaaattgctaaaagattaggtttaaatgttttcatcacaaaaaaagataagttatatgaggtgatgaattttctaattagctcaatttaatcattctacattgtaaatatatatcaaaatatcacaatatatcacccctacaaacatatacaattactatttgtcaacttaaaaggtttaaaaaggaacaactacaaagctacaataattaacacagcatagtattggtgaaaagacagaaaaatagatcaatacagcagaatagagagcccagaaatagactcatgcaaatgttgccaactgatccttgacaaagaagcaaaggcagttcagtgaagaaaggacagacttttcaacaaatggtccacatgcaaaaaaaaaaaaaaaattctaacagatcttacacctttcacagaaattaaataaaaataaatcgtagacagacatgtaaattgcataactgtaaaacttctagaagataacataagagggaaaaacgtacatgactttagttttagcaatgtgtttagatataataccaaaagtacaattcatgaaagaaaaaaattgataacttggattttattaaaattaaaaactactttcagaaaaaacctttttatacatctgtggttttattgagggatctccatactgttttccaaaagacacaataaagataatagaaagacaagccacagacagggagaaaatatttgcagaatatgtgtttggtaaagcatttgtatccaaagtacacaaagaaatcttaaaactcaacaataagaaaacaactaaccaaggaaatgggaaaaaggtctgaacagacatctcaccaaaaacaatatacaatctgagtcatagcaccaaacatatatatatatattatgtgcgtgtgtgtctgtgtgtgtagacggtaagtaagcatatgaaaatacacggaacatcatctgtcattaaagaactgcagtaccaaatgctggcaaggatgcagagaaacaggaactttcattcattgctggtggaaatgtgaaatggtacagccactttggaaaacagtgtcacttacaaaatataaccacatgtactagcaatcatattccttggtatttatccaattcagttaaaaactaatttccacactgtaacctgaacatgaatatttatatcagcattattcatatttgtcaaaccttagaaacaaccaagatatcctaggtgaacatttaaacaaactgtggtacaaaaatagagtgaagtattattcaatgctaaaaagaaatgagcagccaaacctcaaaaagatgtgcagggacccttacatacatacggctaagtgaaaggaggcagccagaaaaggctgtatactgcatcttctcaagtatatcacattctggtataggtgaaaatacaggcagaaaaaagatcagtggttcccaggagttcagaaagagggagagacggacggatatatggaacacaggagatatttagggcagtgaaactattcaatatgatactgtaacaatggatacataacattattgtttgtcaaaattccttgaactgtacaacacaaacggtgaatcctcatgtaaattatggacttcggttaataataatatattaatattggctcatcaattgcaataaatgtaccccactcatgcaagatgctactaatagaggaaactgagtgatgttaggttttatgagaacttgccatacttttcattcagtttttctgtaaacccaaaactgctctaaaaataaggtctaccaatttaaaagttcagtcataatctctttaatcctaactatgagggagtaagatagaagttgtctattctaagccttctgtgcttgtcttaataatggaatcctacaaagatagtacaaggtaactctacgattcaatcattgttgcattaagctaggatatatttactcatgcttagcaaagtgatgtgaatgtgtctgtacatgtggtcgtgtatggcatgtccatgatttttctaaacattcaaaatggtgtttaaaaaatttgactatgaacatgaatgaaaataaacaggtagaaaattaaagagtgtaacatttaaaattagttggtaggtgatatggtttggctctgtcaccagccaagtctcattgaattgtagttcccataatccccatgtgtcatgggagggacctggtgggggggggtaatttaatcacgagagcggttacactcatgctgttctcatgatagtgactgagatctcacaagatctgatggtcttctaaggggcttttctccagcttcactctgcacttctccttgttgctgccatgagaaggacgtgtttgcttccccttgtgccatgattgtaagtttcctgaggcctcccagccatgctgaactgttagtcaattaaacctctttcctttataaattacccagtctcgggtatgtctttattagcagcgtgagaatggactaatacatttaggagacagtgaatttaaaggatgcaatacatttttgtgttctaaaattgcttcaggtgtattccctttttgtctatgtccctagtataatccttaaccttctttcagtgaattttcagtctgcatcttcctacccaaatgtgttcctgctcccacttttggcrggagaaatggaccaccaacatcaggaggagatgcactgccagagatgtgatgttttacctttgctatgaaaattgcatttctgcttgttttaaaaacacaccaagccattacttgagttttaaaaatctgccaatatccttggcatagtaaggatgccccaaattaatgctgattcgcttttggacagcaaatgaacccatctgttttaatgaaaggggaaaaaaatttccctcttactggccacatagaaccagaaatactgactgcagtatcagggaatggttactgtccttccaagagtatttacttttaaggttcatttgttagatctattcggtgaaaacacagcatcaaggctgacagaaacctggatcatatgagatacgccgttcaaagaatgagactctgctcgtccccttagttatttgttaatatcttcactatttctcatgaaaatcttggaatttgtgtaaggcctgtctttaaatattgacawagataattggtagcaacataagtgctgcataaaatagcattttgtcattcataattttattttaagatacttcgtggtgatacctctgagttgatgtatatctagataatttttaatttaaattaatgcaataaaaataatttatgcagatggcatcatttcaaaatattttaccttatcactttcttggctctatggtatataagatattgataatacaaaattatcttgcatattatgaaaagggaaactggagcaaaatacaataaagtgagaataaagagaacaaatttgatactacagtaaaataaatctcagctttcccgataagttaacctgaactctttatctctttccttatctatttattggcctaaaatgtcgttctttttattgtacattttcttatcagagggaagacactggatcaagaattgtattaatatcctaataattaaggaaaaaattctggtgtttgttttcttttggtgggattctcttcctaaatgaaccagataattaattttgttctccagaatagaaaattgccctgattagactaagttcaaatggaattcactgctaaggttaattaattctagtcccctggctacatttataactaatgtatctatatggtggtcaacatttaaaagattgctgtttgcaattatgttaaggagggtgaactattttaatattggttttcatgtctgagagatagaaagatatacagggctttccactgcaaactgtaaatcaatgctaagatttccacagattgccttggattagaaatttacgtgtgtaccctctgcctccaccccagctccaacagggtgggtttcttgtgggcagggaccttgtttgatttaccactgtatcctctgtgtgcctagcacaattccaggatgagagaaaccttcactgagtcttgctgaatgaataggaaaaatgggccaccctatgaataaaatcagagttaaacgcagggttttatactgaatccttttccccccaccaaaaaaaaaaaaatctgtttccttaacctgtatctgtatgccctgatcagtctgtaatccacgactccggttcccatctcctcctgccaccttcctgttcctcagtttccctcactttctttttgtctttgatactcccttctcttctgtctctttcttgtaaggtttagacatgtctatcttcaaacaaataaagtccaaagtcctcttttgacctttatccgtcttgatgagtttcggcatcttggaagcattgtcctcacctcatgtctccaccttatcttctgtagcgatgactcctcaatctagggcactctggtgtccactgaaatttctcgggccacagtctcaggagactctttggtgccaaatcaagaagacttcctacatggactctgaatcacctgctgccctcagccaggtcctctttctttaccgctggctcctggactttaacaccacttactatgttaattttcctcctactcatctgagtattctccattcttcttgtcaggcttgtcactacttaaatcttggaagcccaagacttgttcttgtatttgtcttattactctcagaaaactttccttgagatatgggggaggtccccattgtcttctgcagctatttgacactgttaatgcatatatctctatagcctccactgaaatatctcccctgatcttcaatgggtaccatttctactaaaatttcccattgacatttctgatataaaatgtccaagtttgatctcattgtgtcccaaggttaaacctgctattcttccagagttctacatctctgagtggcaccatatctgcccagagaccccagttaaagtttggaaataatcttctcctaattaactctcaagctagtgggttttatactcttgctgtcactccaatgcatctactcctttccattcttcctcctgactcgatgttacttcaggggtcaacttggcatcatttcttgcctcagtttctgccatgctcctccaactggttccctcaaatcatttcccaagagaatctccatgtgaagctgatcatatcactttgctcctccaaacccttcaatggttctcttcgccctcagagtaaagatgaaatcccttggtaccaactctcaygtttttgccccaatttgctttggcatctgcttcaaggaacggcagagactgtatctcattaatctttataccttcaaagtctaatttcatgctttgtacttaatccccaaaacctgtttgctcaattaataagcaaacaaatgaaagtaataagtactataattatgctttaatatgtgagaaagtaccttatgaaatgatgtaaatataatttatttgccactttattatctgtagattgttggtacatctttagatgacagaatctcttatttatgacaaatttaattgttcatataataataccaatttatcaggccttcctgaaacattttttgaatgattaaaattggtaaattataataaatatgatttatgtgatgggatatttttatactgtgtaaaaatttataatctatgtgacgtatattgattcccaattaaccagaatatttgtattatgagggatattatgaaaagtataccaattaagctatttaattttcataaaggacctatgatgaggtatcattattatccttttttttttttttttttgagatggagtctccctctgtcacccaggctggagtgcagcagtgcagtctcctgcctcagcctcccaagtagctgggattacaggcacgcaccaccacacctggattttttttttttttttttaactttagtagagacatggtttcaccatgttggccaggctgctctcaaactcttgacctcaagtgatccacccacctcagcctcccaaattgctgagattacaggtgtgagccagtgcgcccttttaaaaattaaatcaccttatttccttttcmtgcatttccagattactagcagaatctgtcagtttgggaataagcgacatatatggtatgttttaaggactagatarctctggcagtacctatagtccagcaggactcatctcaaagtcattgagtttgatgacatttggagttcagtgtcctttgccctgcctgtcagtgctatgcattgggcaacaacctgcctgccttccttcctgtcacagagttaagtaatgtacaatttgacctgtgtagattctaaaactgcaggaaaaatgtatttctattgggaatacctgtttctgcaaaaagaaactgtatgtatgaagtgtggtaaatgcatacattttcaaaaacgcatacaaaacacagacatgtktgtatttttaaaaagtttcttgggactgctgaacatatgaaaagctgcttgcattctctmctgaatttggcaaacaagctgcaaaagaatggtcaaaaaaaggagaaggggtgaagaatgaagctaaaatctaattcagaaaatcttcattactacagtgacttttgttgacatcacaagaatagcacctgtcacttgcctgtagtgattcattcattttacataggggtgtactgctttatccttgtctcgagagactaaggaaaatgctgaccattgtttctctgtggaagctaattgagtgattgctgatctttctgggtgaaatgcagggaatcatgactcaccatcaaaccctttcattaggatctgtgctcatatgtactcgtcttattggagagtccctaggatattccactgaggaaacatttaaaggcagaggtctcactgggctctaatacaacatcaattggtatcactctctgtcatttggaaagattaggtctaatgccttccagattcaaactaaggacctaccaaaaatggtaattaaacaatctcccttgataaccctttctaacatttactaatgaaaagagttcatacatattcagcccaagtcagtaacactatcatgttggtccatcatttttcttctgtacttaggcgttatgaagaacaggtgtttatcattctctacaagctgctcgtgattcatgccattagtaactcaaccctcaacataaaaccccccagccatctgcagattcattgtcatcacaggcctggaaatctgttagttctgtaggtttgctgtgatcttaatgcggtaaaccaggtggctacattgtgcagtgtggacccatctcattctcgagcttcagaactcaggttgagaaaactagtttctacctttaacttcaaaaaggtagtataagtagataaagctacattgttctctttgaattttattcttcaaacttatgggtaattattttgcctctttagagctaatgctgtgaaccctgacctcaaggtcaggagacaggaattttagtcctagctcaccgacctgcacaatgtcactgaacctctcctgggcttcagcttccttacatgtaaacgaaagggttaaactagatgagacgttctctttacacatcagtattgtctgaagagttgtaatagatctttagkctccatccagacataatacagtcttctgggattggaatcaggaatcttctaaattttggtttttatatagctgttctctatctggaagccactgctgcagataaactttatgttcactccatccctgccatttctattctccgagaggccatcgtcctctttcatctgcagagttttccattcctcttgctcattttccccagagacatcatgtatatagtaaatattgaatcaatcaaggcartaagaatcatgtgaaaaagtctgttccactggaatcgtcttttccttttcctagctcagcataaatgaggcattaatgataactcttgagtctacttttccgatcagtagtgtcccaatcaacaaaaagatatccaagactctctatgagctgagtacatttccaccttcatctcccatcactctctgtttagaacttaatatytctgattattatayaatgcctcttccattcatgtattcattcatttattcatcagatactacacaacaccttttaatgaccatactcttgataggggagtgaatttgatagtgartataactggtgccacccttcagggagctaacaggccagggaaggactcagacaatgaattgactttttaaaattacrattcatgagagaggacgtggagcattccatgggaacaaatggaaggtgtaattcacccattctgtgtggttaggggaagtttctaaggatgtgaattttaaacccaaacagaactgctaaagataatttaagctgaattagggcatgttcaagtcccatgaaaaaccatataatggctcaggaagagaagtattattggagtagagtggaagtcagattgcaatgaacgaaggagtaggcggcaggccaggaaatacagatattgaatattttgtgtccttgctttggcttttctattatttctgctatgccttatcttccaagagggcaagaactgtgtctttcttatacactatwatattcactccacctaacatagatcttggcaccaatttgtaccccccaaaattttgtatgatgaattaacctttataaatgatagttaaaattcaaacacgtattaagtaatgtagtatcctgctttatagtatatttgtttatacatgttcttgttcccctcaaaaggatttacatttgatataaacaaattaartatatttaaatatgaggcctatgatctcctttaattttactaaattaaaacaggagagtatatacctcaaatgcgtgatagctgtatccgtttcaatgactcaaacaataagttgaaagacttattaaaatgagtattttgaaacactaatcaaggtaaatctgcttatcagatattcaggattgaargagcaggctttgactcgtacatatataacttgctactgtccattaagtgaaaatggtgtttctctttatggcccttttgtcttctggaaagagtaacttcagtttgtctcttttggcctctttgcatggctccagttcagtcttcctggcagctctcaggctgcctggtggagaatcaccaccgccataaccccaatccttgcttctccagcaccacagtgaaaggagtctcaggtcccctgccttctgttgctggtagatgtagaagctacattattcccacatgagcctcaccctcagcaccatcagttgactcttaaggagtcaccctccctcccttctttttaatgaagggagcagctttccacccggcctcacctgaggacagttacygttatttacttcttttcccactacttgaaaatttaattgccactgacagtggttgtggtcacgtgggagctctctctgctttctgcaggtaatgagttctctgcctattatagctgccattttgtcttccatttgagtgcatgtctaggtagttaaatagttggcttgttcccacagctctcattcattctctctctctccacccccccaacctctccttctcccttttcctctctccctctctctttctccctctccctctgttcyttctctttctctctctctttttctctctgtcaccctcttggtgttggtgagagagggagcatcttaaatactttgagtcaaaagctggtgaaaataaaaatttatttcttggctcaagacccatttagccatctttccctattgcgaaactcccaaactacagtcagcatcttcccactctcattgttccattcactctaaatttcaacaacatatgttactggcataatggaaatagatcaaaatgagttcccaactccacctatggctcagactccagcattaaattagtcaagtcattgggcttygcattggttcaaagagtgttttaatgtgtgtaaaagaaaaacagatcataattacatttgctgtttcctattatttcatgcaaatttatggtatttcaagtatattgtgtatcaartttgcttttatgagctggtctggaaacaattacaatttataatattttttctatggaaattattttagatgttccaaacacaaaatttacaagtgaacttccaaaacacarcctgctcctaaggtggaggcagcctgtacaggagatcttaatggcagagattttatgttttatttcctctctgattgttgtatcaagaatagagcaattttcatttttaaacttaattgtgtagaaattttctccgtgcagctgtactttcactgaaagtgaaaaatattatacagatgaggattcttagggtgaggtaacattgtaagtatttgaactaaaatggacacctggtatcatttagaagaagtaacaggttcattatttcaaaaaaatgcggatgatttctagtagataatacaatatgaggcatttattctgctccacacacataaatgatttttyartaggggaaaaaagaaagcttaaaagacagacctagaattcaaaccaagataaacacattcctggacagaaatacaaatctgggatttgggtccccaaacaggcagtggtggatagcagtttggctctttggtggttagctggactaaaagcrgctcatgtggagaagcgggtggatccagaggcagatctgtgtttggcctctcccaaggctgcagaagctgctcccaaaccctcccagaagtcaagatacctgtgaagctacatgaatagggggccaagctgagccacaccgcaggtgggcttgtgactacctcagatggtaaattccgttgaagcctttgggattcaaattagatgttatcttctttgcggtctgcattcttgcctcttaatatggtttttctgtgtccccacccaaatcgcatcttgaattgtagttccggtaatccccaggtgtcatgggagagaccaggtggagataattgaatcatggggacattttccctcatcctgttcttgtggtagtaagtactcacaagagctaatggttttataaggggcttccccctctgcttggctgtcattcttcttctccctgccaccatgtgagggatgtgtttgcttcacctttcgccattgttgtaagttccctgaggcctccacagccatgctgacctgtgagtcaattaaacctctttcctttataaattacccagtctcaggtatgtctttattagcagcgtgagaacagactaatacacctccttttcttctatgatgatggaagagtggtctttcctccacctcagtgcttacccaccatctgcaattggatcccatcgcctccagcttcttatgagacttaccaacaatcctttctcttctgtaacttcaatgtcttggtctttactatctcttttacattaatatttaaacatattcaattgctccccatcctaaagaaattctctcagcttcatgtcttcctccatcattaatctgttgtattgcatgccttttgtgacttcatttttgcaaaccagggaatgaatggggatggctttctgtgaaacaagcaggaaattgatggagatgaatgaaggtaacagaatttagaagtggagggtacctctattttctttgtgatgtggaagacttagtcaaaagtgaaagagaggtgaaggggcataaagaaggaggaaatagaacactatggcttttaactgtcgtatgcaaggaattcccttatctgacagtaggcagagccaygcatgctgatgtgggccctctccaaactagtgtaaagactggaagacacggtttctttatcctggcctgaggagttttccctcccatgggcatcactgaccctcagatcttggaactagggtgacatcagggaagagcagccacttcccggtgccctcagctggcatagttcctttgcactgcttgtttgcaggtttggtagcaaaatggagtgaaaaagccttaaacccagactcagtcatttttgcaaacttcaacctcaactctcctttcttgtttaacctagcttaaaaacttccggaatcatgagaaactcacaatgcttgtttggggcagttgagaaaggaagtggattgtaaaggaaaaggactggaaattacttttgagacctattcacttaaagctcctctttaagtccctaagtcccaggcacctccaacccaacaggtcaaaaaataaactaatctcctttctccagtccactataatttcctctagtgtcttcccgtcaaagtgttaccatccacccaggcatctataccagatacttagcaaagccctctcagttctatccctggaaatcttctgaaataggcaactctctccacctccccatagttaaagtttcaggtgaatcgctaaacagtttccttctcaccggccctctacccccacgcccatccttcacactacatgagttacttctttcatcaagcacagttttcatcaagtcaatctcttactttacaattagcgattgtatgtggcttctccttatttaagcagcactgtctattagtatttggggtgaaatggaaacattctctgtgttatccattatgatagccatgagtcacatgtggctattgagcacttgaaatgtggctagtgcctctgaggaactgaattggtgtatttatttttcattgacatttaaggctgggcatggtggctcatgcctataatcccagcagtttgggaggctaaggccagaggatcactgaagcccaggaatttgactttactgtgaactgtgatcacaccactgcatgctggcctgcgtgacagaatgagaccctgtctcgaaaagagaaaggaaagaaagaaatgtaaatggccacaggtagatagtggctatcatatcagatagtgcaggtccaaaggatacaatctacaatcattggcataacctgcaagatccttcacagaccaaccatagcttctcatcgccccctcctatcccatccacttagtgccatatgccgtagacacacaccaccatggcaccccttcagatctcctaaaggaccacttgttctcacctactgtgtatgtgtgctggtttgtatgtggttttttctgatactactctttctcctcttaacctcccgagaacatctacaaatcctgaaaggccatgttcacatgtgacttctgaaaagcttcctattacctcctcaggcatctgtcaacatgcttttcagggttcccacagcaacttgtatattctgcactgaagcactgaaagtactccctggtaattatttgttttcttgtctgttatctttaatcttaattttccccttaagcaatcagttagaaagcagatttcaaaattattatgtatgatggatagttaatatgttggggggaagaagagtcaagccaaagttcaaatggattatgaaagaaaacaaaccacaaaaaaaaaaaaattgggaaaaggctcacctcagttaccaccactgaatacttccgtgcatataagtcttttgagggaacttaaggaaaggaattgactttgaccttcatggaacatccaacatgtccctttacaattctaaactgaattttttttacctcttacttcatctayatttcaaatgtattcctgtttgatgtcaaacctcttaaaactaattaagtaatagatttttcaattgagcacaccatatatctttcaaggttaagcaagaatraaacactttgcctggattttccactgtgaaattgatggtgaggagggagrgtgtttttaatgtgatgcactgcggtcagaaamaaaaacaaaaacaraaaaaaaaccacaacagtcctgtcagttaaaactgctagatacagccatccttatgaatgttttataatcattgtaaaagatcaaagtgaattaatgatatttttgaaatttcctgagaaaatgacttcctgcccattgarttgtcttggcaagattcccaccttttgagcttactggagaatgaaaagaataacaaccttcttgtcctgattttatggaaagcgaagcaatctgctgtgtttttgaggctgctgttagtaccattttttaaaaagaagattatcttaaaagagtttgctccttagtacctattcaaactcttctagttttattgacactattatgtacagacagttgaaagaattatggcgattaagccgagttaaatattatagaagatgaatgcataatgactgggtttctgttacttcctattttcacaatgaagagttttgtagtcaaccagayttaaaattatggaccatgtgttatttgacagtcaaatctagaagcatggtaaatcctaagcttcttgtgtttgcggagatgctaccaggaaagcattttgaaaaacagctgaagcattaattcagtgcctcctcttctgagttctttctgacctcctcgggctgagtaggaagctgctcttctgtgcctcaaagcaccctgtgttcatatacatttattactgaacttactgagttgtgctgtaattagatgtgtatatttctgcatttccactgacctatgaacttccaaagccaagtaccatgttgtattagtcatcattgtgttcccctgagcctagcatgttaccatgaaccagagaggccctcaggaaatgtttcagggagggagaaaaggaagaaagagtggttgttttctgggcctgactgagtcagagcatgttctcaggaagttttatgagatctaaaagcttaaatgcccctacgttttaagataccttaaagctaaaacatgtgtcaaagtagaagcccaaataaaagctcatggcaaacaaaattgtgtttttaaaagattaattgatatctgcttctatattaaagatttgaaaaatggaactcgattctacccgttcttaaaatatttcctcatgacaaatgtgggcccttagaaaatatttaatgaatatttcaaggatgcattcttgcaactagagagtattttatactatatttatgctttaaaataacacacttttataagagtatctttttttttttttttttaatctctctgttgcccaggctggagtgcagtggcgcgatctcatctcactgcaacctccgcctcccgggttcaagcaagtctcctgcctcagcctctcaagtagctgggactacaggcacctgccaccacgcccagctaattttttgtatttttagtagagacaggtttcatcatgatggccaggctggtctcgaactcctgaccttagatatctgcccacctctgcctcccaaagtgctaggattacaggcatgagccatggcacctggccaagagtatcatattttaatcaggtgatttaaggactaattcagagagaaaatctgcctgtgtttatctgtacttcctagaatgtaacatgatttaaattatcattttactgtcaaaagatatttatttagtgtagaatgtttattttggaataatataggataaaactttctagtcagaagtggtaaaatcttattgtaaaaccactcctgtcttccttctgccagaaaaagagtaaaattataaaataccatgaattttgttaaacattcctgaatccatgtagattgaaaaaactgagagtgaatagttgctgacattagtgtaatgttgcatcttttacttttcattaatatcaagtacaaaatccatacttgatttttttcttttaaatgtttagaaatattcctggcttgccataatgtgttggttttatcactgttgatttcaactagctttgatctttctattggatatagtctatctttctaatcaaaacatttttatttcaatagttttaggggtacaaggggttttgggttacttgaatgaattgaatagtggtgaagtctggccatttacccattatgcaagtagtgtacattgtacccaacaggtaattttggaatctcccttcctcattctgaggctccagtgtccattataccactatgtattcctctttgtacccatagtttagctcacacctataagtgagaacatacagtatttgtttttccattcctgagttacttcacttaggaaaatggactccagttttatccaagttcctgcaaaaaacattcttttattctttttatggctgaatagtatcctatggtgtgtgtgtgtgtgcgtatgtatacacacacacacgcacacaccacagtttctatatctactaatcacttaatgggcacttcggttgatttcatatttttgcaattatgaattatgctgcaataaacataaaagctcaggggtctctgacataatgacttattttcctttgagtagatactcagtagtggagttgctggatcaaatggtagatctactttccgttttttgagaaatcttttatactgttttccttagaggttgtactaatttacattcccctaatagtatataactgttcgcttttcattgcatccatgccaacatctattggtttttgactttttaataatggccattttgactggggtaaagtggtatctcattgtgactttaatttggattttcctgatggttagtgatgttgagcatgttttcatatgttttttggccatytgtataatcttcttttgagaaatgtctgttcacatcttttccatagtttttaatggtattctttgttttttttcttggtgatttgtttgaaagcccaagtagccaaagcaatcctaagcaaaaagaacaaagttggaggtatcccattacccaacttcaaattatattacaaggatatagttaccaaaacagtgtggtgcaggtacaaaaatagacacacagaccaatggaacagaatagagaacccagaaataaagccaaatacctacaaccaactgatcttcaacaaagctgaaaaaatcatacattggggaaaggaccccctattcaataaacggtgctggaaaaattggatagccacatgtggaagaataaaactgcatccctatttctcaacatatacaaaactaactgaagatggattaaagacctaaaatcataaaaayttctggaggaaaaactcttctggacattggcctaggcaaagaatttgtgagtaaatcccaaaagcaaatgcctcaaaagcaagaataaataaacgggackgaactaaactaaaaagcttctgaacaacaaaaaaaagtcgtcaacagaaagacaacctatagaatggaagaaggtatttgcaaagcatacatctgacaagggactaatatytagaatctaatcaaattttacctaaagtctagtggaggagttgagcagagcagattctcattacaatgttgtgaagttgtggaaataaaactgaagttactctgataatttgtcgaaggcctacaagatccctatatttcccacctctgaaataaatcctttatgtcagataaacrgaaatgtagtttacaagatgtaacatcactataaggattgtgaccaaatatttacatgtagaaattaaggacaagaattgccctagttttagcatatactaaatttagtcaattataattcaactgtgaagtattggtggcatttgtcttaaaataaatgtatgataatggtgcttagtatcaccctaattatttaacattgttttgaaagttctggccattgtagtaaaaaattttaatattttcacaatattttttttaatattttaaagtattaaatatttaatatttattcctctaaatattaggtataaatattaggaacagcaaaatatgtccttctttgtgagtgatgttacatatcttataaatcaaaagggatcaactaaattgtaattaataagatgttggtaacttgacaaggtagaatattataaataagcaattgtaattttgtgaacattcttttagaaaataaaatagaaaataattttatttatggtggcaaaagtatataaaaatctggtaatcattttagtaagacttacaaagaatctatgtgaataactgaaattatgagggcatatttctgaaagagtggtacatagtatagatattttaattctgtataatttgacagatttgttaaaatcctaataaaaatttcaaaaacatctttacaaatatctccaaattacattagaaatattgaggaggaaatattatacaaacatacgaatactgaatactactcagaaaatacttggaatccaattgtaacagactagacacaagataaaaaactgtgtatacatacaataacaatgtaaaatatggctatgaaacagactggaaggaaatacatccataatactaagagttctatttggatgatgagaccatgatttcataattttgacagtgaaaaatacattgaaatgtaggacattttgaaggacacagttatttatctggggagccaaactatcactatgctgctcaattttctgtaaagctcttgggggaattgttttcaaccataaggagacccttacattctttttataacatcaagaatgccaacattttcaggaaggaaaactgcctctaagaattaagcaaaacaccttgcattcttcttatctcttccatggtcctaaagctaacccattaaagtaatttccccatcacatagttttccaaaaatgcttaatttctaaaggcagatccagaagtcagagtctccctgtagatgtggctgttatattaaggcagtgggtaaatgggagaacagtttccccagttcacatatgccagaagatattaacatggatgacaacctctcattggcatgaccaggattattcacagttatcttaattcaccaaatctgacatccatggtaaaatacacactatgtaccaatgagtcagaatacaaaaatgtttccaattaaacgatgacatgttgttgattataagtattcttcatagtgttgaaatgtttttaaaggcatactaaaattaatgaaaacgttgatataatatgcttgcaatcactctttctttacgccacgctggagaagatgtctgaaggcaagcaagaagacagagatgtttacaaccagcatgagtgggaggcccaccctcctccaggacagaaggtccaggcaggatcagcagtgcttctctgctggctccccgagcagcttgcacacagcctcaggctgatgttccgctcttttccaatttcacacttgcaaatgctcctctcattattcattgccaataaaaagtagagtaggtgaggggtagggctccttcttgtaaaaccacacaaggttccagctgcagctccattttgactgatgagcacttgcagcagagcagcctcttgctggccctccacccactacaatgcacacctctcactacgatgcctgcttttcttttgagccacagaggttgtggcatttgcctcccactgcaatgcaagttaataagaatgacattgttaaaaggattatagtgactctaccttaattaattttaaatatattctccaaaaactgcagaatgtaatacatcatttgatatgcacctacaaggaatttgaggagaaagatgaattgtaccttgaggccaatctcttatccttattcttgttaaatttctggcagattaaatgatgttaaagataaaattttgaaaactgcaatttactgacattcttgccaactcattcatcctatcaaatatatggrtttcattttcgagattaaaaagtttycataatattatcgatgaccatcctaaactatttttaaaggattagaaagggtgacaactgtctgatgcgttaaatgtgcattattcaaatatgttctcaataatatctattaattgtttcgtggacccattacagtacctaaatgaagaaaaagaaacacaagttatcatggcctttggggacagagctcattgctttcattgacaaaacccttatttgagatcctcttgggttctggcttcttccacagatgggagataaatctcaaataggccatgaccatctcttagaaatccaatrataggtgtttttattattgttattatttatttcatttatttatttatttattttttgagacagagtctcactctgtcgcccaggctggagtgcagtggcacgatctcggctcactgcaaactccaccttctggattcacgccattctgcctcagcctccagagtagctgggagtacaggcgcccaccaccacgccccggctgattttttgtatttttttagtagagacggggtttcactgggttagccaggatggtcttgatctcctgatctcgtgatccgcccgcctcagcctcccaaagtgctgggattacaggcgtgagccaccgcgcctggccacaagaataggtttaaacatctttttccacaaaacttttcagcttcccatgtatggtattgtggcaactatgagggccctgggaaataagtgctggatgcccactcttctcattcaataatttctccctacttcatctctaacattcacggggttttagctgacacctgcagataaatgattcctaaaggtttgcatcctaacctcttttggaaattccagcctagatattctgtgggcagcttgtctggagtggcacccatcatcccgctccatacctgtccctactctcttttgtatcccattaaaacattactgtcttctcagtagtccaggctagaagcatttggaacttctttaaatttgtcttctctcttgtcccccttgtcaaatcctatcaatctggtcatgctctgccacttcacaatgccaccattgttatcttcctccaatacagacttgatcgtcactcccctaacactgccagacactcacatctaaactcttttgtctaccattctagatgctctgtattttgaaatcaaccaatttttgctaaatttatgccctatatactacccaccccagggcattgtactccagtttaccaacatgccttcttctcgatcagattctttatatttcctatctctgtacttttttctatatttgaatagttctcatttgggaagcctttctctggaagggttgctgcctctttctttttttttcttttttttttttttttttttacttttttttaaatttgagacagagtttcgctcctgtccccaggctggagtgcaatggcacgatctcagctcactgcaacctctgcctcccaggttcaagcaattctcctgcctcagcctcccaagtagctggaattacaggcgcccaccaccacactgaactgatttttgtattttaaatagaggtggggtttcaccacattggccaggctggtctcaaactcctgacctctggtgatccacccacctcgrcctcccaaagtgctgggattataggcgtgagccactccacccagcctcttttatttttatttttctaattttcttttaatatttatttaattgtgcttctctttgtgaaaagttttaagatgtgtcacaaaaatgtgtacatatacaacactctgtaattaaatgagatagaagtgagaaaaatgaaataaatgtatacacataacaaagccagaaataaggttacttaaaagaaagaatggcaacagaatctatgcaccgcacaaagtagctttgtcactgggagtgtcctcacatgtctcttgtgctgtttctggctttctttgctcctctatcagttctcagcacatcctgctgtgtacagagtaataaatctttctgtccagctaatcagtaagcgtgttggaagtggacgtctgtcgcattcacactgccaaaagtgttgagtaggcactgctcatgtagtaagcagtgtttttataaatgaataatacatgaatactgtgtgaaactttgcaaataacacccacatggcaatcagcatttttgcttttgttttttgaagttggaagcagagaactttcatttcatttcctaaacatagtgttcatggaagcattgcctgtactcaggcaaggtcagtttccacccttatgttctcttacctaccatttctccatggcctgttttcagtgtgtagcaatttatactttagtgagctctcctatgtctcctttactgtaatgtccgtaagagtagacaccctgcctgtccctttcacaatgacaacccagtgcctagatggacttttgatgctcagcagtgtttggtgcatgattgataagtattgaatgaagcactggatgaaggagcaccagtcccatgtggattttctttgatctcacccttcttagcacccacaggcatgagaaccagctaaccaacygatgattacaataacaaagacacagcagactggattatctgtgccctgtttttcttattcctaaggtttatctgtaaactccctcttcaaacatgtcctctgttgtgcagaatagggtcttcctcaaaaaagtagtcaggccgggcgcgatggctcatgcctgtaatcccagcactttgggaggccaaggtgggtgggtcacctgacattgggatttcgagaccagcctgaccaacatggacaaacactgtctctactaaaaatacaaaaaattagccaggtgtggtggtgcatgtctgtaatcccagctactcaggaggctgaggcaggagattctcttgaacccgggaggcagaggttgctgtgagctgagatcgtgccattgcactccagcctgggcaacaagagcgaaactccatctcaaaaaaaaaataaatagataaaaagtagtcatctgtgaaaaacaataacacccgatagttgaatggcaattttaaaaccagtccttttgagtagcatgcaaatttcgcatcttttatcatttttagagcaagacaattggggctgactagaaccagacaacaaagtccctactgcagctggagcttactccacttatgcctattygtaggcttagtagttgtgaaagatgcrtattgtttcctcaaatggcttgtttatccaagcatagttgctcaygaagttaaaaaaaaaagttcaaagtctcatatattgtactgtgtctcatgaatcttgaatgggaatggcttaatctggatggcttcaagtgcacagagacaaaattttctagagttcatgtagataaaactgtagtattctaaactacactccaaatatttaaaacagtaatcattagtgatggcaatttcaaatattttggtatttgggttttttttcttcaaatgatatttgtaagttacaaagtttcaggtagacaggaggaaaaagtttttagatctatttcacatcagggtgaccatagtcaacaataatgtattgtatatttcaaagtaaaagaataaatttcaaacatctcaccacgcacacacaaatgataggtgagggaggtgaggtctgtgttaaatggcttgatttaatcattccacgttgtatacatatatcaaaaccgtgactttgtgtcccataaatgtatacagttatgatttgttactcaaaaatatttattttaaaaagtgaaatacacctatagactctattaaatgatagaaggtatcttaaaatttcaaaactggtatataactttgaattgtgttaaataagccagaattataattcaaaataactatgtagttattgtattttcatggctaaatagatgttagctcaaaataatttataagtctaggaaatattaaataaaaacactaggctatgttttgaaaaaaatacgtacactctcacacatatgtagagttatacatataaaattgttaatgggaagcctttattgatgtaagttctgaacaatttcaaaattggtttggccttaaatttactaatccaattcgatataatattttatctgtaataaagctaatgatttaatgattggacaataaatgtgtatcttaatctttttatctcagtatttttcaccaataccaagagatatttcaaaatttcagctttaatcttaggaaaatgaggccaacattatcctaaagaaattaacgcaggaacagaaacccaaatactgcgtgctttcagttataagtggaagctaaacattgggtactcatgggcataaaggtgacaacagtagtccctgtggtctactggtgcggaagggaatggggcaaagttgaaaaaccarctgttggctactatgctcagtacctgggtgagaggattaattgtaccccaaacctcagcatcaggcaatatacatataacagttggggttacaggatgagtaacaaacctgcacatgtagccaccaatttgaaaaaaaattttgaaattataatagaaaaataggggccagcaaaaatctttttaaaaaatctgaaaattaatttcttcatctatgttattctgtttaatttccagattttcacrttatattaaagatctaagtcctttacaattttttttattgttggcagtgttaccaagttcactggggcattgaaaatatattcaaaacagaaaaagcaaagtgccagtatagaagagaatatgcaaaactctagcttttagctttctctggatttcccttctcaagttcattatttcatttttagccaatatttataaaacactaacagaagtcatatttttctccaaataccataaaaaatgtatccatttataaaattctacaagatatgcttgtttctgtaatcaagtcttttctaaccaaaaactacaaaattgtttcattttatattgttaaatgagtctttttgtagattccaggatggaaattggtggcagcctagcatttgactgkttttttcccccaaagctgttgtttttgggcagtttcacagagttgtgatgttggctcaactttcatacagccacagagtttctctaggccgttctatttggatgggacaaattgcagaagtgtcataaattattaactgatgattttacttttgacctagtttcaataatctatgcaaaatttggaatatataaggkaaacatataaaaaatgagatcaaatatgaattctagccagagctggccgtgtatcagtactgaaatccaggccaggcccacgtccagctgagtctcttctctgcagcatgctcctgagaagacttattgtcctagcatttgagtccttaacaaatcwcatggactataccaatgcacttgataacactgaattctagttctattcagtggctgactcatcaatgcaggcagtagcctgcgcaaatgacaaacattagaaacttaaagtgaatgtccataaagaaaggtatgaaaatctactatattatgtagttttgcaatacccttcaagattaagtggattaagatgtctttttctggaatttggattatcagtacctttcttcaatgagaaggtaattcctgtctttgcctctcttccaacgtgaacaacttctgtcaacmctgtatccagaacatatcctaaattccccccgagcctacaaagctcatgatttggcatctccttacagctctaacctcayctctagtctgcaratccacattggcctcatttggttccattgccctaccttagggaacatttattcttttatttgcctggaatttgcttcctctagatcttcacttggctgcttcttcttgactttaatgttaatccctctcaggggcacataatattgttatactgtcatagaaataggaaagatcaaaagaggttacatttacaaaggctgataaaattgtgtttggcggcatacctttcggagcagggtagaggggaacttcaagttagttggggttacaggataagtacgttccaataatagctttgcttttagggttaaattaaatttattgtattactatttctaagtgctggctgcttggggaggaaggatgagttgcagtcgttatcaaatgacatgcttatgatagtctcattctttctttgaaaggtgtgcattgacaagccatcattgttctatcataagccattctactttcttttactcaattggctcatcaggcactttaaagcagaacagaaattcagacaatggttttgtgttttttatttaaatgcttttctgaggataaaaggagaggtatcatgagaaataggactctcctcccttacccttgagaaatgttataaataagggcgttttttatgatcaggagaaaaaggatgtgccacaccaactatattgatgaagtcatttcttcatyatgttaattatattatctaaatttgaatacaccttcccctttgtcatatctttactatgagtcctagtgttgcttcagggttctcttggtgttagtttagttatttaagaaataattattgggcatatatgtggtgggccctgtggtaggtttggaggacagatatacattgtgtgcacccatggaactctcattccattagaagaaatgaacagcaaatgtgtaattacacaaatcactgagtcattgcagttggacaagtgctctagaggatgcaccgcatcctgagactgcaagaggtgtcctgacctacactacagaggcttagaatgtgcctccctaaggagttacattgaagctgaatcctgaagaatgggggacaattagccacagaggaggggagaaaagagtaaactgtatgcttagagccttcggaggattttgacacaaatgtgatggatcagattgtgcttaggtgagatcactatggccactctggagagaatggactagaaaggagaaaaaatgaaaacagaacagttaggagggaattacagttgcccatgaaagagatagtcacagcttggataatgtattgcgaatggaaagagtagatatatttttgagttataattaaatcttatggaagtactatagaggactggcagacttctaattaatagcatatctgtggttttcatcatttagtatttaggctctatgtaaaggaaaatgtatataaagaagtctttggtatgaattactaggttaaaggaacatttagaaatatgcttatacttatagagtaatcaaaaaattcatgatgcagttgtgaaatgtgtagaaacaaaatcaatgtaaacctgaagagaaaaatgtcattttcatctgtcgttatggcaaacatatcttgatgtgctagatgtagcaaaatgattgtttaaaggaaaaaaatcaatttcaggtatacgtccatgaaygaaaaaaatttttgcaacttttggtaagaggktttatgtgaagtgaagtctttctagatactttctctttctaaattaagggattaatgaaaagactcctttaagccatgagtttcttatttaatgtatttcacataagattattatacttggaaatatttcaaaatgaaaataacttttcaaacttgaagagtaactgagttgtatttctggaaaaatatttaaaactttacttgtattttaaagagaaaaaaactatattatagtccttggaacttatgtggacagaaaactgactgccatttattcatagctccaaacctagacacaagaactcattggaaaatcataacgggttaagcaagcaaaactatatacttttaaaaatagactttgtttttagagaagttttagatttacagaaaagttgtatagaaagtacaaagttcccatataatcccttcctttmtgcacacaatttctcccattattagtatcttgcattagtaaggtacgtttgttacaattgatgagctaatattaatacataaatattcactaaagttcatagttacattagagttctctttgtgttctataccctgtggattttgacgagtgtataatgtcatgcatctaccatcgtattatcatacagaatagtttcaaagtttcaatgctctaaagttttcttgtacttcaaccatttatcctttcccctgaaccttctgaacccctggcaaccactgatcaattcattgtatctatagttttgccttttccagaacatcatatagttgaaattatataccatgtagcttattaagacttccttcttccacttcacaatatgtatttcaacttcctccatgtcttttagtagcttgatagctctttttttcacattactgaataatatctccttgcatgaatatatcacagtttgtttattccttcatctattaaaggatatcttggttgcttgtagctttcgtgtgcaggtttttgtgtggacataagcttgtaactcacttgagtaaatacctaggagtatgattgctgtatsttatcacaagcctttgataaggtttgcataaaactgctaggctgtcttctaaagtgactgtaccattttatattcccatcaacaatgtatgggagcgcctgttgcttctaaggtctgtgtctagattcattttttccatgtggaggtccagtctatcttttctccattgaattgcctttgcttccttgtcaaaaatcagttgattgtatttgtgtgggtaagtttctgggctctctattctgttctattgatgtattgtgtattcattcatgaatactgtactgtcttaatcattgtagtttcacagtacgtttttagtcggatagtgtcagtcctctgacttccttcttctttaatattttgttgaccgttctggttcttttgtctttccatataaacttaggaattggttgtttatatctgtatagtaattttctaggattttgattgggattgcattgaatctgttgattgagctggggaaactggcatcttaagaatgttgagtccctcttaatatgtcttcagtttatttagaccttctttgatttttctcatcagagctttgtagtttcaatgctcacttcttagatgacctgttggttgtgcaagttaaaatttctaaacccaaatatgatatagttttattaagacttatacttttaagctacaactgttcttatataatagtctccagtaatcaaaacagaaagaaaataaaaagttgcaacatctgggaaggacctaatgaaataaaaataaaaatcacatcaacaacaattggaaattaccaagaaaaaatattattccattatctttatatgtataatacatactcattggtaacaagcaggccctagttataaagcattcattttatggagatgatgttcatcaaaattgaaattcttatttctgatggtattcttagatgtttacagcattcattatcgtacaaatcagaaaagaacataaaaaagtaattatcatttttaagagtttttacagtgagacagatgaactttgaatatgattaaatayaaaataataaaacattgatgacaacatcattcaaaaatatctccagtaaagaaatccagtgagtaaaaggtcttctgggtaaatttatttgatttaatttaatctgtcaatgactttatgtgacgctttgcatgttgcaaagagaatatgaaatagcttatatgaatgagtaaaccattctactataaagacacatgcacacgtatgtttattgcagcactatctacaatggcaaagacttggaaccaatccaaatgcccgtcaatgactggctggataaaggaaatgtggcgcacctacaccatggaatactatgcagccttaagaaagaatgagttcgtgtcctttgcggggacatggatgaagctggaaaccatcaccctcagcaagctaacacaggaacagaaaaccaaacactacatgttctcactcataagtggaagttgaacaatgagaacacatagacacagagagggaaacaacacacactgggccttgtcggggtgtgaggggcaaggggagggagaggattaggacaaatacctaatgcatgcaaggcttaagatgacgggttgataggtgcagcaagccaccatggcacaacgtatacctatataacaaacctgcacattctgcacatgtatcccggaacttaaaataaattttaaaaaataatattgcctaacatattttcagtaaatatttgaaattgaataaatgagtggattctagaacgactgaattatcaaataaatagagataaaagaaaagtaatgacagagttttaagatgaaaccaattagagcacggaaatacaaaaattggtaacataaatttttgaaattttatcaccaaaaacaaggagggaaagataatcagatgccaatgtccttttgatttaaatttgttatagaattttttcttaaaacaataaaattaaattgacaatttaatgggtttgttttgtttttgtttttgttttgagacagggtctcactctgtctcctaggctggagtgcagtggcacgatctctgctcattgcaacctctrcctcccagggttcaagtaattctcgtgcctcagacttccaaatagctgggattacaggtgcacaccaccacacctggctaatttttgtatttttaatagagacagagtttcaccatttgaccaggctgatctcaaactcctgacctcaggcgatccacctacctcagcctcccaaattgctgagattacaggcatgagccaccacgcccagctgacaatttaatttaaaatattatttaacaacccacattactttctttagtcaaattttcaataagataactttgcatagaaatagcccagatctcacagcaacaatacagaaaatggatgatactaatcatactctgcttttcatctaactgaatttataaatttgcatttatacacacaatattaatgtactaagaattgaaaaggcaagtttctgtagaaaatgttttagttcttaatatttcagtacttaaaatctatgtataaaatattaagacacttcaaagagaaaattaacactttaaatacaaattttgggggatcaatatcttggaacgtttaaaggagcgttcactgggcaaaagctggaaacattcttcttgaaaactggcacaagacaaggatgctctgtctcaccactcctattcaacatagtattggaagtcctggccagaacaatcagacaagagaaataaagggcatccagataggaagagaagaagccaaactatctctgtttgccgatgamatggttctatatgtagaaaacttcatacttttgacccaaaagctctttaagctgataaacaatttcagcaaartttcaggatrcaaaatcaacgtacaaaaatcactaacattttatataccaacaacagtcaagccaagagccaaatcaggaacacaatctcatttacaattgccaccaaagaaagacaatacctagctaatcagcgaggtgtgagtgatacaatgagaaatacaagacactggtgaaagaaatcagaagacacaaacaaatggaaaaacatcccatgcttgtggataggaagaatcaatatcattaaaatggccatactgaccaaagcaatttacagattcaatactattcctattaaactaccaatgacattcttcacagaaactattttaaaatccatgttgaccaaaaaagaccctgagtagccaaggcaatcctaagcaaaaagaacaaagctggaagcatcacattacctgacttcaaatggtacacagggctacagtaaccaaaacagtatggtactggtacaaaaaaagacacatagaccaatggaatagaatagacagcccagaaataagaccacacatctataaccatctgatctttgacaaagatgataaaaacaaacaatggggaaaagattacttatttaacaaatggcgttgggataactggttagccatatgcagaagattgaatattgaccccttcctcacaccatgtacaaaaatcaatgaaagacaggttaaagacttaaakgtaaaagccaaaactataaaaaccatggaagacaacctagcaataccattctggatataggaactagcagagattgatgacaaagatgctaaaagcaatctcaacaaaagcagaagttgacaaatgagatctaattaaacttaacagcttctgcactgcaaaagaaactgtcaaaagagtaaacagacaacctacagaatgggagaaaatatttggaaactatgcatccgaaaaaggtctaaaatccagcatctatacggaacttaaacaaatttacaagaaaaaacaccaccattaaaaagtgggcaagtgacaggaacagacacttttcaaaagaggacatacatgaggccaataagcagatgaaaaaaactcaatatcactgatcattaaagaaatgcaaatcaaaaccataaagagatactatctcacactggtcagaatggctattattaaaaagtcaaaaaacaaatgctggcgaggttgcagagaaaagggaatgctaatacactgttgctgggagtgtaaactagttcaatcattgtgaaaagcagtgtgatgattccttaaagagctaaaaacagaactaccatttgttccagcaatcccattgctagtgtatacccaatggaatacaaatcgttctaccataaagacccacgcatgcaaacgttcattgcrgcactattcacaattgcaaagacatgaaatcaacctaaatgtccmtcaatggcattcaacctaaatgaaatcaacctaaatgtccatcaaatgtccaaaatgtggtacatgtacaccatggaatactatgcagctataaaaaagaaagaaatcaagtcctttacaggaacatggatggagccaaaggccattagcaaactaacacaggatcagaaaatgaaatacctcatgttctcacttrtaagtgggagctaaacgatgaaaacacatggataaatacagaggcgaatgaaagacactggggcctacttgggagtcgagggttggaggagagagaggatcagaaamaataactattgggtacctgggtggtgaaataatctgtacaacaaacccccatgacgcaagtttacctacgtaagaaacctgcacgtggacccctgaacctgaaataaaagttaaaaaaaaaaaacctcaaatacttcatgaaaatcttgtttaaaatagaaaccaaattttattcttgtcttattgtatttaatattaaagctaattttaaaaataaaatattagaaaaaaggagcattcactcacaccttttgcaaatttactaaatattaaggtaaatagtatttaacagacactgtcgagggccctgggaataaaaagatgaatgaggaaaagataactaggaaagtatccagtctagtgggaagacagggatgtgtgcagatcattaaaatcaactgcattaagtgatctctaacgtattaaagtgttcatagaacatcaaaggagtcagggagtagttggaagaagagaaagaatctctgagtgacagtgcaggacactaggtgcatatagttcaggcctcagaatataaatggcttttgcagggtgcttagaatggaagaaacattccttcatccatcagagatgtgtatgcggtaacttgcacaagtatcaggggatcccagaactttagtttagtatggcaaaataagtagattgcactcctaaaaaataaaaataaaaactcattgatttcccttttatcttaaaagaaggaaaggcagggtgatgttggctttttatccaagtagtaggatcctgggtagtgtgtttactctctatataggcttatcggtgattagaaataccattgaacgaaatcggcatgtctgtgagggttatgtacgataccgatttattgaatagatttaaaataatgacccagtgtttacactgagggatttttcttctctgagttaactaaaattatggtctaccaaagcccactaggagaattcttgactgttgagactatgtattttaatgcagcattagccaggaaagacctagttatctggtcaaccaacaaaatgatctttatctccatgttaataaatgtaaataattattctaccatttggtaatgtcaggatggctatggcttttcgtcccaaggggttttggttccagtgccaaatgtagctctataaactgtgcagaagcaaatttaggtcacgatcaatacaagcaattaagcctttgcaaaagtggctaagcctttgaattcatttaattatgttagacccaatgtaggaaaagaaaatgtttccttttttcttaaagtttatccagaattttttcaaatatttaacgctcttctttctgcagtacagatttgctttgcgtaaactggctctattaatctaaaaatagactgcttgtagaatattattaactttcctgcgtgggcattatgcacattctgtaccatcactctctgcaacaagatgagaaaataccctcgggtctgtctttttactgggaaagctttctggaaaaataaaatgaaaaggctacttaggccatatttgatgtgaaggaaaagtacagtattttcagatgttagttttagaccaagagggagaattaatttataggtatgactaatgctcagtcttgttaaagaaatgattgtgcatgaaacccaggtaaagattatctgacgtcttccaaggaaacctacatggcaattaattcttcgtagcttctagcagaaaggttggaatccatgactcttccctttccagaggaaagaggaaatggatgactcaaaggagccacataatttaaaaaagaaaaggaaaatgtacaaaggtcaagaaacaaggtcaaaagtttaagaaagttaaattatagtgcaaaaggtaattttgtcaataaagtggcttgtaccttcaaataattttttgattttttgaaatgcctacttttgatagacatatatakagagaaataatatacaatgaaatgttccctttagtctgcttcttctcatgtaatctatgaaatcctggtatatctctcttctttctaaatatttcttatttcttcagttagcctctcacattgtcagttaagtcattttattttgcactagagttaaacttgtctatttttcttaaatctcaattagggaaaatggtttgcctggtagtcatcaagctatgcacaaaaaggactgacagttttcagtatgacttgtatatttaattttcttgcatattcaaaatgccaagaatttgatttaatgtattttcttcctaaaaagctgttttgttcacatattttttcttttggtttctgatggtctgttttggtagctcatgtttctgtaaccatcagtcattggcctacctttgaaataatagggacatgtttataattgccattttaaggagcccagctatgattacccttatctgaaatgtgttccttccttgttcacaatctcctgcaaacattgttttcttcctctctacccttatgaagtgaattcggtgttatcaactattgacagacaacagcttcattaagggcagcacattattatttcacttgattctacctgtccatggtccagcatttctaaaacccaactatcctttgtaggtgctagtgtggtggyaacatttaataaccagtgtaggggaagaagaataattattatctcaaccctgataagttttaagttggaatggaccccatagcaaaagacactttaaaaagagaaaaacaaacagaagtttattaatatgtttatttaatacacgcatggaagatacctagggaatgagtaattttcaaagaggtggcttgaattccaacttatgtgggatcttctacaaagaacagtcaatgcttagagaagtgacaagacaaaaaaaataaaaaataaaaagactttgtatctctaggggccacaaggtgggggaaggaaaataactggcagagaaaggctggtttgcaaagcttgctaacgtagtttcctctggtgccatcttccggcccgtaagggtgaaaaactctcttcagtggttaacctttgttctttcagagaggggaggtgaaatagcttttgtctttgtaaatttacatcccaattttaggcaaatagagagagggcaaagagccttcctgcttctgcttgttcttaattccttcagcccaatcagacttctgccaaagaggcacatttgggtgtagcgtattctggtttcccatacctgctgtcagaaaaaaggttggtaatatttgccagtttctgcagtgcatgcactttttccacggctagcttcaagctaccagcaagtctttcccgactcctgctttggaaagatgggtatggtctccctagccagtccccaccatgccaactgaaaaataggctggagcagggggatctgcaaatcgctatcatcttctctttaattgagtgcacttagtgctacagattggaatacatatgttgctactggtgtttcttctaatggaagaaaacagctcccatatttattagtagtactgctattactttctcagtaagggctcccctaatttctttttttggagcaaacaaaacattatctaccgaaagctgtagatgtgtttgttgatgagtaccatacataaatacagcccatgtgagaagtgagaatgtcaaaataccagacactttaaaaaaaaaagaagaaatccaaagacacttaaaggaacaataaaggaaagaaattaaaggttgattgtcgtccagatatagtggtacttacttgaaaatgtgtccttgaaagtctattaaaagatcagacacaggagctttcggttttgttacgaataagagtgttttcaaccaagatagtagtgcttctccttgttcacagaggtattgactcctatcacgggtagctcctgctgcattttctcctttatactgccgcagtatatatttcaaccacctgtgaaattaaaaaatgtccctgtagcagttggattcggtttgttagtccatgtcttatcaaaaactgtttaaatgtatctctggtgacatttcaatgataattaaaagcaagattccaagtttcaggagggaagcatattttcagttacatcttaactcatccagtgtaactctgccaagaaatgagttcatcacatgaaataacaggagtctaattcttcccataatctttcattttaacatttcatttataaacaaccaagatgagaagatggatgtgatcaaaggactctattttataaaagagatgtgaaaaatcctagacstaaatcaccttactaagttaggtcaaatagtcaagaaaatgtgagacactcttatctaacttgggcactaaaagaatattattttatttttgctcaaacccatcagtactctgtccattagtagaagtccttggtgcctggacctctgagcagcttcctgactgatccctctgtctccagcctggccttctttctagacttcactggacacccttgtagttgtcatcttccacaagcagagctctgaacatttgacttcccagcaaatctttactgaaagccagtttctccattacttcctcctgkttagaagtgatttyccctacctctgagcatatctctttgctatgataaaattttgtaaaccttccccatctaaagaatattatatgtgtgtgagaaacggaacacaaatgatagagcaaagtggtgaaatgttaatactaggtgagcctgggtgaaagttgtatgcatattctttgtactagtatkgaaactttttgtatttaatatttatttcaaactactttttaaaaaccttcaacatcagatcccagtttattaaactcaataataattctcccatyggtgccacctgctccagttaccccaggtgatgatggtattggctctaaattaagccttgcaagatgtgcagttcctgatagagcaacacaaagggcaatgtcaaatgtgtggaaatttgggaaagtgtaatgtctttggggtgactggccacctctcccattttgtttgggactgagtaaaagtagtaaagtcccagacaaacccagatgagttagtcaccctcctttgtgggactctgctggatgagtgtaactgaagccaaacactagtgtcaggagtgctggggaacaatccaaacaagaacacctctgtttcattctgtgtgaagtaggaaacctgataagccctttcaactacaaagggagagagtcgtattatgaaaagtgtaagttgtgttcaaagaaaattcatctttgatgcacgcatgattgtgaagagagggagatcacgagggagatccatgttgctgtgttatttgaggatttccattgcctgtcagtaaagtccaaattccttagctcagaatagaagacttatttataaggactaccatgtatccagggcaatataaatgactttcactcaccccaaaacaactgataaagttcatgccattatgcccaatttgaaaaatacagacactgaagatcagagaggtaaagtgccttccccaagggacgcagccgagatttaatggctcgataagtgttgagtgaggttactgggagaagatttcaagttgccagaagttttgattctaggattcatgtacttaaaatagragaaagagctttcttttcattttattacaaataaacttattgagacactaaagcacataggatatgtgtgaggctttaagaggctacaatttgggcctaaatgtgagagtctaggataacatacttctcataaccagctgtgtgaccttgaataagttactctgtgtctcagtttcctcatctcatagaatgatgatagtatgtcttataattaatgtaagacacttatcacagtgcstggtactcaataggcactgaatcaataagaacaataataacaaaaggcatcatgactattttaatgttgaaaggaaatggtcttaagttaggaacttaaatgtaagcagaaactagctctattttattgaatagggagcatttctgcctatgagcatcattagggcctttacttttgacagctgttacagttgccggtgtcatttagcagaatgcagggcactctcagatgattcctatgaacagtggtgactttcacttatcacgtggtgacattttgatgtttcataatcctcatcagtttgaaggttacaaaaaaaagaggtacagacttatccaataaataaaaaccgtatttctttgtcttaagcttaaagggcagagttgcattttaatctctgctttgttgtcctgcgaaggagctacctttacacaaattgctctcaacatgtaaatgttttattgttttaggataggaatcatgttcctagcatactgtgatttttacactaaacacataattttccttgcaatgggtgggtttattataaataaaaatgttatgaataawgttctatttcaagataatctagcatcatrtatgtaatcattttcagtagatattagtttagacatttctatattgcatactctttataacaatatgttcatactctaaaatgtaatatgaaartacattgaccttaatatatacttactatttattatttaagttacatgagatttatcaagctctgtatattttaagattcttggaaaaagctcttggaatgttttcataatataaaatatgactataaaaagcatgtcctttacagtcagtataaaataatatcattctaaactctagtgagtgtcattggttaatatgcaaagaaatgggtatgaaaaaatatttactgaaccatatactaaacagacatttaaagagcaccttattctatttctgaagcaccatactagtcactatgagatacacaaagataaataaggtttagtgtctgaccttaagattattcakactggaaactaagaaaagtatgcaaaaaattataaaacaaactatgatgtgttctaaaacatgttttagaatcaagtaagcagagataaaaaaaaatatatagtggtgtgtgcttatagttccatctagggaggccgaggcaggaggatcccttaggctgagaagtttgagttcagcttgggcaacatatggagacccctatctctaatgtgtgtgtgtgtgtgtgtgtgtgtgtgtgtgtgtgtgtgtgtgtgtgtgtttattccaggacccgtaggatttctacaggtagagataaggaagagagagtaagaccctatagtgggayagtctgaatctcagaagtagataatacttgaatggaattcaataaagatttgagtggaagtcacgtggatggtgtggatttgaatagaaagaataggatttgaatggaataggattggatgagggtttgaatggaagtggtagggatgtatgtctggaaagttaaaggtaaaataattagtctccataaagacacatgcacctgtatgtttattgcagcactattcacaatagcaaagacatggaatcaacctaaatgctcatcaatggtaggactggatgaagaaaatgtggtacatattcatgacggaatgctacacagccatagaaaagaacaagataatgtcctttgcagcaaagtggatgaagctagaggcccttatcctaaacaaactaacacagtaacaaaaaaacaaatactgcatgttctcacttataagtgggagcaacacatggagtatacatagacacaaagaagggagcagcagacaccagagcctacatgagggtggatggagggaggaaggtaaggatggaaaaactatctattggtgctatgcttattacctaggtgatgaaattatctgtacaccaaacacttatgacatgcaacttacctatataacaaacctgcaaatgcatccctgaacctaaaataaaagttaaaacaaaaaaagaacyagagtctctaactaaagagttgaaaccaaacttggaagcagcagcaagccaaggaagtgtgtgtgtgtgtgtgtgtgtgtgtgtgtgtgtgtgtgtgtgtgttcaaagaaagtcaaggcatatgtattagtcaagttttaatcatgaaaacagccactctaagtattgcgtaaatcaagtatttaatatgagaattccatccactctgcacaattgtgggacaaagtgagaaagggaagatttgcaaggggcatatactgaagaatcaaacagtcactagctagaccacattagggtgtagcctgcaaggaacccagggagcctygcacaatctgccactggcatgtgtctgttaaagaggagctcgacccacctctatgccttcagtgacaagttcagaaagatggatggaactgccaatcctggtgaagctgctgacctggggcagcacctgtctctgagggtctgcatccaagatccagctgtgagcctggggctgatgttggggccaacaggtaggaaaatatgctgggcacacagtgcatgagagcaagaacaagctggatcctgacgggcacctctgcatcttttatcaccatcatttaccatgataaacttccatgaacaatggcatccgctccattccttcttccaattctcacacaaagtcctgtcttggccaacttawctcagaacaatagagaarcagaggrttccaggaaaaktagtttctagacttcaccaagttgacataaatgaccaagagcttgaccagtgctatgcattagtaatagtattaatatcagcaacctgtaggctacaaacagggcagagctgggaaggaggggaaaggagacttctgtagtgttgcaggagattataagaaagatctgaataagggtaagaccagtggaaatgaagaaggctcctcctagatggagcagatagggtagcttaagaagtaggagttagctctggggctttgaactcacataatatgaatggttggtccattaaaaatatacaccacacgaatggctgctgrtttgaaatagaaataaacttggttttagatgtgtggaggtgctgtatgactagtgaagaggatatacaataaatatctggaaatgaagggctggaacactagacacagagatttggaagtcattcacttggaaatgatgattagtcactgtccatttacaacatgtagtgagaaaagggtaaacttctgacctatatgaagggactgatgaaattaatcagtgtgaatcactataaagagaataaaataccaagctagcaagggatgtgaaggacctctccaaggagaactataaacaactgctcaaggaaataagagaggacaccaacaagtggaaaaacattccattctcatggataagaagaatcaatatcatgaaaatggccatactgcccaaagtaatttatagattaaatactattacaatcaacctaccactgactttcttcgcagaattagagaaaaytactttaaatttcatatggaatcaaagaacaccccatacagccaagacaatcctaagcaaaaagaacaaagctagaggcatcacactacccgacttcaaattatactacaaggttacagtaaccaaaacagcacggtactgttttaagcatagtatcaaaaaagatatagaccaatggaacagaacagaggcctcagaaataacaccacacatctataaacatccggtctttgacaaacctgacaaaaacaagcaatggggaaaggatctcctattcaataaatggtgctgggaaaactggcaagtcatatgcataaaactgaaactggaccccttccttacacgttatacaaaaattaactcaagatggattaaagacttaaatgtaatagcaaaaaccataaaaaccctagaaaaaaacytaggcaataccattcaggacataggcatgggcaaagatttcatgacataaatgccgaaaggaattgcaacaaatgtcaaaattgacaaatgggatctaattaaactgaagagcttctgcacagcaaaagaaattatcatcagagtcaacagacaacctacagaatgggagaaaatttttgcaatctacccatctgacaaaggtckaatatccagaatttacagggaatctaaacaaatttccaagaaaaaaaacaaccccatcaaaaagggggcaaaggatatgaacagacacttctcaaaagaagacattgtgtgcaagaaatgtatgaaaaaaagctcatcatcactggtcattagagaaatgcaaatcaaaacctcaatgagataccatctcacaccagtcagaatggcagctattaaaaagtcaagaaataatagatgctggtgaggctgtggaggaataggaatgcttttacactgttggtgagaaagtaaattagttcaaccattgtgatagactggataaagaaaaggtggtacatatacactgtggaaaactacagagccataaaaaaatgagrtcatgtccttcacagggacatggatgaagctggaagccatcatcctcagcaaaccaacacaaaacagaaaaccaaacactgcatgttcttactcataagtgagagttgaacaatgagaacacatggacacagggagggcaacaacacacacaccagggccagttggggggtggcaggtgaggaaacttagatgacaggtcaatagatgcagcaaaccatcatggcacgtgtatacctatgtaacaaaccagcatgttctgcacttgtatcccagaacttaaagtaaaataaaataaagtaaaataaggttgggtgcggtggctcatgcctgtaatcccagcactttgggaggccgaggagggtggatcatgagatcaggagttcaagatcagcctgaccaagatggtgaaaccccaactctactaaaaatacaaaaattagccgggcgtggtggtgggcgcctgtaatcccagctacttgggagactgaggcaggagaattgcttgaacccggggggcggaggttgcagtgagccgagatcgtgccactgcattccagcctgggtgacagagcaagactccgtctcgaaaaaataataataaaaaataaaataaaataaaaacaatgaarttaatcagtatgtccacaggcagctcagggcaggtgttatcccctgacttaaggactggaattctaccacagatgggaagctccttcttgggcctctgggttgggattcggtgtggttagaattcaggtaattgggagtgctgtgtttggggaatattcccaggcacctaggactaatgccctgaagcactgaataaaatgtccaattagcattccagaaaactggagaaagagggtggaggttgagtgaatcctaggtcaaggagaatcactgatgtttaatttttagcgtgggagrtgagggaaagggaggccaggtaggggtgcagaaggtggaacttatgtaaatagtgatacaggtcattcctctgaggataaaggaactggagatgtcccgagagccaggtagaaaccatgagtggatccaaccgggtgcaataatgggtcaaaggaggaaaaggaccatatatttgaaattgcccctttgtcaggggacaagctctcagcagccattacatatattgagcttccatcaggtctgtttacttcactgtcttatttttcaccaaatcacggaaggtttccctggctcagagtctggctggattcatatgtgcatttctcttcctcctttttactgagactttgcagtctacgacygggctaggctgcagtgtcatgcttcccatgtgaagtccaaaaccttgaattttaataagtagagcctaggattttttttttaattttcaaatagaaaccatgagaaatgagttgattaaaataaccaatgtctgaaatcagttgaacatcatcccactttctacacttaataaagcaaatgtctaatatccctgaggagagaggcattgtatggttacatcgtctctaccgatcataaagaatttgaccccacctttcagccttcagcaacaagttcagaagtctaccttgactgattgtaattgtatgggcttctagagaaaccagcatggaatagtaaagaaagtctatatatctagctaaagcctgagattggggctctgcagaaaaccttgaattccctgcaggtcaaactactatgagggtacatccaaatattattaggctcttggttcttcagctaatgtttcatcctcatgcttcctggatccctcaggatgacatcatcaccactttaatcaatatatttccttttagattttaatatttctcaagtactgattatgtggatttctaaccagtaaatctttctctcaaatgatccttttaaaaaattgtggaaaaccttctatcatagcaaaataaatggttgaagaaaagattgttctctaacattgcaagaaacataacagtttggatgagaacaacctaggaagttttagcttcaaagcacttggccttgagtattgtaatcaaagtggctttcagcctgcactagagcatttacagctgctaaggaattgtatcgtttaatacattcatgcttacagtttcttttgttgcagaaaaaatgtcatgtctgactttaacatggattatgcttttttcccaagaatatttcttctaatttttctgggttgaagcagctgcggttgctatgccatcagctctgttgctatgggggatggcttgggtgtttgccaaactgtgattggttatttcagcacccttatgttcaccagttgacatttttctatgttgaatcattctattttattttaatttgatgggtaggctcaataatgttgatcagctttgaaataactggaattagatataaaggaatcccaccatttctctccttagaagagaaaacttactcagaattcaagtggtatgtatargaatcatgcatgtattcacgcgcatgcaagactaaatggtgatatatttagaaagttgcctgtgtacaagacatgtgactcttaagtcatgagactcagagaaattaaaagggacgaacattggcatttatgtagttatcttgaacagaaaaaytatttcaaattggaggtggccacatcctgtcaacttcagtgacagctgtcaaaattaacacaataacttctatttatggttcattctccaaaaawgcagttttctgctgtacttttacaggaacattaagayatatgtatctgaggcaaaggttctctaccattggatcaactttctaatcagctgtctttgcctctgaaatatgatgatgttattgagtatttcagagaattacaaaacccaaatctgaaactctttgaaaaggaaggaaaaaactcattatcataatgattgtcttccatctgatcttctttatctcaagtgctagaaggaaaaatctttggaaaaaaaagatccaggaggctctgtgccctggttgcttagtcactagtcyatttaaacaggacaagacgcagtttgtaatttttttccaatatacactcagaagtgaacttgtgaaaaggatgtaagttggcttaatactggggaatcaagattttactacttagaagtacataataaccatattttgtaattattttttctatgacatttgtgctcttcgatattagagaacactgaaagctaggtttatgagtgaatttgacatttctataataaaatttattttagaaaataactttgaatcatttcctgaaatcatgtattctcaactgctgagtgggcttttcatctcaataattcgcctcctaaagatactttcttttttttctttttttttttttgagatggagtctcgctctgtcttccaggctggagtgcagtggtgcgatctcggctcactgcaagcttcgccttccgagttcacgccattctcctgcctcagcctcccgagtagctgggactacaggcgcctgccacctcrcctggctgattttttgtatttttagtagagatgggctaattttttgtatttttagtagagacggggtttcaccatgttagtcaagatggtctcaatctcctgacctcgtgatctgcctgccgtggcctcccaaagtgctgggattacaggtgtgagccaccgcgcctggcaaaatactttctatctttaacaattaaagaggccttatgcatttggcttgcagaaaccaccatttaacattgattttaagaaattatttatatcgtacttttcagactagtgatatatatggacaaataaatgcagacgttgtattgttggttaaaagtttttttcattctatatagaaaatgattactggaggatttaaaaatatgaataatatcctatttatgatatttacacacatatatgagcgcatatactcatgcaaatttaagccttaaaattctgatatgttaaaaaacagagttcactgaggtgcaagaacagacacatgcatatgtggttctcaagctggtcctcctctcccagttgtatataacccccatcaaaagcaaacaaacaaataaaggtaaaatctaaatgaacactaatactctttttcagttatgaaaaataactggaattatcctttgttgtggaagacaataagtaattttattcttatttaaataagtaaggttattattatataaagattagattagattagattaagctattaatagatagcttcactcctttttccccactcagatttgctgcttctcccacaccgtggtaactcttatgtagtgtcccaagtcagatgtcctggggtcattcatgagtcttccctatctcttatatctcatatccagtttatcctcagtttctgctaaactccgttaaatctcttatttttttcaggccctactgtattcttgcttaaattatatcagtggctttcacctgacctcactccccattctcacctgtcttcagggatttttccataatataaatcaggcctccctacttatcatccttattaggatgtctaatagacattttaaaacttaacatgtccgacctaacacttgagcttacctaccactggaaagttttcaacctcagtcttcatcaaagtaaatrgaactccattaatcccattctaaagctaaaaatcttgaattcttcctctactcctctttcatgcccaacgttcaataaaaaagcaaatcctgttgasttggcattgaaaacatatttagaatcttactcttcctacctatctgctctgctactggcttcctctaaaccatcatcacttgatgatggaaggtggaaacaaccttccatcatcgtggaaacaaccttccatcatcatgtgtctcttaaatagtccctaacagtctgtccccgcccatccctcactgcattgcctcatttaattctgacagagctgagtgtaatgtagagtgagtggattattttcacattttacaataagggccctgagactctggaagtttagctatgaatgatggagcaaggatttgactcaggctctgattcctaagctcatgctttctttacctgagacaactgagtcttataaagggttaagtcactactttacaatggcacaactatgaagaagagaaacacagattggaactagactcggtgctctgcccatgcacgtgtggcataatttatacaagtagaacgttaaagatgtatttattttgactaataacactttgaaatgaaaatactcctgggacttcagcaagctgagctctagttgattctactgggaaacatgaaactttcctatgatggttgagatcggagcattgagggagctgggatgtttttaagcagatttctaacaaaaagtatgtgttaatgatagcaacttaaccaacagatacttttaatttgccatatgtattttgttaggttatctcccttgaatagtrtaactaatacatggacatttattacataagattcaaaataatttacttttctgatcataaagggtagtacaagttgtgttcttttcacacttaactttttcaaaaattattatcctcattagggaaatatacattaagaaaatgacagtgaggtaccacttcacatccattagtttggccataagtggtatagtgagataccacttcacacccattagtttatacatataaaacagaatataacaaatactaacaaggatttggaaaattcaaagtcttgtgcattgcaagtggtaatttaaatagtgtagcctcattggaaaacaatatggtttttcctcaaaaaaaattacacatagaattactgcatgatccagcaattgcactctagaaacatactcaaaagaactaaaagcagagactcaaagagatatttgtatactaatgctcatagcaatattaattcacaatagccaaaaggtggaaacaacccatgtgtctataagaggatgaatggataaacaaaatatatccatacaaaggaatattatcctgcctttaaaagaaatgagagccagacatagtggtgtacaccagtagttccagctacttggaaggctgaggtggtaggatcactkgagcccagaggttcgagttcagcctggccaacatagtaagacccccatctttaaaataaataaattaatcatttacttaaaaggaatgaaattctgatacatgtttaaatatggatgaaccttgaagacattgttctgagtgaaataaactagtcagaggaggacaaatattgtgtttccacttttatgaggtccctagagtagacaaattaatagaaacgaaaagtagaatagtggttaccaaggactagggagaaggggggaatgtggagttatggtttaatgggtataaagttttagtttgggaaggtgaaaaagctgtgaatatagatagtggtggtgactgtacaacatttttaatgtacttagaatgtaattgtgagttaaattttgtatgaggcatgatgtttagtttgaggttcatcttttttgcttatagatggttaattgcttcagcaatatttgctgaaaaattcccttgttccattgaattgcttttgtgccattgtcaaaaaccagttgaacatatttttgaggacctatttctgggtttcctgttctgtttcatagaattgaatgtctgtttctccaccaataccgtactgtcttgattactacagctacttatcaagcctgaatataagtagattgagttctccatttctatacttcattgtcaagattattttagctattccagcgcctgtttatttccatatacatttttttaaaagcttctccatgtctacataggaccttgacaagattttgataggaattgcattaagcctatagatcagtttgggtagaagtgatatctttartatgttgagtcttccaatccatgaatgcaatatgtctttccatttatttcaatcttcttttatttcttcatcagaattttataatgttcaacatacagattctgtacatatatttttgtgtacctaggtacttcattttctttgyagcatttgaaattatactgtgctttcaatttgtttccacatgttcactgttagtatgtagaaatatgattgatctttgtctattggtcttgtatccagcaacatcgctgaaatcacttatgtactctgctattgttggatatagttctgcatatgtcagttagaatctgttatttcactgtgttgttcagctcttctatatacttgctaatatcctggctagcagttttactggtttctaagagaaggttgttgaagtccccaactatgattatagagctacttcaccttgcagttttatcagtttctgcttcacatataggatagtggcatgtaccctcttaggtgaaatttctttcaagtttcatttggtacatacatatttaagattcaggggttatatctttctagctaatcctatattgtgatatgtccctctctttctctagtaatttctcttgttctgatgtctactttatctgacattaacatagccacacctattttttaattagtgtttgcatgatatattttttctattgaatttgaaataaatctcctccaaacagcatatagtagggccatgtttttatttactctatcaataattatcttttaattggtgtatttagataatttatatttaagataattattgaaatgtcggcatataagttggccatttaattacttgttttgtttatttcctctggttcttttttctctttctctttacttgctttcctgttatttgaacattttttggagtctgtcttgattaatttgtagtgtctatttattatggtaaaatatacataatgtaaggtttatcattttaaccatcattaagtgtacaattcactggtatgaagtacattcacattattatgcaaacattatctatcttcagatatttttcrtcattccaaactgaaactctgtatccaacaagcaagaacatttcctccttctccaagcccatgctaatgactattctactttttgtctctctgaatttgcctattttaggaaccttgtgtaaatggaaacatacaatatttatctttttgtgtgtttggtttatttcacttagttcatcaatgttgcagcatgtgtcagaatttcataaggctggataatatttcttcatacgaatataccacattgttcattcatttatctgttcatgaacacgtggatggtgtttctaccttttggctacggtgaattaatgctgctstgaacagtagtatacaaatatctgtttaagcctatgctttcgattcttgggtatatacccagaagaggaattgccagatcatgtgataattctgtttaatttgttgaggaacgaccttcgtctcccatgttcaagcaattctcctgcctcagcctccatagcagctgcactattttacattcccaccagcaatgcacaaaggttccaatttcttcacatccttgtcaacactcataatcttatatatatatattttataacagccaacctaatgggtatsaagtagtaactcattgtggttttgattttcayttccctagtgtttagtgatattgakcatcttttcatgtgctattggtcatttgtatatattctttggagtagtgtctattcaagtcctttgttcattatttaattggattttgtggttattgtttatttgtttgttttagatacaggatctcactctgttacccagactgaagtgcagtggcatgatcatagctcactgcaacctcaaattcctgaactcaagtgatctttctacctcaggctcctgagtggctagtactgcaggcacatgccaccatgcctggctaatttttttgattttttatatagacagggtctcactacattgttcagggctggtcttgaacttctgtcctcaagccatcctctcaccttagcctcccaaagtgttaagattacaagcatgagtcactgtacctagcttgatgttctctctgtattttggatattagtcccttaccagacatatgtttgcaaatattttctctataatggttttgagtggatctccttgtatggtttttgtagtggttgctctggatatttcaatatacatatgtgacttttcacagtctactggtaccagcattttacctttttaagtaaagtgtgggagccccacttccattcaggtgtctttaccttccccacttttagatatgattgtcttaagtatcagattgcattttaatatttttttcagtcatcaaatatattttatgaaactcacaatatacccatatttctgctcttttacttgttcctgtttttcttttgcttctagattcttttattattttctttctgtttgaagaacttcctttagccaagttttaaagttaggttgggtagtgacagacttttctaattttcctttacataagaatgcctttattttctyttctttcctgaagacagttttgctgaatgtagaatttgctgttgacaacatttttgttttatcacttgaaaaccgttttgccactttcttctggccttcatggtttcatatgcaaaatctgctgttattcaaattgctgcctccctagagacaggcattatttttctctgactcctttcaaaatattttctctgcctttcttttcagtttaattttaattagtctacactttttggggtttatcttgtttggagttttcttgactctgtgaatatgtgtatttcaccaaatttgggaagtgttcaatcattatttccttgaatattctttcagccccaccctctctccattctttttaaggatatgaatttggatttttgtaatcttcctaaaggcccctgaagactctgttcattttgttaatattgtattttccctctgttgatgagattgtgtgaattcaattcatctatccttaggttcatcgattctgtgttctgttatcttcactctgcttttgagtccatctaccaaggttctttttttaaaaataattatgtttttctattttttagttctagactttccatttggtccttttttataatttctgtttctttgctgaaattctctattttttcatttgttccaagagcacttgcatttgttttttggttgttgttgttgttgctttgttttgttttgttttgtttttttgagacagagtctttctctgctgcccaggctggggagcagtggtgcgatcttggctcactgcaaccttcgcctcccaggttcaagcaattctcctgcctcagcctcccaagtagctgggattacaggcgcccatgaccacagccagctaatttttgtatttttagtagggacggggtttcaccatgttggccaggctggtctcaaactcctgacctcaggtgatcacccatcttcgcctcccaaagtgctgggattacaggcgtgagccaccacacccagccccggcagtgtctgatcgtttaaacagtcttatgatagctgttttaaacccatcagataatttaaccatctggttcatctcaatattggtgtcagttgattgtcctttctcattcaagttgttgtttccttgatttttgtatgacaggtgatttttctttttttaatggtatcttgggccttttatccgttaaattagggactctgggtcttgtttaaatctttgattttagtgaggactcacactgttatgtttagcgtgcaggttctggcctacttctatggaccatggttccaatggcagtttagttttcagtgctttccattgctattttggtctgctggattcatctggtgctgccagagtttccactcacccgtgctagtactacatgagtgagctgagtgaattttcactggccaagcccctggatgtctctcagtgagggaggagcatcttagatctacagggacaaggagacttcttgggctggaccacttcttgtggagaattataattttaatgaagggaaatttgaataataatatctgaaaaagaaaacatcaaaatggaaaagagaggtgcagaaaagggacacagaaaagtatggaagaaaatgtaactctctcacggcattttccagagatggccctacaaactttcaatccatgatggaagcaaaggaaataaaaagaggctcccagcatttctgttcactgtttttgcttcgggaatggactgtcttagctaattattatatcaacagaattactgccctctattttagcagacattttattgtgatgacattggcagtgggaagtatgtgcacaatttacttctacagatctgtgcccattgtgaaccatgtgggaactaatgaaaataagttacaataaactgcattatttgggcactctacagttcatatcacactttcgtgtggattagctcactctgctacctggaacaccttttyctcactgggccktctaaggcactgtaaagaatagtagtgcgtacagatatacaacgtkgttcaactacgattgctaagctcatagacttttctcccacagttaccatttagtatattttctgaatgtaaagttgtgtataattgcccttccaaagtagtgaataaggaattcattaaagacaaaagtacactactgaagagtgggtatatgtatattagaagatatatgtccagcaattcagcccatagacaagcttatgagcaaagatgagtggttatgaatttgtaacattaaactatatyttgggtttagatgtctttctattgctggacattagtaaagatgtcttagtgctggcctacaatggggacagaatatcagctatacctactcaacactcttagcagtgggcgagtcagactcaagcatttaacatcatggaagacaacaaagagtactttgcgactagctcaaaacagaatgatattatgtttttttttaaaaaaaaactctgattatttcagataatggtgtgygttgacattgcaaaatattgtaattaaggaacaggcttagtagagcactttaaattgcacagctttctgttttccattattgaatagctttagggtggctgtttctattcagactaatagcacatgtcaccacaccttgtgaccaggagctcaattttgccactttattacaataattattggcaagaagaagatatatgttgacttagaggcaaatttaatactttattgtagttatttctctgacactggacatggtcatataaaatcaggtatagaaccttttcaaagacttcaaatggattaatctcagaaaatttaggtggaatttttggatttcagattatttacttccttgtagttataattgacttggattagtaggtgcacacaatgatttttatctgttaaggtaaaagataatttttaatgtgacaaaattttctttaaaaattttaattggaaagtaaaacatttcctttaatctacatgacatacttcatccttaagctccttgagagcagagagaccctatcttatcatctctccattggtaccacataacccacaccattcctatttattgataccaataatcctttcaatgtaactagtaggcttttgagtatatgcacaaaactgtaactctactaataagctcttctgcctatgagacattatcgctttggatcatccttatttccataacagtttgttccattctgccattacaatgccaggatgtaaagctccaggggtgcaggaatctttcttttttgtttactactctatctccagcatctagaacattgtctggcacaggtaaccactcagtatttgttgaatgtatgaatacatttttttaagacacaatgacaaaatggctgcagagactgcttttgttgtatgggatgaagacctcagatttagtgtcagaaaatctcaatgactgtcccaagcttgctatgaatttactgtgtcatcttaggtgtgccacttaatctctctgtgcttttcttatatatgaaatgattatattagatctgaggcatgataaacttccatcaacctttaaaggtacgtaattctctgcttcatgattagcagcatgcattttccaagtggctgtctgggaacagagttacattttgtggcagtggaaccagcattgccaactggcatacacaggctcggaagtaagattttggtctctttggcagctaaaaatttggctctaacaaatgaactagtcaccaacctgattttttaaaaaataaggctcttctatactttggcatagaaaattkatttwtaagaacagggaaaacttatgttcattgcagcactattcacaatagcaaagacatggaatcaacccaaatactcatcaatggtagactggataaagaaaatgtggtacatatataccatggaatactatgcagccatgaaaagaaatgagatcatgtcctttacagggacatggatagagctggaaggcattatcctcagcaaactaatgcaggaacataaaaccaaacaccacatgttttcattcataagtgggagttgaacaatgagaacacatggacacgtggggttggtcggggaaacaacacacactggtgtctgtcctggggaaaggtggsgggagggagagcatcaggaagaatagctaatggatactgggcttactacctaggtagtgggttgatctgtgcagcaaagcaccatggcacatgtttatctatgtaacaaacctgcacatcctgcacatgtaccccggaacttaaaagttgaagaaaaaaataaactgtggaatgtattgttcagccattaaaaaaaaaaaaaagcataaggaaaacaaaatctgacacagaagagtacaatgtagcataatgacaaaaagaactagatttaaatcttggttccagaattttctgtgagatctcattggctaagtaacgtaatctcttagtgcctcaattttggtatctgtagaatgggataatgataataatatctaaatgaagtaatgtatttaaagttcccggaacatgggaaactttgaaagccttacagacaggcttatattaaggaattaaataagaagggggaaattaattcataaaaaataaatctgcacatttgacttgaggcaaacactgagaggtgaaattgagaccagactgcctaggtctgtatagtgatacatccacttacaggtgtaatattttgatttcttaacatctctaatgttaagatgagtttcttaatatctctgcatctcagtcttctgaggrataataatcattgaacaaaatggtaataatcattgaacctacctcattaggcttattgtgaattttaaatgaaataatcgatgcattaataatatgctttacaaaagagtctggcatatagaatgtactcaataaattgtagcttttcttataacagaagttaagcttatacagagggggaaaaactgaaagagatgtgaaaggcagtcagcccagtggatggagagaaagtaatgggagttcagtagggacaaacagattataatagtctagtgaattttactctcagagattttaagaaaaaaatgccttgcaaatgtaagacatggagagttcccacataagtgattgacaacaaatatcaaaatctccagtttatcccaatgcttgtttgataaacctccttttagccaagaattctaccttagggaaaaggatttttattcttctgcacacagattataagatattaccaaatagtgcaatatcttagttgtaaataaattgtaaatctttttgtaacaagacaacagttgtgatatcacaatgagtcattacgcactttctgttcatggaggatcccaaaatcatcttatttgcraagaagtgagttggtgtgggagrcagtaccttaacatttcagcagagtcctttagccaaattcctgaagctgccaagcttccacaggcggactgagatataaggataagagagaagaacgcagaccaaaaaaaagtacaaacaagagaatggagactaagtttccaactagcactacctattttaaagtgcttttctttttggtgaactttaaagaaatgaaataagcctatgtatttcgtgattgtaaggcccttttcaattaactggaaaatacctggttatgtttgagtacacattacttcatttttttttacattcaacccacatttgtatagtacctacaatgtaccaaacttgagtttaggtgccaaagatatcagatgaacaacacaggttcattccgtggggagctttcattttactgagaaaaacagataaataggaaaagagtgaagaaagggctacagagaagaagcttaatttttggtggggtcatgaaggatgagtaggagtttgccgggcaaagaagagaccagcaaagattcaaaggcttggtccatggacaatgattcaaaagccrgaggttgagttcaagaaagcagtttggttctgttggagtttacagtatyggagaaggaaagcagagtttcagggccagatcatgaagggcactgacttcctaaccaaggagattgtatcagaccctgcaagcaattgagtttaagccgatcagtttcacactgtatagtattttagaaggactctctggcagctacttggagaatggatgggagaggagagttgaagacaggaaaccagctgggcagcaaggtactatgtgcacattatgtcatctttaaagaaataatgtgcaattgttcagaaataggcaactgctcattctttcaaatggattagggtagaagggccttcttagcagaaagtaatatgaagttttcttcctttaaaatattgtttcttactaattaaggtcatttaggcctaacaagtggttctttttttaaaacagctttattgaggtatgactgattgcaaaaagctgtacatactcaatatatgcaatctgatgagtttggacatatgcttaccttaatatccctctaaagtatcaattattttcatcattcacaccttagactaaatttcttttatcactgacttttctctcttccccagctgagtatttgaccttgagggcagtggcatttcaaatggaatattaaaattgaattaaattagaaatcaaattaaattaagagctgggggacttctgagaaggattaatttgaattaggaactttggtcaagtgtccaagaagtcagtcggaaaatgagagaagacgttgaggagaacagagagcagattaattcagtttgcagttgtactaggattttcaaaagaaggtgttctatttccaaagttctctatatgatacttaagctgtaagttaataatgctagttgtgtgccagttcataacatcagggtgaatgttaatggctacataatttgcagggcccagggcaaagtgaaaatgcaggtcccttattcggaaagcaggaacaaagggccattaaaggtgataatgtataaaactgtccttccttctgccattcccctcttgactttttctactagtttttatttgatatttcatgttattcyaagtaaataaaaaacaaaaatataaacttagcacaaattttaccattcactttgtattgtgcaatgcaactataagaatagttgctttgcatgcacaatcagcaaaaattaggtatttcatagatcgtacatatgtatgtcatccttacccaaacagtggaaatgatatacaagatttaaataactttatatttcatttctggatacactctctccctttgacttactcatgagtaaggaaggattgcaagaaaaagacctgtggtttgctctttctttctctctctttgtakgtcttcattttcagcataaacagttggctgatacagggaattattcaaggaagaaaggatgcaataggctcccgtggtcatctgtgtttcttaaaaccctttgccttcttgctaaggttgaaggaagttctggttccagtggcgagcatggcgtcttggggctgccagcttccccacttactcacagacatagcacacttactcgtgctctcatgttgaaactcaccagactcccatgaattgtgcatcccccagaattcaccattatgaacatcacgtatgaatgaggcagcgcagaatggctgagcatgtgcacagtgtgcagacagcccctgctcccttgatgctcactgtcctattggactttgcccacaaaacactggttcaactactaaaatcactgaacaaagcacagggcttttctgagcatggggtcttccctctgaagctgcatgagtcacacacccatgaatccagcctgccttgaaatctcttatacacaaatgaggaaccaattagcaaagtgatttgcaaagaaagtggaaactgactagtcttccttcttttattatgtgaactaatgctgtctcagacacgtggaaagtcacagaataaatgcagacctcattctggaatttatttctacgatccactggagtgaagcacatagatagtttaccattgttttcaaacctacataatagtttatggactataaggtaaaatttaagataaaatgtgagatttaaaacaaatgatgcttgttacataaaacagggagttgggtaaaacaacttaaggaaactatttgagtgcaaagacaagcacccagagttaagtgagctgacggcccggtcccacctctgatcttggtggtccatgatctcagacaagacatgtccccgtctagttttcataaacttcacgtctaaaacaggatttaaacatagatggtttctagtttaaaatttgttctgtgaaagaggcatttataaatcaagaaactcattttaaagatacaactgtagactttaaagatttcaccctagagcttccagagtttctcagccatccatgcctttcagaaatgttcctcctcagctgtgcactcggccctatggccatgatcatctttctcatatttctgcatcttcttcatcttataggactattaatcattgctcaaaaaaaaattcttaagtgctagaagataaagtaaaaaaagcaagatctgtgtccaaaataatccagggagatctgagataagtttagggtttttttaggtctatagattcatatctgttcagttttcactttctctttagacctttcatctcctatccaaacaaaaatttaccttgcttcctggaaattctcttttatgacttactgagtatgattatcaacattttatcaggagattatttccctttgttttaaaaaggactgccaaaatgtaaagtatgatatggtgtcttgcagaaattgattggtttttcacagaaagataacataatcttataatatagtcagtagaaaaagatacatttttaaataacggcaggaaacagaagggaattaaaatatgttgcattcctgttacataccaggtactgtgcattacatatattattttatttaatccttatataatcatctgtggtggtggaaataggaatactaccaatcacctatgctataccagaaagcttctaacacaaactccagcccagacttctctcccacattccggtgttgtatatccagccacctatgtggcaagtccagttggcactgataattcaatcaatatggccagactgaacgtatcagctttccctaaaaagcctgctctagactcagcctttctcatctccagcgacgtcgaggtcactcttccagttgcttaggccagaaatcttggggtcattgttgtctctttattttctcaccctaatcacccaatccatcaaaaggtcctgtcaactcttgcttcagaacaagttcagcatggatctgactgctcctcagccccacccgagtcggagcaaatgttgcctgtctccaggtggttcacaagctttccagctacctgcatcctgacctctcctatgtactgttccaaaccagcagccaggatgaggttttgaaacataagccatgtcgactgtaagctcaaactcctgccatggcccccttttcactctcagagtaaaagctgaaaagccatgagccatccttgatccactccttcttccacttccccacagcaccccaccascccaccatgtttaatgttacaaattcataacagctcatctttgctcataagcttgtctaagtactgaattgctggacatatatcttttaatatacatatacccacttttcagtagtgtagtttgctcttaatgaattccttattcactactttggaaggaaaaatatacacatctttacattcagaaaatatactaaacagcaactgtgggagaaaagtctatgaggttagcaatcctagttgaactaccttgtattatctgtacctactactattcctcacagtgccttaaaagacccagggaggaaaatgtgttccaagtagcagggtgggcaaatccacatataagcatggtgtgaaccgtagagtgcccaaataaagcaaattgttgcgacttattttcatcagttcccacatggttcacaatgggcagcagatttgtagaagtaaattgtgcacatacttactaatctcctccctcacttcactccatcccatgactttattgcaatcccaagaccaaccaggaacactcccaccttagcactataaccctgcagtccctctgcctggaacacccttctctggcatgggactcactccctcacatctctcaagtttttgatcaaatctcactttcttggtggaatcccttctcctccctacacctccctacctatgcacttctgatacctcttaccttggtctgtttttctcacatctatagcatgtttcaccttctgaactgctctataatttactgttttacatttattatttactttctgtttatttgtcttcactaaaatgaaatgttcactaatgtattctcatcccctagatagtgcttggcatatgatagatgctcgctaaatctttgcagaacggtggggcgaatgaatgaatgagagaatgaatgagtgctttcccttgttcctcatactaacctggctaaagttagccaggaggtattttacaaataaggacattaaaactgagagaggctaggtaactttcacaagtcagaaactttgtaagagtcagatctgagatgaaaagaggacttcctgatcgggaccttctccactttatcacacttcaaaacatgtatttgatgaaaatataggtgttccataaaatgcaatacctttgtagtgtgtattcttccttctccgcactctcagccaatagtttttaaataagcctcttggaataccgtaactaaagtgactggcttatagagtaacacacataaaatgaatgatatgaggtgtattcatcttgactctggctgcagagttacagaaacaaactaacttgagttagcttaagccaaaaaaattaatttaaaaattagtaatttaattttttttatttaaaaaaaaaggcggaggccaaggcaggaggatcacttgaggccagagtttgagaccagcctgagcaacatggagagactctatctctacgagaaattaaaaaaaaaaaaaaaaatagccgggtgtggtggtgcacatctagtcccagctactctggaggctgaggcaggaggaacacttgagcccaggagtttgaggctgcagtgagctatgatcgcaccactgcactccagcctggatgacagagcaagattccgtctctttatctcttacggatacatgagcccatgaaagccacagaaaagaatgaaaaagagggagcaggaggcagatgagttgagagagttcttgttccaccttccatgtgtgtctcttccattcttccttctccatggtttacccatcactctttaacctggacaaagctatagtctcacagtcccagttatgggcctggtttgggaaaaacacctctcctggtccaatcagggatgtccaggaacgaggacccctttgacaactgcaggatggagagtgctgggcagaccccaaagaaagggactcagcaggcaactcccaagtagctgattctagaaaaagacagtggaagagtaggaagcacatgattgaatcaaacagctgaagtccaaattcctgtttttcacctttcatctgtgtaaattgttgctaatgagaaaacgtacctgaatcttctgatactcaaataattatagtgtacttgttcttttactcttgttctttctcagatatagatgctaaatcttgattatgtggtggttaaaaaaaagaacaggaagaaaaaagttaaaaagagggacacttggggtaaggaaaagaaaagaaaatggagaatcaggagttctgcattttaatctcagtgctgtcaccaagaagcaaatgccctgggcaagtcaattctctggtttcaatgsccttctctatataatgagtaaatcaracagaattggtaggtttcccaacctgcttcatcaggagaattagctgggatcattttcaaaatgcagattcccctgccttacccatgaatattctgatttaaacgatcttgcatgaaattctataattgtattttaatgcaaatttccagatgactctgatgatcaactgcatttggcaaccattacactagatgacatttaagacctctcctagtgattaatatatttgtttacctaacaattatctaacttataaaaccaattataataaaatgaatttcttcttgtgttttgggtgtctttttcagaaattacataatctttccactttgtttccaaagaaaattaagagtactatctagcagacaataaattctcaataaatagtcatgaacggataaatgatcagttctatatatttttagaaattaacaatttttcattatctcctgagttacttagtcctcatatatgtggggaagaaagtccactcagagcttgtctggtttaatggaatattgaaaatacttagcaggatactagtatataaatcagggctcataatctttaaagtatgactaaaagcttttgatgatggcgtctcatttttgtcttctatgkcatggataaagaggtatgtgtgaaagtcaagtgttcctcctgtgtattattatcatgcctgaggctgttgtgtttctgttgttcttgccttttaccacccacaacactttcatacctgtcagctttgccagtctcaaaatattgctctaacaaattctgcagagaattgtactagccctgaactttttgaaagtccagtgttctttttggaaacaagatgtgagtttctaaagagactgaacttccagacagagcatctgggacgtaattctgcctctgcctctgtgcctattcactgcataaaattgatcgagccatatcacctcctctgacatctacttcctcttctgtaaaatgaattccacactcatttaagcactataattcttataattaggaggttaaaaaaatacaaattatattctcaattctgaatatcactacatttctgcttattacttagatttattatttttctcattcccttctgacaatattttaatatgctacctagatccaaaagaatacattgcttacaaaaaaatagaaacagacctttacaggtatttacacttttcgacatcagatcagttttctgtgtgacccaggtccttttctatgtcacttttcagaaaggaaactcatagctcagccatatagcatgtgatatgatctggaatagttacctccttcataagtgtgggtccagttatatgttccattttgtcactttcctaagaaactatttttttaatattattattattttactttaagttctgggatacatgtacagaacttgcaggtttgttacataggtatacatgtgccatggtggtttgctgcacccatcaacccatcatctaggttttaagacccgcatgcattaggtatytgtcctaattaaggatagtggcttgacttaggcaccagcaagtctctagtagcacacttgggaatattatgccatgaatggcatcctcctgtggcttttttccagaatgaaaagaaccactctggaaaaaaatgatacattttagccctttttaaagtcacactggcttagttgtactgttgagaaaacaaataacgctcaggaagtgaatacaatcgcatatgtatattatgtcttacagaattggatcattgatgcttgcattttattgctttttaaagaaaataaatgataggaaatgtatattgtagaatatcaagcctatttattacagcaacattgttttttttctgggtgattgattttattttctgaaaagcataaaaatacaaagtgtgacatcatgcaagaacacggccatgtagattttctatgaaactctcttcttaacagcattgaatataatgtstgtcagaatagttcttatgagatcatttttaagtgtctttttgtttcaggctagttattacatctaattattgcattgttatgtttcagagcagttgaacatcagatacccagagtgacatcaggttaaaaaaaagcctgcaatttggatcttttcctgactcggaagcaaggaaaatggacaattgataatcaaaggtaaaactgccccctttcccccttacttgtataggaagcagtttcttaaataacagcttcctcttcagctatcctatatgaaacattttttaatagcatggtatatttgaacaaaaatattcctggcatacactttccagacatattaacagtctgttgaatttaaagcctgtgttttttaacttcctagctacctgtacagaatctaggccagatgtattttatatatttaatcttcattgttgttgttaatctggaacggcatattgggcacrtgccatttttataaatctgtggacccaaatattgtacataaggtaggttaggtatgaaattatggaagtaaatggcatagtgttagcttttcttagcatattgaacaaatttgcatttatccacacagacatgttcaacatgatgtaagtgtgctaagaaaggcaatgaaaggcagggcgtggtggctcacgcytgtaattccagcactttgggagaccgaggtgggcagatcacctgaggtcaggagtttgagaccagcctggccaatatggtgaaaccccmtctccactaaaaatacaaaaattagctggrtgtggtggcaggtgcctgtaatcccagctactggggagactgaggcagtggcaggtgcctgtaatcccagctactggggagactaaggcaggagaatcgcttgaacctggaaggcacaggttgcagtgagccgagattgcaccactgcactccagccagggtgacagagagagactccatctcaaaaaaaaagaaaagaaaacaaaagaaaggcaatgaaaacccttgagtccttgctatcatctccactcctttcattatgtagtttttggagggagaaaaaaagaagggtcttaccacatataaatcaaatatactacagaagtggtgtcagatcagaaggagattcatattgctgaataataagytattgtctttgtctgcgttacttgcttgagacagtgacttgggtatggcaatttattagggagctgatccaaagatcaagagttggaagcaggaagagtgaatcagggaagaagcrcaggccaaattatgggtgggttagcaagtccaccactgcaggcaatgggaacttggttcctcccaggaggggtacagatgcccaaatttcygttagaaagatgtgcagcaggaggtttactgactgactttttctccttggttttggatttccccaaggagcatgaattccctcacaatgctgggctgtgccagccatgcatgggtagaaagcagaaagacacttagttgtcacttgaggtgtacactgtaaggcagtggtccagggaccggtttcgtggaagacaatttttccayggacagggtggggaggtggggagatggtttcgggataaaactgttccacctcaaatcatcaggaatgagattctcataaggagcacatacctagattcctyacgtggacagttcacaacagggatcatgctcctatgagaatttaatgccgccactgatctcacaagaggcagagctyaggccgtaatgcacgctggcccactgctcacttcctgctgtgcagcccagttcctamcaggaaccagtactggtctatgacctgggggttagggatccctgcaaaggcaaggagactcccctgcagctgtggttgacatccaaagtgaaccccgggacataatgcagggagccagccgcatctgttgcagctccttttactttattctaaatcagcatttttctcctaaatgaagtatctccaagaaaaaaaaaagttttgtgttttaaagacattaaataattatacctaaatatcatggaatccgagtgaattctgtttcgacactaacttcttcatgaataaattgtccgtcttcagtagatggcatagtgtcagctaagtgagaaatgcatctgagtccccatgtatatttgagacattatatgagatccaaagtatgaccaacatgttggaatagtcagaattaatataacaacatttaattatagctgtatttgttactcgctttatattgtttcatttacaagaaggtgtccgtgtatacacaaaaatttaatttttgtctttcctatttggaaacaaccctgtttgtgtgaaatgcaagactgaaattatatatatattatctgggcataatgttagatgaatggtcagctggcaaaacagatttagtacattaaggtgaatcagggcttctttgttttgttttgacatgaggacattaaacagattgaaaataaagttggataaagcctgtggttgtgttgtgacctagaagatcatatgctcagaggaagaatataattgataaactctctaaggagcagctattaaaaataaaacagacaacaacaaacatttaaagtgatgtgcatttgcatgcagatttcctcgtgaaggaaattaaagtggaggggacaggagaaagggcagcagagaatggtagtgcagggaaaccaggaaagtcgtagcagatgctaggcagaaataccaaaaagagcagacagaatcaaactagggatgaagaggatccacgacatgcaaactgagtgaagggccccagttcatttgaggctggacatcctcctgaataaccaaagaaaaattactgtgtcttctcacctgaacagtgtaattgcccctcattagtttactgctccctggtctcctttggctccaaagtcttccagaatcacaattctgatcatgtctgctttttgctcagaaaatgttctctgatttaccaattcatcattatctaaatttcttaagcagacayttaaagcatgccactctaagttgttagacttactatttttattctttgacctcacttaccagtggcctagcccattgtgtagaaatgtaagggctgtgatttttttcaagccttccaagtgattttaaggctttgtggttttcaaacacagattggtctagagcaagcttatctagcccgctttattttgttgttgttgttgctctgttttgttttgtttccttttaggcttttagcagcctgaagccatggcttttagtttctgtctctagtgataaatggaaaagagagacaaggatggggctttttccgtgcccaaccagaaacagaaactaagaacacataactgtattctctccctcggacacccctgttctggagtgaggcccaagaatgcacatttctaacatgttcccagatgatgctgatctgttccatgagaccttaacttggagaaccactctgtaaactaaatgatccaggctggcactacaatttctgcgttacagtttgagtcaaagactgatcacaatgaaaggtcttccttgccaacatcaccattgtgrgtaggtgtgttagtttaataacaagctctgagtcttctggtcagttaccatcttaatatcataaaattcccaacagtaagatttttgatgcatttttatatcctttactgtgtcacagactttggaaacccataaatatctgttggatggataaaggatggatggatggatggatggatggatggatggatggatggatagaatggatgaacaggtttagcaaccaagaactggtttcaacatgaaacttaacttcttacaaaaaaactactctggcttgtgctataragaaaggtggttttccttcacacagaaaccttattatataagcccatactcaatatataagaccttttattagatgaaataacactacatagttaaagcccaagcatctgggtatcaatatccgggtattgtgctctttaataaacagggtctctcacgaaagactttttgctacttgattgagtacaaccggggaaatgtcatttatatcaagataaattgtacattttagtttgtgaaagagcygctggttgtgtgaaaccagcaaatcacatctatttaataaattcctttgcaaatgtcttttccttgagtttaaattttgcagctgcagcataatttgaatgtttattcacatttaggacaattatgctttctggtttttttgctttcttgcattcaaatgtgttcatgtgtcagtgttgcacattttctctctacatcttttatctgcatgcatcatcccatgattggcttggtaaatttttcctacttttcttgctaaaataactgttccttctgtctgttttctgcctactctttgatttattccagaaattgggctcaatgcctacttttagagctcagtgtggaatttattttgtatgtttttaaaccaagtttccacttatttttttgttatgtattctgtagtgcagtcaacctcagaacgcactcatgaaaaagcctgtaatcatatattagcataaataacaacaacagatgataatatgaatgcttgaaaattcgtttttttaatgtatctcataattcacttttgtaacagaaaattaaaattttcattttatgttgtggtttgcctaatagtaaagcttaaatattaattaaaacataaatgtcctagccccaactttgttattaccttgctgtatgttcttggctagtccctaggcttcagttacctccattataaaaagaagggtttaggacaaataacccctggaatccattctagtgccttatcttgcaatttcaaggtacagatcatatgaaatcctacctaaaatccgacacaaaattatgagtgagtcaatcagtccactaagggcacatatttgaaaatagagttgaaaaggcaggatttgggattcagaaagacttgaattcaaaactcggctctttcatttattaactgtgtgaacgtggcgaatggactgaaccactctatgtactttagtatcttcatctgtaaaatgggggcmgtgttattacctgaaaggtcactttaaagaccagaggtagtgtataaaataaatccggcatctggtaggagctgaacatacatagctagaagctgaccagaatcccaccacggttttggaggttaatggaggttactgtatactcttcttttccaatataattctacaagagtaagaaacttttatttaggactttaaaagatgaacacactttagaaaatgtatccataatttagtcatctgagactgaaaggctagtggaaaaattcagcatttttttttatctacacgggatagctctggttctatacattgctgatggtttcatgtgtcaagtcaggcctttttcatcaagagtgattcctcagtgtcaagcatgaagtttgcaaattacgttttgttttctgccttgtaatctagcttggggagaaactaaaataaagattcttcaaggcaaaagtttaacctgaataaatgttcatatggtctcaatttttaactgatttcagwatgactaaaattattcatttttttcttctcgttctccaaaaaattattttcatagccaatttgccagatgcagctttatacccagaggcaaaagaaatcaaatttttggtcaatagaagattcgtttactaagagattcatgcagatattgaatacttttctgttctgttttatgtgttttttagtttcagttgtcattttgatattggttaccccagcacttgtcagcagaaawtcaaagctgcctacttaacaggagtagatcaataaagttttgctggaatatttcatcaatcttagcccaggatttaatcctgttggctatttttctattttaatattctataaatcctctcaagttaatgtgttctgagataaatcttactatttcactattctatagtttttatgtcagaaataatttagaaactaaaaactgctattgctatttgataccttgattttttcagacatctgtaagatagaaaacctgattgtagaatactgtgtttatttgtcatgtctcagagttctatcactatcaggatgataatcatactgatgaggctgtctcaaaccttatgagatataggtatagatatttaaatatatagacatattgtgggggtggtgatattgttaattgggcaaccaagaccttcacaatagaaaagttataggcaattattactgacattggcatttttaataaaatgaccgattaagtactctctgaaagaaacgtaaatgttatttttagatgatgaaatactttcttcgtaaaataagagtataatagagtttattasaaatcacatatttgagtatttgtttatactgtaagaatgttcraggacaacatttgactatgcagtaaaaaggtgcaacttggaagaaaaggcacattgactggatttattttccttttgcatattcttatcatatgctagacattttcacctaaaatttttacctgtcttatttatttaaaggctatgtttagagaaacaatgataccgtgttaaaaaatagacattagcaaaattgcatagtaagggaggtggagcaagatagctggatagatgcctccactatcatcctctctgcaggatcaccacattaagcgactatctgcacaaaaaaaaatcacctttataagaactaaaaatcaggtgagtggtcacagtacctggtgttaacttcatatcactaaaagaggcactgaaaaacagtgttgaattgcctacagcaccccttccctgtctcccagcaggggccctgtggctcagagaggaaatcggtgtgcctggggggagggagaacacagtgattgtgggactttttgtataggaactcagtgctgccctctcacagtggaaagcaatgtgggacagaacttagccagcactcatgaaggcagcacttagactagtcctagccagaggggaattgtctgtcccagcagtcagaactctaattctggcaagcctcaccactgtgggctaaagtgctctggggttctaaataaacttaaatgctagtctaggccacaaggactgcaattctggggcaagtcctggtgctgtgctggactcggagccagtggggttggcgtgctcacgatctagtcggacaccagctgacacagctaagaaagtgcttatgccacccctcccccagtaccaggcaacacagctcacaccctaagagagacttcttccctctgcttgaggagaggagaaggaagagtaaagaggactttgtcttgcatcttagataccagcacaaccacagtaggctaggacaccagatagagtcctgaggatctagctactgcatgacatgtctagagaaaacttgggccagaaaggaacccactgccttgaagggaaggacccagtcctggcaggattcatcacttgatgagtaaagagcctttgagccctgaatattcaaccgtcacagccaggcagcacttgccatgggccttggttgtgwctcagagccatgctggatgcacrtgtgacccaatacatccccagtttgggtgactaggggtagagaccatttctgcttgtgaaaatgagaggggaaagtaaagtggactttgtcttgcaccataggtactagcttgctcacagtggagtagagcaccaagcaggcttggggtacccagtaccaggccttgtctcttgactggcatttctggaccttccctgggccagaggggaacctgctgccctgaagagtgagtcccaggcctggcagcactcaccacaagctaactcaagagcccttggaccttgartgaccaccagcagtaccctggcagtactcatcacgggccttgggcagtggtggccatggagagaggttcttctgcttgtggaaaagggagggaacagtgggaargactttgacttgtgagtaccagctcagctgcagtacaatagggcatcaggttgatttctaaagtatctgactccaggccctggctcctggattgtgtccctagacctccccaggacaaaggggaacttgccatcctgaagggtaggatayragcctagctggctttgctgcctcctgattgtagagccctagggccttgagcaaatatacgtggtagccaggcagtggttagtgcgggccttgggtgagacccagtaccatgctggcttcaggtctgacccagcacagtcccagtggtggtggcggccacaggtgagcttgtgtcacctctctcccagctccaggcagctcagcacagagaaagactctgtttgtttgggagaaagtaagagaggagaacaagagtctttgcctggcaatctagaaaatttttcccgatcttctccgagaccaccaaggcagcacctctgtgattctgcaagagcagaatcacctcacagmattgctgggcttggggtaccgcctaatacagatatgcccatagtgacagaaaaacttagatcataatactcaaatttatgaataccaatacctggagagcmttccaaaggacaggtacaaacaagccttttaatcctgttggctatttttctattttaatattctataaatcttctcaagttagtgtgttctgagataaatcttaactattttgccgttctatactttttatgtcagaaataatttagaagctagaaacttctattgctatttgataacttgawtttttcagacatctgtaagatactaaaatctatttgtggaatacgtgtttatttttcatgtctcagagacctatcactatcaagatgagaatcttacagatgaggctgtctcaagccttatgagatacagacagatatagatatgtagatatattgtgttgggtggtaatgttgttaattggactacccaggccttcacaatagaagagttatttcttcatgggccattattactaatattggcatttttaataaaataacattttaactactctctgaaagaagcataaatgttatttttggatgatagaataatttccttagaaaacagattacaatagtataatagagtttattatgacttacaatttttgagtatttgtttaaatggtaagaatgtccaaggacaacatttgactatgcaataaaaagatgcaacttgacaagaattattttaaaaaaggactgtgaagactacaataagtacttaattcttcaatgctcagacaccaaggaacaaccacaaacatcaagaccatccaggaatacatgacagcactgaatgaactaaataagtcaccagggaccaatcctagagatacagagatatgtgacctttcaaacagagaattcaaaatagctgttttgaggaaactcaacaaatttcaagataaaacagagaaggaatttagaataccatcagatacatttaacaaagagactgaaatcattaaaagagaatcaaacagaaattctggagttgaaaagtgcaattgacatactgaagaatgcatcagagtctcttaccagcagaattgatcaagcagaagaaagaattagtgagattgaggacaggctatttgaaaatagacagtcagaaaggacaaaagaaaaatgaatgcaggtgatgtttaaacacctaaaagtgtggtgataccagtactcaaagtatggtttcatggagatctccaagatttttcagggagtccagaaggtcaaaactgtttttataatattaagactttaagacttcatttgccaaaactttcatacttaatgagcacctagtggagttttccagaggctacatgacatggaatgatgtcatgtaaaagtggaatgcatgcttgtgtattcttctgttttccagggttttctaaagtagtaggtttgggctataaacaaattcattttcaaaggttatctcagatcattttcagaacttctacatgtccttattagccatctttggtgtgcctacttagtctctgtaaccttattttcacctaataaattattcatttgaaatcttgggaaaaactgaataaaaaagaatgaagtatacctacaagatctagaaaatagcctcaaaaaagaaaatctaagagttatcagccttaaagagaagacagatatagaaatcaaggtcgaaagtttattcaaagggataataacagagaacttcccaaacatagagaaaggtataaatattcgagtacaagaagcatatagaacaccaagcagatttaatccaaagaagactacctcaagacctttagtagtcaaacttccaaaggtcaaggmtaatgaaaggatcctaaaagccccaagagaaaaaaacaaataacatgcaatggatctccaatatatctggcagcagacttctcagtggaaaccttataggccaggagagagtggcatgacatatttaaagtgctgaaggaaaaatatttttattctagaataatatgtccagcaaaaatatccttcaaatatgaaggagaaatacttttcgagaacaacagaagacaaaggattttatcaccagacctgtcttacaagaaatgctaaagggagtactttaatccaaaagaaaaggactttgatgagcaacaataaatcacctgaaggtgcaaaactcaccagtaaaagtaagtacacagaaaaacacagaatattacaacactgtggtgttgtaaattgtggtgtataaactattcgtatcttgactagaaagactaagagatgaaccaatcaaaaaataaccactacaacaacttttcaagatatagacagtagaataagatataaatagaaacaagaaaatttaaaagtggggggacaaagttaaagtgtagagtttttattcattttctctttgcttatttgtaagattctttgtttatacaatcagtgttaagttgtcatcagtttaaaataatgggttacaagatatttgcaagcctcatggtaacctcaaaacaaaaagcatacaacaaatacacaaaataaaaagcaagaaattaaaaaataaaaaataacaccagagaaattcaccttcactgaaaggaagacaggaaaaaaagaaagaagcaagaaatgatcacaaaacacccagaacacaggtaacaaaatggcaagagtaagtccttacttatcaataataacattgaaagtaaatggatttaacttgccagtcaaaagacagagtggctgaatggataaaagacaagacccattatctgttgcctactaagaaaatatttcacctctaaagacacacatagactaaaataaagggatgggaaaagatattccatgcaaatggaatctaaaaaagtacaggagtagctatagttayatcaaaatagctttcaagacaaaaagctstaaaaagaaataaagaaggttattatttaatcataaagggttcaattcagcaagaggatgtaatgattataaatacacttacacccaacactggagcacccatgtataaagtaaatattattaaagagagagatggaatccaataaaataataactggagatttcagcaccccactttcagcattggacagatcattcagacagaaaatctacaaagaaacattggacttaatctgttgtgtagactaattggacctaatagatatttatagaacatttcatccaatggctggcagaataaacattctcctcctcagcacatggatcattatcaaggatagaccatttgttaagccacaaagcaagtcttaaaacatcaagaaaattgaaattatatcaagtatcctctcaccacagttgcgtaaaactagaaatcaataacgaggaactttggaaactatgcaaagacatgtaaattccaatatatgcccccgaatgaccagtgggtcatgaagaaattgagaagaaaatttaaatatgtcgtgaaacaaatgataatggaaacacaacgtatgaaagcctatgtgatacagcgaaagcagygctaaaaggaaagtttatagctataaatgcctacattaaaaagtagaaaaaactacaaataacctaatgatgcagcttaaaaaactagaaaagtgagagcaaaccaaacccaagattagtataagaaaagaaataataaagatcaaagcagaaataaattgaaacaaaacaatacaaaataccaatgaaaggaaagttgcttttataaaaatataaacaaaatcaataaacatttagctagactaagaataaaagagagaagacccaaataaataraatcagagatggaaaaatacattacaaccaatacagcagaaatttaaaggatcgttagagactactatgagcaactgtatgtcaataaattggaaaacctagaagacatggatacatttctagacacatacaacctactaatattgaaccatgaagaatttcaaaacctgaaccagaccaataacaactaatgagatcaaagctgtaataaaaattctcctagaaatgaaaagcccaagacccagtggtttcactgatgaattttaacaaacatacaaagaagaactaataccaatcttactsaaactctgctgaaaaatagaggaagaacaaatatgtctaaattcattctacaaggccagtattactctgataccaaaaccagacaaggacacatcaaagaaaaggaaactactggtcaatatcccttataaatactaatacaaaaatcctcactgaaatgctagcaatccaaactcaaaaacatgaaaaagatcatttatcatgactgagtgagatttattccagggatgcttcaacatatgcagatgaatcagtcaacatatcaatagaaatatttgcccaaatagtgtcttaatataaagagaattaaggacaaaaaccttatgatcatttcaactgatgctgaaaaagcttttgataaaatctaacatcactttgcgattaaaaaagaaaaaccttcaaaaaagtgggtgtagaaggaacatacctcaacacaataaaaggtgtgtacgacagacccacacctagtattatactgaatgaggaaaaaggaaaagcctttcctttaagatctgaagcaagaataggatgcccacttttcaccaccgttattcaacatattactggaagtcctagctaaagcagtcagacaagagaaggaaataaaggacatccaaattggaaagaaagaagtcaaattatctatgtttgcagatcatatgatcttatatgtgggaaagcctaaagactcctccaaaaaactattacaactgataaattcagtaacgttgcagggtacaaaatcaacataaaaaatccgtagcatttctatatgccaacagcaaacaatctgaaaaagaaatcagaaaagtaatccctgttgcaagtgacagtaaacacctaggaaataaccaatgaatttttagatctctatgatgaaacctataaaacactgatgaaagaatttaggagaatacaaaacaatgcaagaatattccatgttcataggatggaagaatcaacattattaaaatgtccatactatccaaagcaatctacggactcagtgcaatccttatcaaaataccaaagatattcttcacagaaatagaagaaacaatcctaaaatttatatgaaatcacaaaagacccagaataccaaagctgtcttgagcaaaaagaacaaagctggaggaatcacattacctgacttcaaattttacaacaaagctacagtaaccaaaacagcattttactggcataaaaacagacacatagaccaatggaacagaatggggaacccacaaaacaaatccacttatcaacagtgaattcataccttaaaacaaaggtaccaagaacatatattggagatagaacagtctcttcaataaayggtgctgggaaaactggatatccatatgcagaagaataaaacaagacccctacctcttggcatatacaaagactggattaagaaaatgtggcacatatacaccatggaatactatgcagccataaaaaatgatgagttcatgtcctttgtaggtacatggatgaaactggaaaccatcattctcagcaaactatcgcaaggacgaaaaaccaaacaccgcatgttctcactcataggtgggaattcaacaatgagaacacatggacacaggaaggggaacatcacacactggggcctgttgtggagtgggggaaggggggagggatagcattaggagatatacctaatgttaaatgacgagttaatgggtgcagcacaccaacatggcacatgtatacatatgtaactaacctgcacgttgtgyacatgtaccctaaaacttaaagtataataaaaaaaaccacatcaaaattgaataaaaactgaaatataagacctcaaactataaagctactgcgaaaagcttggggaaactctctagaatattgggctgagcaaatatttcttgtgtaatatgccacaaatacaggtaaccaaagcaaaaatgaaaaaataggacatatcaagttaaaaagctgctgtacagcaaaggagacaatcaacaaagtgaagagacaacccacagaatgggagaaaatgtttgcaactatccattggacaaggaattaataacaagaatatataaggagctcaagcaaatctataggaaaatatctaataatgcaatttaaaaatatgcaaaatatctgaayagayacttcttaaaacaagacatacaaataccaaacagatatatgagaaggtgctcaccatcattgatcattagagaaatgcaaatcaaagctataatgagataccatcttaccctagttaaaactgcttttatccaaaagacagataataacaaatgctggtgaggatgtggggaaaagggaaaccagtgctggagggaatgtacattcgtacaaccactrtggagaacagtttggaggttcttcaaaaaactgaaaatagagctatcatacaatcccacaatctcactgctaggtatatatccaaaagaaaataaatcagtatattgaagagttgtctgcactctcaagttttttgcagcactactcacaataaccaagatttggaatctacctaattgtccatcaacagacaaacggataaagaaaatgtggtatgtcgcatgttctcactcataggtggacattgaacaatgagaacacttcgacacaggatggggaacatcacacatcgggcctgtcatgaggtggggggagggggagggatagcattaggagatatacctaatgtaaatgaccagttaatgggtgcagcacaccaacatggcacaggtatacatatgtaacaaacctgcatgttgtgcacatgtaccctagaacttaaagtataataataaaaaataataakaagaataataataaaagaaaatgtggtaggtatacattatggaatactattcagccgtaaaaaaaaaaaaaaaaaagaatcagattctctcatttacaacaacatggatagaactggaggtcattgtgttaagtgaaataagccaagcacagaaacacaaacttcacatattctcacttatttgtgggaactatagattaagacaactgaactaatggagatagagagtagaacaatggttaccagtggctgggaagtgtagtggggagtggaggatgagagatagttaatgggtgcaaaaatatagttagataaaatgaataacactatcaagctaaacttagaagaaaataattcaagccaaaagttagaagatttaagcagttactaaatgtttaaatagcaaaggcaaagcaagaattacatagtctgaattactgccttaaattaattcccattcataactcagacctgacttattgaccatgtttagggcctatgtattaaataggagggcatctactagtacttcctggtcacatcaaaccctttatttccaaaacaacacaaaaacaccccctttcatctgctcccccctcttctactgtttgctgtctcagtctatggcacctctacccacccacccagttgcataagttaggaacctgggagtcatctatgaaatctccttcaccccttacctgtgataaacttgaatacatttcttgaatgaagtaccacattaaccgtaatattttaatgcccaatttgtcatatggttatagtcagagagagtttggagatcaaacactacgtactctgctggtagtttctactgtgtttcagtttccggccacactattcaaattcctatgtaaaattctgtggggctttttgcattttcttggtggcggttttggtgttgagcctgaatacattcttggaagatccactgtagaacagctgggctgcttttcctctctaggaaggcattgtgtgtgttgacaaatacagcgtgttggtgcacatgctctcagcagtatcgccctctttaattatgtcccctggggaaaaaaaatcatgtcctggcaaggcagctttcctaataaaaggcttcctgggtcttcggtaataagaaattcaaatgtttcaacctaatatttattgtggggtttaactgggcattttaatctcctttgggaatcaacaagctctaaatgttacacatgagaaaacatttcctgagggacacaaggagggtttctcacattttgatccatttttatttaagaaaaattactggtaaataacatatgcattggtattaaaagcttgaatgaattatctctgcctcgactttgaaattcctgctttgttactgacatttgtattatcattatttttcactcaaatttatttctaggtatggaaaattctgcctagtttgaatataggggaaggtgcaggtaaactggagacctaaagtccaatagaatcttaagagtaagattaaccaagtccccccaacctcccgccccagggaggcagttaatagaaaaagagaaggattgtggcttgaaatccagggaaggctgttctttagggggcaggagaagaaggaattagctggggaggatgcaaagagagacaggagaacacgggtgtttcttggcatgaaggctaaaagtattaataatgttaacaggmttcagactaggaaatttcgttaacatggtaatgtcataattttaaatctagaaatttctatcttttgaatatggcatctattttataaatttgtataattatrcatcatgaaattataaattcaatcatcccatctcacctacctgacttctcctttttttttttaggaccactattatctcaatgtsaaaatctttgggtcatcctcgatttattctttctcctctacttgtccagcctctcactaggtcttggttgtttttccccaagtccttttaaatccctgccttcctaacatcctctcgaccagccaccatcctcacgcaggacctcactgttagtgcctcacccacgaacttcactccaaaattccattttgcaagcaagcccaaaatactgtttctgacatgtttttaatagtrtttgttgaatccttccgtaccagacactatgctaagtgtgctatttcatttaattcctataacccattttacactttgcaaatgagcaaattgatctctagagagtctgaataactcacccaagcaactaagtagaaaagtgtgtctaactccaaaaccagagcccttagccactgtggcataatacttcctgtggccatgtataaaagagacgatggtgaccagactccaggagataaagctgggtaaattaggatcagggttgtaaaagatmccattaatttcacccaatggaccaacatttattcaaggcttttaagcagggactggagaaacaggcacatgatcagattttattttactaaatagttctgataggcaaatggtgaatggattagatggacttgaatctgaggcaacccttgtacctctggtgttggggcagtgaatcgttggcactcatgagccctgttggaagcccttgacttagcatgtgctgtgctctcctcatggcatgttcttactggatttctctgtctcccaaacctccttcaaggcacttctctattgtcaccttcctgggggaggctgagtctctcctccacactcatgcagcctctactcaaagcgcttagggtgttgcaagcctgtcatgttgcagcccgttgtgcagtgattctcacaaaatcttgctgaaacagttctacccccatttcaaagatgaagaaagtaagtctcacagagttgatgtgacttgcctctctagattgtatctgaagtatccttgcattaccaatgctggtaacttgcaaatgctcaataaatgtgtaacaagtacatttaattacctttacctgttagtatgttttattttattaaagctcctggataacaggaattatgcttttgaagctttcrtaatacccagcaacatgtatggcacgcagcaaatgaaattacttgattcctttaacagattttcattttctgttgttttcctcttttcattttgaatacgatactttagagtagaattttaagtgggaactcttttgccagaaatcagcaggacaccaggctctcttggaagaccatttcttttgtaggatgatatgatgcttatatgttagacaactattgtacctggcagaatgaaagtgcaggtggaaatagggttgtcaacttttattctcacaataccttataatataggtattattttctccccattttaccaatgaccaagaaagacacagaaaggttaagtaatttcccctagggtcacacagctagaaagtggcagagctataatttgaacccatagacaccatagtttagagtttatgttcattcactcaattaataagcgttttatgccctaatataggccaatcatgaatttaccctgtaatagatggtcaatgaatgtgtacttagtgattatacaatgtgagtgcttagtcagggtcttcactaaatgatatataaaagtagatatatggcttagtatggttgaatcatttcagtgaaaagaatgaattgtctaaagcatccatttttagttttcagattttacatgctgtaccaattcatcctcaattaaaagaaaccaattgcaaagtgactaggaaatagtcaattattgttttagctgccaagcttcaagaattagcattctagaatttacaaaaatgttaagccaggaaaaaaaaaagtcataaaacaccatttcaaccgcttttgaaattctgccagatactagtaattgtattataatttaaattttggaaacttagaattttagagttggatgggaactttggaatcatctgtgccagctgcgtacctcatgccagaagcattcatacaacattttaaaaataagatctttgacaatgttcttttaacatttgcacagtcaatagaaacagttatagatttctttacgctatcacttaaatttgtgcctatggctagtaaaatacgataacctctagctaatccaatccagcagtttcttgtcaccctttcctggctctttctcttgcccacgtttgagaaattggcttgatattttggagtgattcttctagatattattgagcattgtcctctagtcctctaaagcaggagtcagcggacctcatctcgtggatcaaatctggcccatctcctgttactgtaaataaagctttactgagacacagccacacctgttctcttatgtattgtctgtggctgcttttgttctagaaaagccaagtagggtactggcaacagaggaagtatggcccttagagccatttactctctggccctttgagaaaaagctttctaacctgtgctttaaagtattacagttcttcgcatgttttacttttaaatrtcactatttcttattccatttgtcatgtggaataaaatgattgtgatggcctgaatgacatgagcccacacatggtttgactttcttctaatgtttagtaattaactgttcttgctctctctcttacacgtgcttgcacgcacacacacacacacgcccacgtttttttcctgaagctcataaactggagacaataacggtctttgtttctttctgtgaatgtctgaatgtctgcagttatcttgggatataaatagttgcataatatatttctgaaaaaaaagacactgtaatgctgtttgtgatcataaaagacattgtttatcaatattacatgtgtttatggctctggtttttttaatacaattatatgcaaatagtcccttcttgggtaaatccttgtcatattttcctgcaattccccctgctggccacatcctcgccaatcagagtggatgattttctcacagtttttgcaacaggccaacttcttgctaggcattctctggttgttttcctgcctcctctgtcctccattaaaagatctttgccaaaatgtcaccttctcagaacagccttcccttacctgtaacggctccctcggctctttctctgtgatgaccctgacattagtcgcaatgtgccgctctcttgtggtccgtgttcatgttctgtgtgtatgtgtgtgcgatgggagggtgtggtcctgccccttctactggaatgtaaacttcacaagaacaaggactgaatctgtcttcctcaccactgtcttcctagattctaatattgtaaagcatttagaaaacagaaagtggcacataaatgacaagtgaytcaataaataaatataaaataaatgaatgtcctgaacttayaagtgttgaaatggtaagagtttctaatcacatctagatgtcactgggatcttcactcaattttgctgatgtcacttacacattcacttactaatccatcacttactattaaataatcactattccaggtactatctgtgttcgtgtgttcctttctttcttcacttgaggtaatatgagtatattggtatcatcagtgcctctggaatttactcattctgaaaatttgggaaataggagatagttacctgtctgtataactgaaaaggttttgttagagtacatgaaacttttactctagaacaagaacagcttgaaaaaccaacacggaaggaaaatatttratgttcttataataaaacatgtaatgatgttcttgcagtgaaattgaacagactatgatcatttaaatcacaatgttctggaaggtttggacatggtgaaaagctggtcaaatgagggcaccattaagtttttctaagaaaatataatgcttctgttcagcatgctccggacaatgcccagaatgtcccatttagatatgtcatcaatagctaaggatagtactgattatgttgcattcatgtgaaatctagttctttaccaggtgaccaaaacactttgagacattattttatatattcctgttattccttcaaattaactattttagcaagaagagattctttgcctaaggaatcagagtccgttcatggcacagctgtagacagaatcccattgtcctaatgctctgaagaaagccagtactaaattggcgtgggtaggttgctcaggaaagcagaatggtcaggtggaatttaaaacagtccacaacttcacatttatccttcctcatcttccagtaacccaaagcctcagggaaagtcgcagtgttccttrtagtcttagaaaagcacatatctacaagaaagcagattggcctgtgaggatgatgaaccagtgcttctgacaagtttcattctatgaygcaccacgatttcccaccctctccttcatgatgaaggaaagatagaggagctgcctgatgtggcccaatacaatttttaawgaaaagacaatgctgagatactgcattaccatagtgtagtccggacagccatatgcttgcccaaactattatatgtgtgtgtaatacttgaatttagattggaaattggaagctccttatggrtttctcttaaacatagagaatctttaaaggtgctacccgtcttcattgccaaatatcattacgttagtttttctctctgtggaatttatcaaaaggattcttttattttcttgtgcttcatgcagtgagcrctaatttagctgtcacatttcggtagcccctctattatgattttaataattaggtgtaartaatacaattgtacttatagatggcctttgactgcaaatgccccttgcccctcccttccttaccaaaccaaaaaaacttctgttcactctatagcctttgttattgttatgaacttagccttaacttattctcgaatactgagcacaacctttagaaggaaaatttccaggcatttcaggaaaactacaagttaaaaaaaaaatgccggtgtttaccagcagttagttgttcagtcaaggtcttcagagtagcgtaatcttcagtgatgcaaaatgtcatatggaaagtcaggagatcttgtgttggcttctgtcgttcactctcatcttgggcatgtatttttctctccattggtaaatgtggtccagccttggaggtctggggtattaacttggatcctcgctgatagcatgctccttggtcctgcttcttcaggccagtattactttgtaaggacccgtgtctctctgtaggaacttagcagttggagatgtttccatggttcatgccttcctgtgtactgggggctttcttttctgctcatttgaatcccataggaaattgtaaagcatttagaaaacaaaaagtgacacataaatgtcaagtaatataatcacattttcacgtgtggaatcagcagttgcaggagatacatgcagtcattccttggtatcagaggggaattggcaacaagcatggccttggatcccaaaatccacagatgctcaagtctcttgtataaaatgatgtagtatttgcatatagcctactcacatccccccggtatactttaaatcatctctagattacttatagtacatagtacaatgtaaatcttatgtaagtaattgttatactgtattgtttagagaataataacaagaaaaaaaagtctgtatctggtcagtacagatgcaatttttttcctgaatgtttttaattggtagttgattgtatccacggatgttgaacccacagatatgaaggaccaaccatgattttctctagtgacatagaatgctgttactgaacttagtgctgttattgaggggaaatattgtgtaactaacaaaggaagaaatatcccataaaaaacaagatttatgtcaaactcaaaatgctttttgaaaaagctcagtcttactgtggactattgtagtcagtgatttcttttgacacatgaacctgttgcatagtgttgaaccatgtaaaatgaatgttttacatgtgtttcttttcacagtgattggataatttaattgaataagccaagaaattacatatgaaagcttcacacagtttgtggcatacctgggacaaatatttttaaatttcctgtgtttcaggccttattttctgaggtcttaattcaccattacattagatgacaaattagcaataaaatagtattttagtatgtttttctattttgtagcaaatgtatgattcttacaattatgctgagttatgtttttcagataatatattttattttgaaaaatcattatcaagtcaackgctgggaaatacactagtaaagtagccccaattttgccttgtgaaatcaattgacttttttctttcatcaatggatcaactaaataaatgcttccagatgtattcttctgaatttgaaatcttccttttcttttctcttctctctttcctacattgtatttttgtacctcttcatttttgcagtaaaatgactaatgattaccaaaaaatgcaagtagtcaataccctgatagggtggaaaaaagagactaaatcatgttttttcccctttggaaaaatagttattcttttaaaagtgtattattgactgctaatctattttctcagccagccggtaccacaccctactttgagaagggtgtgaaggtgcatgctggcttttgaataatctcaaatcatgcatagtagctcctgctgatgttcagaactgccaccttgcttacaggttcaactctggtggctgcttccagttcctcttctgaaatgatatagttattcttggaaattttcaactgatattacagtgtcataagccaaatgatcagggatacaaaatatgattatgcaaatctgatcttaaggcagaactgaagggttagtgctataaatgaagtgaaggaaattcatcttctggagatactgtcatgccaccttttgctatttcctgtaggatgttctcatttcccttgagggagaaaggtttcattaatctgggacagctgtctgaagaggttttatcctttttagaagttgcctttgaaaagtgtctttgatatctacgtttttgggtttctgtgatttaaaaataaaaatcttgaagcaccatatgtaaccactgttagagtaatgagattgctgctgtgaggttgcaccacagacttgtggcaggtcaggggaaaagccattttatgatgctaagcacctataaatttctaaagggttcttccaagaaaaaaagcattctcatttctttagaactataaatgcagggctaatatatctacctgcatataaacatatatttaccctgtatgtgtgtatatgtgacacatacacacatgtatgcatactccatttatacaacgatataaagcaaataggtatagagatgtttaaaaatgtgctgggcaagtattttaaactgtgcatttgtgcatgatattgaacaggttaattcgggctagatggcaaacaagctttgtattttcctgagagatgtgatcttagaagttgtccctttgtaattttgagcgaatgagttggtgcactgctgagttgactattgctatctctgcacttaagggcaatataaaatcagctctgagacaaagtgtttaataatatagagaggtctgctatatccatctttgcagtagcttttatttattttttaatgtgatccccctacccctacccatgagaggactcacttacaaaaagctacagctgtgtccctgctcggtgcargctgccttggccaggtgcttcaaattgcaagcttccatctatgagcctgagtccagctgtgctgggattgattcctgccacacaggaaagtaaaggggaagcctgaactaggtcagaaaactgccttgctcatcaagtctcacccactgcggcttgtgcccttagttttttgtttctctgtgattccctgttcctgtggctccagtcactctggccctggaaatgttcgtagcagccacctgtgaacccagtgccctgctctaattttaggacaaatttttggcctgagaccaagacataaaaacagtaaatctctggccaagaaacaggtccaggtgtatctagtttcactgctttgtcaacttcaatctagtttcttcaacgtccgttactttcccctgtgattagagtttgtgccctttgtcctaatacacaccttcctggatttgtttttgtttttcgtttgtttgtttttgtttgtttgttttaagtgcacagctcagccttcctggggttaccacacttccctggccctgaccatgtctcatgcagacctgcctcttgagtctccactattccagccctatgtctacacagatagacactgagtctggggctttttgccaatattgcttgagtctgcaatccacagcaacacaatgtgaggccagcctgttgtccctaatgatgggaatgcttctctcctttgtctggtgaattgctctgcatctgttatgactcagctcaggcatccattctccagggagccttctctggcctcctcctgtagcccccccacttcctactgctaggctgggctggaggccctttcactgtgccctcatgatgacctgtgcacatttcaaacatatgcactgctgtgtattgtaattgtccatttacatatccatcacccataagcacccctcttcactcatctgtgtgcctcccagtgcctggcataatgcctggtactgtgctttttaaatgtttctatgcactaagtctacaataagtgaccccttgccttgctcctatatactgatacctaagcttcatccaactctatcactggcctttgctggccattgtcwtactgaggctatgacatttgcccaccaacctggaccccatgcttgcttgccatgctcgaggccctgattccggggtacctagtcttgcccatgaactctggctagtggtggatggtctccaggaaggcctgtcaaagtttctactgctggtaacaatggctaaaatcctgggatgtatgcrtggcctttctctgtttcaggctaggaaatagcccatatcaagagaatgtgattctcatgaactctgaaccctggagagaaaacaccaagcatgtaaaccttcctccttaataggaaaataaaaagtattgaatgagtcaatacttttattcctccttaatagaaaatacaaagtattgaatgaatcatttttaacacttttaatggtgactaatgaaatagcaaaatattttatggtgaaggatttctgaaaacaaggccattgtttcaaattgagctgatagtgtcagtggagacccaagctctgcttgaggccaaagctgttccgtatcttacgagccagaggccctggcctgtcattatgtgtctagattctgagcccaaactgctgagatctttctttcttcatctactccaaaattcaacattctaagctatttacagttggtgagagatataatgacttttagaggcatgaggattattcgaacattttttcccaataatattaaattctggtaatattcattttggaggtgtaggggtggagaaattccacctccatccttctagggtcctggctgagtttgagagtgaaattgacataacatagattcataggagaaagcatattacaagtttttcttggcacaggagctctcaggaagaaatgaagaccccaagaagcaatgtcagatactcatatgtcagattggacaaagagcagtcagttgtgaagaaaacaaccaaattatgtggggagccttagtggacaggagttagttcagcaatatctgttcagaattctcttgcgattgactttccatccttgatgataagaatattgcttcctctaggagcgcatctttaacatgggaatttcaccttctgcttttaagaaacaccaagaatctcagagtgatcttttcacacctgctgatgttcatgtggcattgacttaaatggtgaatatgccagaatagtgcattttaacccctccaggggcaaaaccaacccacacattgttaccagaaacccgccttataaacagtattctgttttgcccaaagtccctgagaagttgagtgtagattaagaccctgaggaagggagaggagggccctccgctttttgtattcgcagggcaattgctggcgccgttccattgcagtttccacaactcatgggttatgctctgttcgttcagcagctccagtgacttccctcttgattgaagagtagatcagcatttctaattgttctgcccagctgggcatgtagggtcatttagtcatattaggtaagcattacttaagatggtcactttttatgttcctgaacattgtttctgtcccacagtccgagtatatttccacgagtagactttattgggcccttcctttcttcctccctccctctcctctgtgcatccttatgcatgtaattatggagggtctcctatggccctgagagtgtatattgtcccagttctacctactggaaacagtttcctcggcctacatttaacttagcagtcaaactgatccccctttctcctttcctgcacctggaatgcaggaagtgaactggcccagagtccaggctccctggtcactaaaactcccctgactccacccctccttcccaccacccacctacataggctggtgcttccctcctcccatcttgtccgttgatgcccatgagggagaaagagctggaaggatactaagtttccaattctatatttactaatactaccctgaatgcaaacacaaggtttctgaagcagaacagattaattatcactacttatacaataatttccactccagatccctttagccccagttcttacccttggggcaatggagtgagaagcaaatagggtccactgtaggcaagaaatcccccaaagatgaacctgggtagttatataggagagggacagccatctccccttccctcctgaaagagaagggagaacctttgctctttggcaaggatcctgagttcctattcttagcctttggaatgcaaataaatctctccaaggagtagacaaagtctcgcctctccagctttacaaccttaggatgtctccatggtctcaggtctcattctccccttgaaatgaaaatacaaatacttacctccagggaggtagatctctctggatggtctcttaccatctaatcaatcatcatttaactggcaggcttgccttttagctcaggtcctagaatttagtacaattagtttagaaagtcctaacagtgcaaaaaacgtaaaaacattttcactacagttccacagggacttgccagcttgaggttagacctcatgactaacctgttctggaacaatagcttcatgtatttctcccgcatcaccccctcaaaataagaaagcgaaaacacagtaatcgtggcggaaaaggcctttcttgggaattacagaataagatttcagtctgaaatggacacaactacttagctaaggactaaagtgaactatcatttaagttttcgcctgcatgtgatgactgaactgtaaccatgcatttgctttttggtttaatatttttcccctcctataacccctcctgctataacatttgtcttttcctggttataaatacactgaaagcaaaggttgtgtctatgcaactttctctatggagctgctactacaccatcacaggcatagggtttgccatacatatttttggatcatgatagagcccttgtctagcctgctcacttccacatgattgcattccctctaatactaaagcatagtatttaaactcacagatgctggagtcagacaaccttggttcaactcccagttttgcctgacttaggatttagtttcctcacctttaaaaagaagataatactaatacctactttctaagtttgtcatgggtattaaatgagataatacatgttagtttcttagaggagctgacacacagcaaactctcagtaaatgttggtcatcattatattcctactgttaaagaaaaaattattcaatggtacttgttaaagcatgataaggaaaattttattcaggactatcacgatgggtacagggaccactgcaacagggtcttgcagtaggggagagagattgggcacaactctgagtatggcatgagcaagtgggaattagcagtcaaggggcagggtaggggtcagtggatgggaaattgctaggaagaaacatcaggagtaagggggattctggctaaattgacctaacaggattcttgatgaaggcaggccaggataaccagacatcacctgggggatggtggaggatgaggaacctgatcagaatcgagagtgatcagatgttgaggacggggggtgaggggttcttgccaaagtgacttagcagggttctttgctaaaagtagattttacaaggaagtgcctggatgggcctaggagaaggttcagaagcctacataaagtctggccaaccaaagatgctttgtcccttcatcctcttgcccatcctgacttccacagcattacctcctcyacatcaatctatccttgagttcctgcacaccctttcctgtctcagggattctgctcttgctgtttcctctgtctggaatgttcttctcacagtcagttccttctcactctcaggtcttaaaacaggtctttcctaatggcctaactggcatggcccaatctctatcccacctcacacaccccaacttgcacccccactctagacaagttctgtcacgtgaaccagtgtccgtcttgcctaacagccaccataaccagaactcatcttgcatttgtttatgcrttcactgtctgtgcccacctcctccaaccaccaccatgagaatgtgggtactgagaacagggtctgtgtctaccttgttctctgctatatccctgtagctagcctagcccagtatctagcctagtaacgaagtgcctagcctactgtaggcattcggtaaatatttggtgaattaataaaagaaagaaaaagaaagaggagagaaggagggagggagagggagagagagaaagagaaagggaggaggatggcaggacggagggagggagaagggaaggaagggaaggaaggaaagaaggaaaggcagacattacaatcggtttgtttgcatgactgagtacttttaatttagaagaaaaagaaacagtggaaatggtgggcaattactctgccatattttgatctgttctcttgtcaggcgaaacctatagacctccctagctgctttgagcaccaatctcgttcttacctgtctatcattgcttcactgacattgcagattttatgattacaagctatgtctcagtggttcacatcaagatcaaactgtggacaatggttatgaaaagccacgagtgatgtgcaattcactttttcctattggctttctgtcatgctgcggattagatacagaactcatgttgtctgattgtttcctttaggatgaaggatttaacttcagcctttccaccagtcagtgacgccatctgatgacctgtagaaatttaattgggcactctgatatatttagtagcagctcactgctttttttaacagttgctaacataaatgtctgaacaactaggagctttataagtgtttttcaaacaagggatggtttttaaaggtctcctaataaatagcattataattaatcttcactaattttcagtcataataaatattcattttcaaagtagtgattgtattgaaaagaatccttcagttaaatgataaattgtaattcagcagtcccttttattaattcagccagccccctctgctgttaaaaggttgtttctctttttcactttcaatggctttttttaaacctcaaagagatacttaaaattcagtcattgtatcaaataaataggtgcctatgtcaagtaattttgccagtgagaatatttatrtatccaaatgatgtctcatttcataggaaatcttatcaaaagcacaagtttcatcgcattgttactaaattaaaatatagaaacagaaaatttccagattaatagtgatccacatctttgtgggtagataagctcctactccagacataaaataagcagatttttttttaaagagtgcttttgtctaattcactctttttagcttggaagagttggaagtctggagccctgattctagtcctagctctgccagaacaacctgtgtgccttcggctgtcatcctcaccgtattccgtattgctaaacacattccagtcacttcccaatgaggacaaagtgctattatcatttcaatagcattgtgaaacaatagagtgctgttcaaatgcagatcgatctgagtgaggattagctctttgctctgtcctgcagtgcactaattattggtggctctgttatttaaaatactgagataggctgagtgcagtggctcacacctgtratcccagcactttggaaggctgaggagggaggattgcctgagcccaggagttcaagaagagcccgtgagacatagtgagaacccatctctacaaaaagaaaaggaaaattaaccagacatggtggcacatgcctatagtcccagctgcaggggaggctgaggcgggaggatcacttgagcccagaagttcgaggctatagtgyactgtgatcatgccactgcactctagcctggaccacaaagtgagaccccatctcaaaaaaaataaaataaaatactgagataagggtattagcatataaaacatatagagaagtaatagaagagaaaattttcgttgtgaaaaaatgtatacccaaaggtaggagtcgttatttgtgttatttgaattatttataacgcaaagggaaagatgactccagagaagagtgaagagtccctcagaatctctccccagtaaacatccatttatcaggaggaaagcattttttaaaaacatagttttttaaagagaattatcctaaagtaaatagggtaatattcattcaagaaaatgagaaaatcagctaaatctcattaagacaggggtctgtggcatttcagtcatgacccttaccttccaccccaagcttagggaaactgattgaggagctctaatccagggagatgcaaccaagaaaatgagactcttcccaccaccaccccagctccccagctccccagctccccagcctggggctacagtttcaccatgggaggaatgggctgacagagtttctcatcttccagccccattttacagaaattccattgtaggcgggggtgactaagaggcccaggattcctttcctccacctaacttctattcgtaggactgaagcttttccccaggcatagctaggagagaatagtgaggccctgatcaccttcatcccagctcacttctaaggctgaggctccatacaaggaaaggcaagccaggaaggtacaggccacacacactccgtacctgctggcggagcaggatgtcactctgggacaagagtgggttctacccccagctcttgtgcagtggaacagaagtgctgctcaggaagaggcaggccaaagaggcagatctcagggacgaagaactccacagctcggcctgcaggggctggctttatttggaatggagcgtggagaattccatgcttaaggacattgtcaaaagcaatgagcatcttgttggagagcaattcagaaggcactcatagctccatggtgcaagctaccacatgcaaaatggcagagcaatcagaagtgtaacagggtacaatggaaagaccaccaagaagaaccctcctgggatgccacataaccctggcggtcatgaaggctgtgtgcagtgcaaggctgtacctagcaatagtcagaagcaatcagagctagatgtgggcagatttgaaaacaccactaaaccacatacggaataatccacaaagggcagaagcctcactggcactagaggcttaagcacaaacttcaccacarctggctgaactgacccagaggcaactcctaggaaagcaggcttaagaagaaaaaccatgctgatccctggcagcctgaaagtccctgtacacacccaagactgtgccttctccagagtgatgggagaagaaaaatccaagctagtagtccgtcacaaaatgtgaaggcaaacacataattatttaaattgcaatagcagcctccaagccacaaacacatccaaggtaaagagtaaaagtagaactggctaagcggtcttaagcacaatctatgaccagtgattttatgctgacccggagaaatctctacatagccaggctcaaagatataaacacgaggctgcacactgtgtgggaaatagagtttaagtcatcaaagcgtaaataaattggccaagacaacaacatcaaccccctggggtggaggaggggcaatcaataagcagtgttgctacaatgtattatgcaaaagttccagttttcaatgaaacaattacaagacatgcaaagaaataggaaaatgtgaccctgtattaatttgctagggacaccataacaaagtactacagactatgtggcttaaacaatagaaatttattttctcaaaattctggatgctagaagtctaagatcaagatgtaagcagtgttggtttcttttgagccctctctccttaacttgtagatggccacctccctccacgtggtcttcacatgctgtcttcacgtgatcttccctttgtgtgtgtatctaatctcctctttttggaagsacaccagtggtattccattagggcccactcatatgacctcattttacctaattacctctttgaaaggccctgtctccaaatacagtcacattctgagatattggaggttaggacttcaatctrtgaattttggggagaaacacttcatcccataacatattcagctcatagtagatacacagacagaagaaaggcagggaatagaaactgcttttgaaggagcctaaataattgacttagcagacaatgacatcacacattttaaataagttcagagaactgaatgagatcatgtctaaagaattaaagaaaatgtatgataacaatatctaatcaaatagaaaatgccagtaaaagagaaattatttttaaaggtaccaaatgaaaattctgaatttgaaaagtacaaaaatataaataaaacaatgactaaagggtctcgagagacagtctgagctggtagaagaaagaaactgaccttgaagaagatcagtagagattatgtaatccaaaagagaaaaaaaagaatgaggaaaaataaacagtgcctgaaagaatagagtggaacaccattcagtgtaccagtttatgcataatagaagtgccagaaggagaagagaaagagaaaggagcagaaaaaaatattcaaggaaacaatgtctgaaaaattcctaaatatgatgaaaagcatttttctacagagtcaagaagctcaataaactccaagtaggagaaatacaaagaaattcaygctcggacacattatagtcaaaatgtagaaggagaaaacagcaagaaagaaatgaytcaccacttgcaagggaatctcaaaaagattaacaattgtcttcttattagaaatattggaggcaatggtatgacatatttgaagtgctaaaaagtaaaaaaggtcaacaagaatctaccaaaattatctttgaaaaatgaaggcaaaataaaaacattctgagatacacaaatgctgtttgttaacccccttacaagaaatactaaagagagtttttaagactaaaagcaaaccacaccagagaataatttgaatctgcacgagaaaagaaagagtgctaataaaggtaatgatgtaggtcagtaagaaagacagtgtaattgaatattcattcccctttcttctctaaactgatttaaaggacaaattgcacaaaaatatgtgtatcattatattagtgagtttataatatatagaaatttaatatttttgacaaaaacagtgcagagaaggttggtaggagcaaaactatatcacagtaagaaaatgacaccagatgggctgggcgcggtggcttacgcctgtaatcccagcactttgggaggtcaggaaattgagaccatcctggctaacacggtgaaaccccgtctgtactaaaaatacaaaaaaattagccaggcgttgtggcaggcgcctgtagtcccagctactccggaggctgaggcaggaggatggcgtgaaccccggaggcagagcttgcggtgagccgagatctcgccactgcactccagcctgggcaacagagcaagactccgtctcaaaaaaaaaagaaagaaagaaagaaaggaagaaaatgacactagatggtagttcaaatccacagaaagaaatgaattgtaaacagtatataataaggttaatacagcaaactatataaatacgtacttcctcttctttcttttctcagttttgttaaaaaaaaaaaaacataagattatgtaaaattataacaatgtattttttggtttgtaacatatttagctcaatatacacaacattaatagtacccaaaagaggggaaaggaatagacacatatatgagtaaaatttctttattttgttggaatgaattttatataaatctgaagtcgattttgataagacatgcatggtaagcactagagacatcactaagagaataatgcatatattatttaaagatcattaagataagttaaataaatatcacactagaaaatatttgcttaacactaaacaaggcagtaaagaagaaaggaatgaaacaaacatgagacatacagaaaacaatgacaaaacaaataaaaacaatgacagattaaatctaagtattacaataaaatattaaatatgtacaatccaatcaaaaggcagagactatcagactggaaaaataacaaagcccaactatatactctctacaggacacattttacattcaaatatacaagtaggttgaaagtaaaatgatagaaaaagatataccatgcaaacagaaacctaaaagannnnnnnnnnnnnnnnnnnnnnnnnnnnnnnnnnnnnnnnnnnnnnnnnnnnnnnnnnnnnnnnnnnnnnnnnnnnnnnnnnnnnnnnnnnnnnnnnnnnnnnnnnnnnnnnnnnnnnnnnnnnnnnnnnnnnnnnnnnnnnnnnnnnnnnnnnnnnnnnnnnnnnnnnnnnnnnnnnnnnnnnnnnnnnnnnnnnnnnnnnnnnnnnnnnnnnnnnnnnnnnnnnnnnnnnnnnnnnnnnnnnnnnnnnnnnnnnnnnnnnnnnnnnnnnnnnnnnnnnnnnnnnnnnnnnnnnnnnnnnnnnnnnnnnnnnnnnnnnnnnnnnnnnnnnnnnnnnnnnnnnnnnnnnnnnnnnnnnnnnnnnnnnnnnnnnnnnnnnnnnnnnnnnnnnnnnnnnnnnnnnnnnnnnnnnnnnnnnnnnnnnnnnnnnnnnnnnnnnnnnnnnnnnnnnnnnnnnnnnnnnnnnnnnnnnnnnnnnnnnnnnnnnnnnnnnnnnnnnnnnnnnnnnnnnnnnnnnnnnnnnnnnnnnnnnnnnnnnnnnnnnnnnnnnnnnnnnnnnnnnnnnnnnnnnnnnnnnnnnnnnnnnnnnnnnnnnnnnnnnnnnnnnnnnnnnnnnnnnnnnnnnnnnnnnnnnnnnnnnnnnnnnnnnnnnnnnnnnnnnnnnnnnnnnnnnnnnnnnnnnnnnnnnnnnnnnnnnnnnnnnnnnnnnnnnnnnnnnnnnnnnnnnnnnnnnnnnnnnnnnnnnnnnnnnnnnnnnnnnnnnnnnnnnnnnnnnnnnnnnnnnnnnnnnnnnnnnnnnnnnnnnnnnnnnnnnnnnnnnnnnnnnnnnnnnnnnnnnnnnnnnnnnnnnnnnnnnnnnnnnnnnnnnnnnnnnnnnnnnnnnnnnnnnnnnnnnnnnnnnnnnnnnnnnnnnnnnnnnnnnnnnnnnnnnnnnnnnnnnnnnnnnnnnnnnnnnnnnnnnnnnnnnnnnnnnnnnnnnnnnnnnnnnnnnnnnnnnnnnnnnnnnnnnnnnnnnnnnnnnnnnnnnnnnnnnnnnnnnnnnnnnnnnnnnnnnnnnnnnnnnnnnnnnnnnnnnnnnnnnnnnnnnnnnnnnnnnnnnnnnnnnnnnnnnnnnnnnnnnnnnnnnnnnnnnnnnnnnnnnnnnnnnnnnnnnnnnnnnnnnnnnnnnnnnnnnnnnnnnnnnnnnnnnnnnnnnnnnnnnnnnnnnnnnnnnnnnnnnnnnnnnnnnnnnnnnnnnnnnnnnnnnnnnnnnnnnnnnnnnntaataataataaccccattaaaaatgttcatgtcaaaagacatgaacagaacacttctcaaaagaagattcacaaacggtcaacaaactttcgaaaaaagttcaacatcactaatcatcagggaatgaaaatcaaaaccacaatgagataccatctcacaccattcagaatgattattactaaaaagtccaaaaacagcagatgctggtgagactgaaaagaaaagagaatgcttagacactgttggtggaaatgtaaattatttcagtcactgtggaaagcagtttggagatttctcaaataatttaaaacrgaactaccattcaacccagcaatcccgtaactgaatatatatccagtggaaaataaattgttctactaaaaagacacgtgttcatatgttcatcacaacactatttacaatagcgaagacatggactcaacctagttgcccatcagcaatggattggataaaggaaatgtggtacatacataccacagaatactacatagctataaaaaaaagaataaaatcatgtcctttgcagcaacatggattcagctaaaggccaataccctaagcaaattaacacgggaacagaaaatgaaatactacatgttctcaattttaactgggagctaaatattggatacacatggatataaagatagcaaaaatggacactggtgactactggagaggggagagaggtgaggggcaagagctgaaaaagtaactattgggtaccatgcttagtgatgggataaattgtaccccaaacctcagcatcacacaatattcccaggtaacaaacctgcacatgtataccctaaatctaagataaaagttgaaaatatatgctatactgcacctaacaatgcaaccccaaaatacaacaacagcaattgacagaactgaagggagaaatggataattcaacaataataaatgtttcagcaccctactttccayaatgaatagaattactagacagtagataaacaaggaaatcaaaaactcgaacagtataaactaacaagatctaacagacatctatagaatcctccacccaacagcaacagaatattcttctgaagtacacatgaarcattttccaaggtagaccatataggagtccatagacaagcctcaataaattcaaagaaattaaaataataaaaaattattttttcttaccacaacagaattaaattagaaatcaacaacagaaaaaaatggggaaattctcaagtatgtggaaattacccaacgcatcctaaataactaatgagtcaaagacagaagtcacaagggaaattagaaagaaatgaaaattaaagtacaacgtaccaaaatgtatggattgtagctaaagcagtgatcacagggaagtttgtagctgtaagtgcctacattaaaaaagaagaaagatctcaaataaataaccatcttccatcttaagatgctaggaaaaaaactaaagttaaagcaaatataaataataattattattattatgttattttattacagaataaataaaaaacaaaaacaaaagagaaaaatcaataaaacaaaaaatttattatttgaaaacatcaacaaagctggcatccctttagttagactgaccgaaagaagaaagatgagattcacattaccaaaatcaggaatgaaaaagtgaacagcactacccatcttacaaaaataaaaaggattataaagaaacattatataataatgtgtgcccacaaattagataacttagatgaaatggacaaattcctagaaaaacacgaattatcagacaaagagaaaatctaaatcgacctataagagactgaatcactaatttaaaaactgcaacttaaaaaattgaattagtaatttttacattttccataaagaaaatccatagttcagatgacttcactgataagttattccagaaattttattatgaagaatgaataccaatcctttgtaaagtcttcttaataataggagaggagagaaaacacttcctaacttattctatgatgccagcgttttgctaatatcaaaaccaggcaaagacatctcaaggaaaaaaacaacaaaactctgcagactaatatcccttatgaatatagacatgaaaatcttcaacaaaacactagcaaactgaatcaagcaacatagaaaaaggattattcaccttgacctaatgggatttatttcagaaatgtgaggttggttcarcattcaaaactcaaataatgtaatacatcatatcaatacaacagaaaaaaactcagaagatcatctyaatagacacagaaaaagtatatgacgaaattctacagcccttcacgataaaaaccgacaaactgggaatggaaggcagcttcmyccacttgatacagagcacctagaaaaaaaccacggctaatatcataacctttagatgagatcagcttcatgaaatgaagagagcttcatttgcatttgggaggaaaaaggatttgtaagtcgataggacttttggaagaagagcccgcctgggacagggagcatggtgctgttggccagtgaggcaagatgggcagtcagaaaatcccaggaatctcaggggactttctgagcaatagtagaggaataaaagtaaattaacaaaatgtgcaaagagtgaaaaatataaaaagcaaactatttccaaatattctcccagatagccctactcaataaaaaataaggagtaaaattttcttttgttcccagaatcctgatctcttttactattactactataattcattttcattatgggctratcaaacccacagggaacccagaaacctaaccagcattttccccaaaatatagtatctctaggactaggctctaaacaattgactgaaaagtaaactatggggacctgatatattcataacttggaaactgcctgtgcacagtattttttatggatgatttgttttcctaattatgatttgttaagcttaattctatagtcagttaccattccatgagtacacactggggggattaatggcttaagagtaatccatattaccaaggatatagacagtcacgcaccacataatgatgctcagtcaacaatggtatacctgtaggatagtggtcccataagactataacaatgtattttactgtactttttctatgtttcaatatgtttaaataacacaaatacttaccattgttacatttgcctacagcatctagtacagtcacatgctgcacagctttgcagcctgggagcaatatgctataccatatagtctaggtgtttagtaggctaggtcatccaggtctgtgtaaataaattctgtaatattcacacagtgacagatttggatagcaacacatttctcagaaggtatccccatcgttaagcaatgcatgactgtgtatcctttttttttggagacgagagaaatcttctacacatgtgaaacatatatgtatgtatacacacaatatagataatatgaatatatatatttcacatttcaagacttgagtcctgtccccacaaaaaacaaataaacaaacaaacaaaaaaacacctagaaaaggaaaatcgaacccaaatcttgcttcttaggagaaattaagcaagaaagacgtaaagaagaatgatttaaaataaaaaaaaatatgggggaaatagtttgagttaggattaatggtgattacattcattaaagttagatctggacaagttttgaacttggtataggctggagtcctagagattctaggagtgaatgaggaaggagaggacctggttcaggagcaggggctcaggaaagcccccactggtgtatatttggtgattgtttcatcaagttggaaagaaccttccttccagcatcaagagctgaaaaaaaatacaggtctccaagtagtgaagcaggagctccaaagccaatggacactttagccttctctgaacactacagtaaccatggaatgttttaattccagtcaccctgtgaagtgcagaattctaagagtggcctaatgccccaygctgatgtacaattccctccttttgagtgtgggtggaacctctgaagatgaggagatatcactcccttaattatgttatgttaaatggcaaaaagttgattattttagtgggcctaatataattacatgagccttttaaaagctggcataggtgtgctttggcaaaatgatctgatcatcaagtgatatagcttagttagtccacacacaaccacttccccaaaggacaccccgagtccagttgcggatggcaccagatatcagttacaagctggacctggaattagcacatccttcccacaatataatcatttccaggtcatgagccacacttctcaaataggagctcactgtttaatgaagtaactcactcccatttagacagctccaaacattacggagttctttcgtgtctccttagaacttatacctgttgtactatttgtaaaacaaatacaattttatactgtaagagctrtgtcaaagaagttcattctttcatgtgacagcccttcmrttatttggaggtagaaataggtttctcctaagtgtgcctgagccctttctccttctactggaaatattccaggctacactgttgtttaaagctaacaccaaaccccagatgtgtctgacctgtaccaagtagaagatacttccttcctcactgttagcacctttattaaatgctgcctaaagttgctttaaaatatttagctgttatatcacatgatgaaatcattttcatataacaggaagtcatttccaatcttgttttgcatatatacaaataattrkyaytaagctaataaataaaattttcaaataggacaaatacaagatgytactggttttttttttttattgtgtaatacagggtatgggagaaatgataataccttttcctcatccaattacaggttcatggctgagacccctataacaaaagagagatgaacaagagcaaaacatacagacttatttaatataaattttacctgacrtaggagccttcagaaaggagacccaragccccaggaaaaactgtatttgtattgacagtcacacagtagtgtgattggaggaccaatgggtgtgatctaatggtgataagctgggggaactgaacaaggcctgtctgtttggattcttcatgtcctctctgtgtgacattcctttcttcagggtatgagggttattatgggaggagagaggkagatggtcagagagtggtcttcctgtgttttatgacctacttcagggaagaaggtatgaagggmattctagcttctatggcccacttcaggggagtcaggggacagaagaatgtcagtttctacgatctgcttcaggagagagggaataggagaaagtcagagatgtccctgcttccactgttttctcaagttactcagtatgcctaggggctatattttgaggtagcattttctgcaccccatctatagatttttcaattcttagagtaaataaacaaaaaccaagatttttcttcggacctgaaacactaaaagaaaaatctagaaagaaaatcagacacacaaacaccaaatggaagaataaaaaacttaaaaggaaatagaatctggcaatcaaataatgttgctttgactctcattttagctaaaaagcaagcgagtttcaatattactattcattacattacattcatttctatcgtagagagataaatcaatttatttttaacagctttgttaagaaataatttacacatcactcagttcaccaatttaaaatgtgtagttcaacggtttttggtatatttattagcagtgctacgcaaccatcactacagcctaaatattaaaacctttcaatttcatccccccagaaagaaaccctgaaatcccttttttcataatggtgaggcagaaggcattgtaatccattctgggtcatggggaacaagtacattgggaagcrggatagggaaaggggagccagacgtagctagaggagggtyggtattcttcatcgatcgcacgggcttcctgtgcttctactaaaagacagcttccagacggctttccctagtaaatttcgccggtggaaaattcactgtgtgattccatttaagcctcatgggagtgtcaggccttatagaaaggctgaattgtgaatcacattccactacagctttctccctttcctttcaaaaggagttcaggctgaagtagaatctaagcaccatgtgtgttttgcttcagcaaagaggcaattgtaatccagcggcgctgtgttttagctaggcagttttaaaacaaatacttgcattgggttgcttttattaagccgcgtggctttctttctctttcagagaccaaagtgttaaagtaaatctagtgcattttattttaaacgatcagaatgtgacgagaacgttcattggcatgaaacaactataacaaaatccacaaatcttttcctttctgagaattatacactccggattgatctannnnnnnnnnnnnnnnnnnnaattgactgaaattggcacactggacagctctgtattcgggtctctcctgcctcatccctgccacagtttgggtgaatctggatgtcttgacactggacacatcaaatactaaagtggatatattattctgatattaaaagctttggtgaaagtcctccttcaaaaatgctattcttctacgtacaacttttctgaagaaacaaaggaaaacacagcttctggtttgtgttttggtctgagaagacaggcagcgccttgctttgtgaagttctgttcctctgttctgccctctgccggctgaaggaagtactactggcacttcgtgagttgcatttatgcattyattttagcaaacctgggcacattttctgacctgcacarttaaaacagctaaacgcaatgcagtggtcaaacttaaaattaccaaaggcaaatacaatttcttctacccactcctcgccctagcctcgtcctacacccacggaatgtggaaaggtgatgcatgcagggctgggggcatgacagctgattgtgcagcctgcctttctgccaatgaaatactagcgtaatgattggaaaaggggtgaatttccaagggcaraagtttcccttggaggtctcaggactagaacccgggcttctgtgtgagctacagccacatcgtaggtttcttggcactgaacgtgctgttttgtggcccttatcctctgagttgagatgagcaatcttttcctggccgtgtattgtctctgagctagagacagttaccaactgctacttcttaaaacaaaacaaaacaaaaaccttttttaaaaattaagcagtttttagtttaattgcaactttttttttttttttgagacggaccctcgctctgtcgcccaggctggagtgcagtggcgcgatctcggttcactgcaagctccgcctcccgggttcacgccattctcctgcctcggcctcccgagtagctgggactacaggtgcccgccaccacgcccggctaattttttttgtatttttagtagagacggggtttcaccgtgttagccaggatggtctcgatctcctgacctcatgatccgcccacctcggcctcccaaagtgmtgggattacaggcgtgagccaccgcgcccggcctaattacaacttttaaggcctccttttctcctgatttttggatatcagagataaaaaagcaacaaacatttgtagaaatagatcgcatttaaattactttaaatagcaatacatttctgccatttacatgtttctttgggttaacccaaaagttcaaaggttatatcaaaatttataagttgaagtaaatacatgttattcacaaactcaacgataagtgagtataatatgaatttaagtartgttgctaaaaatatcrgaagtaatgtgaagtgagatttagactaaatttacagtttaatttacaatggtctttccacctctgaaataaaagacttttatttcactttgatattattaagttacattggttttcctttccccaaagaaatggcatttaaaattcctgggcatgtgtgcacggaggactttgctgctaacttgcatagaggaaagcacactaagcgtggccttgaacacaggctggcatacttcagtgccccgtggactcaattcatgccacttcctgagcatccatccctgactgctcgtcttgctttgagaacactcggtacacatctcactaaagcctggtctcagtggattatgcaccgtgtgagtgcttctctccactcctctcagggcttcttttatgcagtggaccttgtttgactcatctctgtgtcctggcagccagcacagtgcctagccccagcatgtgtgcatgtgtgtgtgtgtgcgtgtttcaatccttgtacactgaatgagtaaatgtggttcaggcactaggcatttccattgtctgtttgatggttgcatttgctcaaagttaacatgaaggaatacaggaagatcagacaaacttaatagaattttgacttttaaataattgacagaactataaagacttgtgccttatgctgtactatttgaactcgagaagagaagaacattggttgagtcaccaggaccaaccccttcttattatattcttattttctagtatgtattctggaatgagaaagagagagacagagacagagaagagatgtatactatacgtaatctgcattcaaaaaacagaacgtgtctcaagaagaacgtgatcagaaaagcattatatttgaagactttcaaagatagaaaagcataagccagaaacgatcaaaatgaaaaaataaacaatactagagttggagcaataaatcaaaacctgatttcttaaactaaccaggaaaattgacaaatccttggcaaggttgatcaaaggggaaaaaagaaatgctacaaataagtgatgttagcagtgagaaaagggacataattacagataaatgtatgggatatagctacagttatataatccctgatatactcagggattcaagaaagcatgagaatattttgtacacatctgaaaattgtagacacaactattagctttcaaaaatatatacattaccaaaattcgctaaaataatagaatatttcaagacaataataatcacagaagaagataaggtggtcaaaaatctatctctaaaataagcatgaaattcagaaaatgttaggtgatttctactgaatctttaagaaacaaataatttttatattctgaaactacatccaggtagtagaaaaagactgcaattatcttaactagaaatagaaattagactggaattagaaaaggctaacaaaactctgataccaaattagattaaagaatacacacagacaaggaaaactggaagtcagtctcacttgtaaatgtggatgtaaaactcctaaataaactattaggaattaaaattataagaatgactctaaagcattaaaaatgtggacaaagtgccatttatatgaactatgtgtagctagttcaatttagcatatcaatttttttatctatgttaacaaatgaaagaaaaaatgtattatttgattctgaaaaaatatttaatacaaaacctacttgattttcaaagaaatagcaaacaatagacaaaacttctatcttgctgtgaatagcaagcatcataatcaatggtaagacattaagtgcttatcaataaaagttaggaacaagatatgtttacctgttatctcaggtattattcaatactataattcctagtcactacagttaattcaaaacgtgtagtggggtgacaggagaaaacttctattatttaagatattattatctatgtaggactaataaaagatttaatcaagttggccagaataaaaattaataagcaaacacaaatggtttttcttgtacactaccctaccaattagatttttttagtgctctttaccatagtaaccaatatcatcaaacagctggaaataaatatacaaagaaaaatataaaacctattgaagacaactattaaacttttgtgatatattatacatagaagccctgagtacacagaaaaatacaccaagctcctgaacaagataccagttcctctacagttatgatatgaaattaatacagttctgatcaaagggccagaaagtgtttccatcagttctaaaatgctgacctaaaaatgtatctaaaagaggaaacatgaaagaagagccaagaaatctgaggaagaagaaagggaaaaaaactacagaatatggaaacactttctccgccaagtatcaaaacatactgttagccccagaagaagcagaaaaggagtacacacttgcaggccctgcaggtcccagagagacagggcaagaactccatgttctcaatcacataaatcacttttcttcccaagggaaggagagagttagtatgggagagagaagtgggaattccccactaggaaacatgggactgagtaataaagtttctctaacacaaagaataaagttaaagaaattaaaacactaatgttggcacaggaataaacatactgcttatgagaatagaaataaataccaaaatacattcaagtatgtgtagatatttatacataataaaaaaactatgtcagtgtgatcatttcagctataagtaacagaaaacctaattcatattagctccaaaattaaagagaacttgttaactcagattatgaaaaatctgaagggagatgaaggaagcgacttcattttcatggagtaagtagggcttactccaggggccttgaaacatcaccagtgatcctgtgtctgccttttgtctgctccattttgtaggatgttgcttttattctatagctgagtcttctcataggtgctcaagggctttttcctttacatccagcacaaaagagatcatttctgtctcagcatttcaaacaatttcccagagttcagtctagttggcttaaagcatatgcctaaacccaatatggctcttgtaataaaatgactaaagtttataaacccacctcgaatcctgagtatgaattccatttacacaaaccataaggccaatgccaagacaaaaatcgtttctcaaaagaaaatgcgtagtactgtttccagaaagtgacacaatagatacttaatcaccagaatgacagaggtcccctactggagtcctttagaacagttggggaaagaaagaaaagttgaacatctattttgggtaaaaagtttactccttcatcagattattttcaaaatttcttatacattggtatatgttaaagcagtccttttaaagcatatatatatggctccctttaatacacagaagactgctttaatgctttaatatataccaatgcacctgaaattttaatacacaaaagactgctttaatgttttatatatctataactgcttgtatatgtataaatgcatacatatatgcattatacacacatatgtaatatatatgaatatagatctgtaactgcttatatatgtacaaatgcatatggatttatacatatataggcagttacagatctatattcatgtatattatatatgtgtgtataattattaaatatatacatatattggcattaggaaacactggaaggttaaaaaataaattaatttcaatggttacatatagtggcaagggagaaatagaataaagtcagagttggcagcaagactgcagtacacaggtatacctcattttattgcaygtcacttttttatgcttggcagaaattgtgttttgttgcaaattgaaggtttgtggcaaccctgcgttatgcgagtctatcrgtgctatttttctaatagcatgtgcctactttgtgtctctgtatcacattttgctaattctcacaattatattttcaactttttcatgagtatgttatctattgtagtgatctttgatcagtgatctttgatgctactattataattgytttgagatgtcatgaactgcacccatataaggcagcaaacttaatcaataagtgtgtgtgttcrgactcctccattcaccagctattctcatgcctcttctcatgccttcatatttccggagacacagcaatactgaaattaaaccaattagtaatcccacagtggcctctaagcgtgcaagtgaaaggaagagttgcacgtctctcactttaaaccaaaagctagaaatgattaagcttagtgaggaagccacgtaaaaagctgaggtaggccaaaagctaggcctcttgcaccaaaaagttagccaagttgtgaatgcaaaggaagaattcttgaaggaaattaaaagtgctgccccagtaaatgcacaagcattaagaaagtgcaatggcgttactgataatatagaaaaagttcgagtggtctgggtagaagatcaaaccagccacaacattcccttaagccaaagcctaaaccaaagcaaggccctgactctcttcaattctrtaaaggctgaaagagatgagaaagatgcagaagaaaagtttgaagctagcagaggctggttcatcaggtttaaggaaagaagctgtctttctaacataaaagtgaaagtgaagcagcaagtggtgatggagaagctgcaacaagttatccagaagatttagctaaagtcactagtgaaggtggctacagtaaaccacagatttgaaatgtaggtgaaacagcattgtataggaagaaaatgccatctaggcctttcagagctaaaggggagaagtcaatgcctggtttcaaagcttcaaaggacaggctgactctcttgttaggggctaatgcagctggtgactttaagttgaagccaatgcgcatttactattctgaatatcttaaggcctttaagaggtaggctaaatctgcttttcctgtgctcaataaatggaacaacaagcttggatggaagcatatctgattacaacatggcttactgaatatttcaagcccactgttgagacctactgctcagaagaaaaaagatgttttttcaaatattactgttcattgacaatgtccctgttcacccaagagctctgatggagctatacagggagatcaatattgttttcatgcctgttaacacaatatccatgctgtagcccaatagatcaaggactaattttgacttccaagtcttattatttaagaaatacattttgtaaggctatagctgccatagatagtgattcctctgatggattttgtcaaggtccattaagaaaccttctggaaataattaattattctagatgctattaagaatattcaccagcctgggcagcatggcaagactccatctttacaaaaagtgaaataaattagccaggcatggtggcatacacctgtagtcccagcactttgggaggccaaggtgggaggatcacttgaggccaggagtttaagaccagcatagacaacatacccagacccaagatttcatctctaaacacaaaaaagagaaagaaatttacttgcatgtggcagcacacacctgtagtcccagctactagggaggctgaggcagaaggatagcttcagcccaggaattcaaggctgcagtgagccatgattgcaccactgcactccaggctgagtgacagtgcaagacctcaactctaaaaaaaaaraaaaaaaagtaaaaaaagaaaagaaattgccacaaccacaccaaccttcagcaaccaccaccctgatcatcagcagccaccaacattgaggtaaracccttcaccgcaaaaagattacaactccctgaaggctcagatgatcattagcatttttagcaataaagtatttttaattaaggttcacatattatttttaagacaatatgctgtttcacattcaataaactacagtgcagtgtacacataactcttacacgcattgggaaactgaaaaaaatcatgtgactttctttattgctgtggtccagaaccaaacccgcactatctccaaggtatgcctgtaaaaagatagacagacagacagayagatagatagatagatagatagatagatagatagatagatagatgatagacagatagatagatagatagacagacagacagacagacagacagacagatagatagatctattttcaagttccaggctctctgggaagcagctgaggtgtagaaataatataatgggtaaaatttgttaagactttagaatatgccaattacttaagtgctttatgtcatctaattcttacaacaaaactagaagatagttttgaggtggaagaatcagttgagcctgggaggtcaaggtatggatgggaaatgcagcttagaggaattgaagtaacttatgtaaagttacagagctaacaacttaagcaagtaaatccaaagctggtctgataacaaacccagtgcttgtaagggtactaggagtccaaaccttaggttcatgttcagacttctggacttaggattttacacaacttacttaaactatctgacttgcccatatgtctaaagatctcaaacaaaataataaatataaaagggctttttaaagtgtaaagtaccatgcaaatatctgctgccctctggatatttatacctgaacattttacctttctacaatctcagtgcacttaaaattgcattttattttgtccttattctttcttccactgccatccccaataatttcctccttttttccatatttctattggcggttttctcaatagcttaaaatgttgcaatatcttaaactagtctttctccgttgcccctatttaatctccatttcccatttgttctttctttaagtcagctttgcttctcctttccttttacctaactcttcaccacagctgttctccaatcctaatcactgcagccctggactggtgaaacagcctcctctcctatcttacccactgcattatctcctggggtataaaagccttattttactttttttatatcactcagtgacttataataaatatttgttgattgatttattctgtgaagacatttaaccttttccccatattttgtaacttaaatactcatgttctctgtagattttaatagacaatatcttcttgtatttttatgtactttaatttgactgctggtatgaaatctgcaaccagctgggcacggtagctcctgcctrtaatcccagcagtttgggaggccgagacaggaggatcacttgagcccaagaggtggagaccagcctaggcaacatggcaaaatcccgtctctacaaatacaaaagagattagccaggcatagtggcgtgggcctgtagccccagctactcagaaggctgaggtgggaggatcgattgagtcccagagatcaaggctgcagtaggccaagattgtgccacttcactccagcttgagtgacagagtgagatcctgtctcaaaaaaagaaaaaggaaaagaatctgcagccatcaattatatgagagattaaaattatgctgaatgattagtatcaacttcctccttcgtagaaaaatatcccactatatttgttgacattcaatggtttctgacatcctgtgggaaagtatatctatctgaatatttttgtcgaaacatttaaaacttttgtttttagcaagttaagaagctctgctgtatgatgcagcaaaagtagaaccaagaaaattgttttgtgtgctagagttcttaactgggatttatctgtattggttccgttcagaatataactatctgttgcactgccattgcatgaaaagcatgtggctggaattttagggaatacacggataaatcagcctaaactcctacctgtgaggtgtctggaggcagaagggaaggaaaaatggaggatgactacatccacattgcaggaagctatagttctcagtaccacgtggtgagcacttttgacaaagtacagtggggcttgcaaagaccaagagattacatttgatggggaaattatgattggcatcctggagaaggtagaatttaaatctgctgagacagatgtaaatggggaagatggaaagtgccaggggcagtaaggacagctctgaggcagaaaagaacagagcaagttcaaggaaacaatcagatccccaccacggactgagcataatgcagtagactagtgagaggttgggacgaagtcctgatccctgtaccagaattatttgaatcccaaggcaagaaggtggtccttaatgtggtaaacaattggagcctttgaaagtgtttgttcaattgaataatatatgtgggtctgtgctgcagaaagattaatctggaaacaaaacagaagataagctggatttgaaagagagaggagacccctgtaagaataatgatgacaaaaatataccgaccaacacttacacaatgtttactttgtgccagacactaatctaagtactttcattaacttaattcatgtaatctttacaactttgccaggtaccattgttagctcagttttatagttaggtaaactgaaatacaggagggttaagtaacttgctcagccttcacagctagtaaatggacaagccaggacgttaacccaggcagcctataaaaaagcttctgcttcagtccagcagacacagattttaaacatagctgtgagtcacgtcacgagaaggttgtctgaggactctgaacctattcggctccattctcccttgagatctaagaggacaaatctggcagcatcctaaagaactgggagggtccaaaggaaatataggtcagttgactcactcttcattcagggatgagataaatgaaacctatgaaaagattccaggggaaaaaaaaaaaagaatggcaaaaagtaccttaagcaaaggaaaaagcatatctgtgaaaaggacatatagcagatgagaaatatatacaggtttttctgrtaaaatatggtgggtttacattttcacaggccatgacaaagcctatgtgagagaaatagcttctttacttttctataacctgctttgattcttttctagattccacattctggccaggcgcagtggctcacgcctgtaatcccagcactttgggaggccgaggtgggaggatcacttgaagccaggagttcgagacctgcctggccaatatggtgaaaccccatatcttaaaaaatacaaaaaatagccaagcgtagtggcacacacctgyaatcccagctacttgggaggctgaagcaggagaatcacttgaacccagaaggcggagactgcagtgagctgagatcacmacactgcattccagcctggccgacaaagcgagactttgtctcaaaaacaaatccccaaaaacatagattccacattctgcctaaaggtaaaaaataatcatcatcatctcaggcagtttcaggtaaacacaggctctttagaatttgtttctgctgatcgattcaggtttaaattaaatcacttcgaagattccgcctacccctccttctttctaaggaggcacttatgttctcggggtggagaaatctgatgtagcttcatggcattggagagaagtcaaatctgaagttgtttccctttccttcttgtctttattcatcaatgtgtatcccaattggcatctagtgtgttatattatgtcgtttccagttgaaggttgatgtcaaattccacagacacaccctgtcaccatcatgatgcagcccctccagggccaccagccctatctgtctttctggccctgacttggggcacaagaaatttcttatgttctcgggaagatgtcttaggtcttctttacttgatcatctcttactatcttgtctcctatattctttatataacctgttagcaagaaaagaattctctacaaggttagaaagcacccctggaaaaggaagtacaatttgtcctgtttccagatcactagaactctttaggggttcttttgttcacccagacgtctcatggggatacatctatgtctaaaagcatccaagcctaagcttttcccctctataaatctccctctcagccaagtgaaaaaatgtgtacctgattggggaaggtggccagtgtctctgtttattctctttccaaaactttgttaatggcacaaatttatgaaaccggaaaaaaaatctctttcaaaagtcccactcttgccatatcttgtcttggttttaagacttttgtcttttctgagttttagagctggtcccctcttgaggcaaaaggaaatttcaaatgctctcaggaagatatctcaggtcytctttacttggtcatccaagcaagattctgaatcttgctttttatattaggttgaaggtgatactgctgactgaatgaacgggaagaagggcatggaggagtgcacccttgttttattatttaaaatgtaatcctactaaaaagataggaaaggtaagtctaaacaaaattgcagatatcaagaaaaaataggcaaccaggtgcagtggctcatgcctgtaatcccagcactttgggaggccaaggtgggtggatcacctgaggtcaggagttcaagaccagcctggccaacatgatgaaaccgcatctctactaaaaatgcaaaaactagccaggcatggtggcgcatgcctgtagtcccagctacttgggaggttgaggcaggagaatcccttgaacccaggaggcagaggttgcagtgagctgagatcacaccactgcactctagcctgggtgacaaaacaagacaaaaaaaaaaaaaaaagaaagagaaaggaaggaaggaaggaagataaaatatataaaaatcaaaatataaatataaaaactgaatttatttaaggcaataagaaaagaatcaattctacagaaaacaatatacatgatataggacacaaacaagaaaagttcattagaacacagactatatagagataacaactgaaatgcaagataaagatacagaaaattaattttaaattaacaatcaatgttatacataaccgtgtaccataaaggcattttcaataaaatcagaaatgtgacaaaaattaccatcttcactatttttattgcttccaaaagttctgaccatgacaataaaaggaaagagataagattaatatgtaaacagctaagagataaaactaaggaacaaagaaaaattaagaaaaatctctttgaattaatgtcaattttagaagtcccacataatacatatcagtattttttttaattccagtcattacagtagatgacataattggaggctgggttgattcataaaggatgtaaaaatcataaaatactaaggaagaatcctaacaacaatgatgtcagaaccacatgaagaaaattataaaagttcactttgtgctcttaaaaaatttaaataagtggagcgtcttaaattaaattgaagtttaaaagcaagaggtcaggatatgaggttgaaaagtctgggaacattagcatgtcaaaagcgtgagggagagaagagaggctcatcagaattagaaccagaagagtatagcttcacagaagccacaggaagcaggrgtgcaatgagaccaagagagataaaaacaggaaaaaagccatcaaattttataataaaaagcagacaaggtgattgcttgtagaggaagagaacagctaccatgcccctaactattcagtgagtaacagacacacaaaaacaaaacaaactctgctactatagagttttccaacttatacctccttattgtacaaagttggagaagtatatcaaagaccttttttttttgattaatgtttaggttcagagattggatttaacttttgttttcatatgcacttatgaaataaccttcttgtccaaatgaggaattcttcctttcagacaaaacgcaaaatccacttcttaaatatttttaagagactagtaggcttcccatattctcatctggtttccaatgttaaatcagcatttggtccctctggttccccacagaacctagttcagataaagaacattaagaaattcctatttccttcttcccgttactgggaaaaagctcaaagcctagatagagtcacattgggtttttcctttttttaattatccctgttttcttccttaaaatattcttattcaatagttgtaatgtagccttcacttttctaagctgtgtttttgaaaggaaacatcaaccacattgcatgcacatacatacatacatacacatacaatacatataattgaacaaattgccacttccaccaaggctaaggaaaagcaagataaactaccatgtcataaatgttcttaaacccatcaaagagctgaggtcacacgtaaacaagtagcctgaaatcctaagaaagacaagctcctccaggacgatgtgggttgtgagcactggaggaagaggcatcaggctccatacagttaaaagaagaaatcagctaaaccttttaacaaattgctaaaggccaagtgtaggctagtgtgtgggtgcagaaccccagaagctgcaggcacaaagggaactcctacccagtcacaggctcttttccacagacctttactgggtgcccacgagaaggatcaaggacagagctggagacaggacagagcctctctaggtggtgtgagcctggaggatgggccacttcaggaaaaatattaagcaccatctggcctgcccctgttatggaacaaaagccttaagccgatagagaaggagcagcaaatcgtgctgcccctaggcacaagtatgacccattttggttaaggaaagaatacaaggaaaaaaaacaatctccatacctgggtgaggggtacaaaagagtcctaagtccgagatcctacaccaataccattagatgtctcctaccacaaggggatggacgagaaacmatctctcatgggagatctaccagatgcaaggcagaatttggttgacactgggaggaggggcaggatcacagagcaagccccactcctaagatccagasacacagggcctccctaagactattggggggccaggacaatggaraacctcttcgctgctccactcccgtcggccttataagcaccaggtaacaagcaatggcactctacttctgagtggggagagcaaggaagagctccctgtgtgttgcagacactcaaagaaagcagaaagctgagggtggagcagggacattgagacacgccctttgataccatagcccccacctacacacaaggtagcactagaggaatttgaagctagtaatatactgaggttaaccatagcaataacaaaacccaaacccagctcaacttctaactagattgaccaactccagcactgtaggcctactaaaagaagtgtgccatttccagacatagatactatttatcttagcccatactgtcctatccttgatatttgtgattcattaaaaaattatgagatgtacaaaaaagcatgtggaaaaaaaaaacatgatcaagaggcaaaattatcaactagactcaaatatgacctagatatyggaactatcaagcagagaagttaaaatgaccatgtttaatatgttaaaggatccattggaaaagctgagtaacagtcctgaacagatacggaatttcacagagagatgttgactstaacaaaaaatcaattggaaatgctatgaaaaagaaacagcaacaaacatgaacagtgtccttgatgggcttatcagtagagtcarcacagtygtggaaagaatcaatgaacttaataggtcaatagatattacccacctgaaagaaaagagtaaaaaaggagatgaagacagaacagagtattgaagagctgttaaacaatatcaaatgattgaatatatgtataattgaaatgtgagacagaatataaagagaaaataaggtagaagtattttaagatggaattgttgagaattttccaaatataatgaaagaatcaaagcaagaatccaatacactcataaaacctcaaagaatataaatagaaaaagaaatccacacacctacacaccatattcaaatagctgaagtccaaagatcagacatcttagattcagaagaataaagatgagaattttattttattttatttcatttcattttatttctgggatacatgtgcagaacatgcaggtttgttacataggcaaacatgagccactgtaggttattgaacctatcaacccatcacctaggtattaagccctgcatgcattagctatttgtcctgatgctctccctacccccaccccaacaataggccccagtatatgttgttcccctccctgtgtccatgtgttctcattgttcagctcccacttttgaatgagaacacgcagtgtttgcttttctgttcttgtgttagtttgctgaggataaggactcccagctccatccatgtccctgcaaaggatgtggtctcattcttttttatggctgcatagtattccatggtgtatatgtaccacattttctttatcyggtctatcgttgatggacatttggattgattccatgtctttgctattgtgaatagcgctgccatgaacatacatgtgcatgtgtctttatgatagaatgattcatattcctttgggtatatacccagtgatgggattgctgggtcagatggtatttctggttctagatctttgagaaatcgccacacttttccacagtgattaaagtaatttacattcccaccartggtgtaaaagcgttcctatttcttcacagctttgccagcgtctattgtttsttgactttttaataattgccattctaactggcatgagatggtatctcattgcggttttaatttgcatttctctaatgaacagggatgttgagcttcttttcatatgtttgttagctacgtaaatgtcttctttgaagaagtgtctgtacatgtcctttgcccgctttttgatggggtggtttttttcttgtaaatgtgtttaagttccttktagattctggatattagacctttgtcagatgaatagattgcaaaaattttctcccattccataggytgtctgttcactctgatgatagtttcttttgttgtgccaaagctctttagtttaattaggtcccatttgtcaatttttgcttttgttgcaattgcttttgatgtttttgtcatgaaatacttgcccgtgcctatgtcctgaatagtattgcctacattttcttcyaaggtttttatagtttgggatttacatttaagtctttaatctatcttgagttaatttttktttaagatgtaaggaaggggtccagtttctttctytttttttagacggagtccccctctatcacccaggctggagtgcagtggcgcgatcttggctcactgcaaactccgcctcccgggttcacgccattctcctgcctcagtctcctgagtagctgagaccacaggagcccgccaccgcacctggctaattttttgtgtttttagtagagacggggtttcaccgtgttagccaggatggtctcgatctcctgacctcgtgatccgcccacctcggcctcccaaagtgctgggactacaggcgtgagccaccgtgcccggccaggaagaggtccggtttcaattttctacatatggctagccagttttcccagcaccatttattaaataaagaatcctttctccattgcttgtttttgtcaggtttgttgaagatcagacgtttgtaaatgtgtggtattatttctgttccattggtctatgtgtcagttttgataccagtaccatgctgtttggttactgtagccttgtagcagagtttgaaatcagatggtgggatggcttcagctttgttttttttgcttaggattgtcttggctatatgggcccttttttggttccatatgaattttaaagtagttttttgtaattctacgaagaatgtcaatggtagtttaagggaatagcattgaatctgtaaattactttgggcagtatggccattttcacaatatttattcttcctatccatgagcatggaatgtttttccatttgtttctgtcctcttttatttccttgaggagtgatttgtagttgtcctcgaagagatccttcacatcccttgtaagttgtattcctaggtattttattctctttgtagcatttgcgaatgtgagttcattcatgatttggctctctgtctattgttggtgtataggaatgcttgagatttttgcacattgattttgtatcctgagactttgctgaagttgcttatcagcttaaggagctttagggctgagatgatggggttttctagatatrggatcatgttatctgcaaacagaggcagtttgacttcytctcttcctatttaaatacgctttattgctttctcttgcctgcttgcgctggccaaaacttccaacactatgttgaayaggagtggtgagagagggcatccttgtcttgtgccagttttcaaggggaatgcttccagcttttgcccattcagtatgatattggctgtgggtttgtcataaatggctcttgttattttgagatatgtcccttccatacctagtttattgagagtttttttaacatgaaggaatgttgaattttattaaaggccttttctgtgtctattgagataatcatatggtttgacatcttcagacggctggaggaaaaaaatcaactcagaattcaggttaaaaacctcccaaaaccacagcaaataataactttttcaaacaaatgaaaggtaagagaatttactgccagcagacagtgctacaagaatggttaaaggcactcattaggcagaaacaatctataacagaaacttggatcctcaaaaagaaatgggaaagttgaagatatgtatgtttgtaaatgtatacagacacacacacacacacacacacacacacgaagggaaattatgtgagggtaaataaaaagactcctttcttaatgtttagtcatgctatgagatagttgactgtctaaaggaaaastagtagcattgtgttgctggtttatagcatatgtaaaggtaaaatttttgacaacagcagcacaaaagatcagagagaaacactggaagtatattggtgtgagactcctaccttatatataaagcagaataaaattattcaaggataaactacaaataatgatgaaagtatatcataaatgcaataggaaaaaatccatatttaaaatttaatttaatttaaaattaaaattaaaataggaaatgttttctatagaaaaaataaatgtttaagaaacmtaaacaagagatcaatagttgaggaaaaayagaatgataaaaattatttaattaaaaaaaacagaaaaagagggaaaggggaaagattaacaaacagaacaaatagaagacagctagccagatgttagattttagtctaaacatagcagtgacacagatgtcaatggtctcaacataacaaatcaagacagatcatgtcaactcaaacaaagcaaagcccaactacacagttcrcatgaaacccattttaaaataaagaactaggttaagagtaaaaggatgaaaatatgtatatatgtcatttaaatatatatrgcayataaatgtaaaaaaatacaccatgtaaatgttaattaaaagaaatatatatgccaagaccagctctgtcatggagaccctaacccagtggcactagaggaattaaagacacacatgcagaaatatagagytgtggagtgggaaatcaggggtctcacagccttcagagctgagagccttgaacagagatttacccacatatttattgacagcaagccagtcataagatttactraaagtattccttacaggaaataaagggatgggctgaaataaagggatgggtctggctagttatctgcagtaggagcatgtccttaaggcacagatcrctcatgctattgtttgtggtttaagaacaccttaagcagttttccgccctgggwgggccaggtgttccttgccctcattctggtaaacccgttgtgggcatcaaggccatcacaagcatgtcatagtgctgcagagattttgtttatggccagttttggggccagtttatggacagatttgggggcctgttcccaacatatatataaccactggagcattcgataatctccacctttcaaataaatgaatttggcagaaacaaccttcttctgagatatatatatgtctcagaatgtgtgtgtatatatatatatgtgtgtgtgtatatacatatatgtgtatatataccgtatatgtatatatacatatatgtatatatgtgtgtatatacatatatgtatatatgtgtgtatatacatatatgtatatatgtgtgtatatacatatatgtatatatgtgtgtatatacatatatgtatatatgtgtgtatatacatatatgtatatatgtgtgtatatacatatatgtatatatgtgtgtatatacatatatgtatatatgtgtgtatatacatgtgtgtttgtgtgtatatatatatatatctcaaagtagacttcagaactaaaatattaatgaagatgcagaagagtattaaataatgatgtgtatgcacctaacaacacatcttcaaaacacataaagcaaaaactaatagaactaaaaggagatataaacaaatccacaattataatggaaattttaacacttctctctcagtaagtaatagaactagtagaaagaaaatcaataaggatatagaacttaacaacacaatcaacaaacttgacctgacttaaaaagaatatacattctttttaagtgcatatggagcattcaccaagagagatcatattgtaggctataaaacaaacttcaacaaatttaaaagaattagaaacatacaaggtatagtctcagaccacgatggaattaaatcggattaaaaaaacaaaaacagaaaaatttcctaatatcttaaaattaaataacacagtgctgagtaacccattaaaaagtcacaatgggaatttaaaaatcattttcagtggaattaaaatgagaacacaacatatcgaaacttgtgggagacacagctaaagcagtgcttgtaggaaaatttatagcattatatgctgatgtgaattgaataagttttcagtcaacttagttagctaaagtaattagtaataatgccgtttttatttagcaccttccggtttagagcacagtttttttcatactttgttattaggtctttacacagaggtaatgaagacgaggggagcaattgaatgactaaatctaaaccagctttagtgctcttttgggatgccttttgaaccttctttttctcaaatttgatccagcagcttcccaaagtccttcatcaccccactcccgtcctaccacatgcttatcctgctctgttcccatgtcaaaactttatcacagctcagattgtccccacaccagaaagaagcagagttggacattctataatcttcacctttcaaatacatgaaaggtagttatttgacacgaacaacctctttttctgtttctgcccagtttaggttttatttatgttaccaatttattaagtcaaaccaagttgagagcaaagtcaataatcactttcaaaagaagttcccacagtaagcaaaatagagataattgaaaaatcaaaaggaaatgaaaatagaaagagctgtgaaacattggaagaagagggagttaggtcagagacagcagcagaactataacttcagattgtttgactggaccggataattgtgttctgaggttatctaaagaaattcctctgtgtttaaaggggaaaaatacattttgtttccttctgggacaaagacggaactcaagcagggtgagttgtcaacaagaagtcctgtgatttggaagctgcatcaaaggaacacagacttgtaaagtttgtaaaacagatattggcagttagaaggttttgctctcaaagtatttcctttccctgggtcagtccagtctatttctaaaaatactgtgtgacaactctggatgtagactagatctaaacttagtcttgcccaaaatgtaaagaaagttyctcctgtgataagragggaataaaggcttcctaggtaacaaacttctgacttaagcaggttttgctgaaaacttaagcaggttttgctgaaaaggaagcagattcctcagtgaagatattagcatgtaagtgaatcagatgctaatgcatataatcactgcttggtagaaataatcaaaccccaagaccacccacattttttttctgccttggtgacttgtctgtgcagtaaataattagcttcttgatttttwaaaaaggctgacaattagattctgcaaatagtatttccccttaccttttttatttacccacttaattctaccattcagttgcaccaagactgcctgtcctgcctcggtcattttcttttggtatatataaaataatatagaataatccattctattttcatgccacagaagtacagaaaacctccctggttnnnnnnnnnnnnnnnnnnnnnnnnnnnnnnnnnnnnnnnnnnnnnnnnnnnngtctaaaaatcaaactgacaaagacagattgataggagaaaagcatgctaatatacttaataagcgttgcatgacatgggagtctttatcaggaaatgaaagcccaaagaaataagtaaccccatgtatttttatgctaagtttggtaaataagtagataatcgtggagaagtaagattagacaaagggagaatgatctcatggcaataaactggagggaactgagcaaggcctgtttgtgcagattcttctgtgtccctgagtcttagagataacgatgctcctgtcctgtgggtatagggtggacacctytcacacgagggtcataggagagaaagagaaaggggtaggagaaggtcagagagactttcctgcttctgtgcttttctcaaattctttcagcttaaaatattaagtatgccaagaggctattatctggcccttgttctgagccctgtcgaaaacaaatctaaatttttaacaatggaaagattgttaaatgagttatggtaaacaatcatttttcctataaggaaaatccttagtatagttaaattaaaagagaaaaaccyacaggattcaaattcaaatcgtgaatgctactataaccactgcgtgctgcaagtcattatgctaagacaccaggttgcagcagagaaggaagtttaatcacagggctgctcaaacaggagatgggaggaaacctcaagtccatctttttgaggagtttgggggctaggatttttaagggttttgggagattgttcccactccatcccgcttctggctcccatccatcttctggagctacttccaccactcaataaaaccttgcactcattctccaagcccccgtgtgatccgatttttccagtacactaaggcaagaaccccgggaaacagaaagccctctgtcctagagataaggcagagggtctcattgagctaattaacataagccacctgctgacggccaagctgaaagagcaccctgtaacacttgcctactggggcctcgggagctgtcaacactcaaccctagaygctaccatggggtcagagcccaygctccccatgacctgctcatctgcatgctccccctaggaattttaactctagggcacsaaagaagcaagccayaccccatcacatgccctgcacggaggaaaagggaacttttctagtttcacgaagtaactttcagcaacaaggaaatggatcaaagtacagcatgattaatgcttcattatatttctgtccaaattcttggtaaccctgtaagaatggcttcactatgattccaattagagagttgatagatatcagtagaaataaaaatatatactgacgcatatataaatgtactttaaaatgatatgtaccaaaatgttttctctacttggttaattacatgtaatttttttcatattttctgcaggaaacattcattacttttataataaagaaaaagacacactgtttttatagaaagaggaagatgagaaygragtagaagtgctttgtccctaatgtaacgagcagaaattaaaacaaaatattacaaaacaaaacaaaattaaagtcatttggtcaaaaaccaaaacagcagaatttataagatcaaatccctgttagtgcattaatccttacaaacacttatgtggaataattggggtgttccttctttgaacaactttctactctaccccctaccaatagtaggaatcacatgtacatttatctcttcattagcagaaatgatcagaatttctgacttttgagtttgaaacctttgggggatcatagcctgaaacggccatggcagtgaagggagctacataactagcaaggccccgtgcaaaatgaaaaggcggggacccttactcaaaaattgttaaggatttcagggtagctacagcagagcattaaaccaagcttggggtccatgtgcattacagcaaacacatggggccccatgtgactgagcagcggcacgtcaatgaagccagccttagcaaagaagccagacagacctcaactggaatctttcttgttctgacaccagttgcctgaatttcacaacgtacttgcctgaatttcacaacttacttaacctgtcagtccctcagtttccctatctgcaaaaatggagtgtaggggccaaaggaaaacttccccttcatcctaagggttactgaaaaatcagctcaaaaaggcaggttaataggagaaaagatatgcaaatttactagcatgcatggtgggtggatcgctgaatgattacccccaccatggaatggggtactgatggttatacacccttcttttttttttttttttttttttgagacaaagtctcactctgtcacccagactggagtgcagtggcacaatctcaactcactacaacctctgcctcccaggttcaagtgattcttgggcctcagcctcccgagtagctgggattacaggtgtgcgccaccatgtctggcaaatttttttttttttttttttttgagatggagtctcgttctgtcgcccaggctggagtgcaatggtgcaatctcggctcactgcaacctccccctcccaggttcaaggaattctcctgcctcagcctcccaagtaactgggattacaggcatacactgccacgcccagctaatttttttgtattttagtagaggcaggatttcaccattttgcccaggctggtcttgaactcctgagctcaggcaatccactcgccttagcctcccaaggtgctaggagtacaggtgtgagccactgcacccagcctttttgtatttttaatagagacagtatttcaccatgttggccaggctggtctcaaacatctgacctcaggtgatccgcccacctcagcctcccatagtgctgggattacaggtgtgagccactgagccaggcctctatacccttcttcttaaggaaaagggaaatgggaaagtgtgaatgattttaggagcrtagtaaatgatttttagggaaaaatgactggacttgaagaatatacaatggcctgggacaaagtctgttgggcccmcagagcagacaacagctgctaaatgattctctttaaaataccaaatgggaccaaaacagaaggcaatggttgatgacaagtttgtcctggtgcattgamagacttcagtctttcttcctccaatatragttaagttaatgaaaactcagggaagggatcaaggtaattgttggcttctttggcaggtctggactataagcagatgagacaacttcatcccttactttgygagagagagaggattgaaaggtgggtgagggatgggtcagagagaccttgtgacttcttcagttcagcatgtcaaagcaccatattttggggtatcagtttctgagccccaacaggaggcacactataggagtcttatacaaacagagtaagaagtataagaaaattcctctttttcacttggcccctctgaaggtttgttggaaggtcaactgacaaaggcagattacttttttttttttttcctgagacggagtttcactccttttgcccaggctggagtgcaatggcacaatctcggctcaccacaacctccgccgcctgggttcaagcaattctccaaggcagattaattttttaaaagaaaaggcattcagctgggnnnnnnnnnnnnnnnnnnnnnnnnnnnnnnnnnnnnnnnnnnnnnnnnnnnnnnnnnnnnnnnnnnnnnnnnnnnnnnnnnnnnnnnnnnnnnnnnnnnnnnnnnnnnnnnnnnnnnnnnnnnnnnnnnnnnnnnnnnnnnnnnnnnnnnnnnnnnnnnnnnnnnnnnnnnnnnnnnnnnnnnnnnnnnnnnnnnnnnnnnnnnnnnnnnnnnnnnnnnnnnnnnnnnnnnnnnnnnnnnnnnnnnnnnnnnnnnnnnnnnnnnnnnnnnnnnnnnnnnnnnnnnnnnnnnnnnnnnnnnnnnnnnnnnnnnnnnnnnnnnnnnnnnnnnnnnnnnnnnnnnnnnnnnnnnnnnnnnnnnnnnnnnnnnnnnnnnnnnnnnnnnnnnnnnnnnnnnnnnnnnnnnnnnnnnnnnnnnnnnnnnnnnnnnnnnnnaaaaaaaaaaggggcattcaaatctattaacatgcatcggggagaacaacagggtgatgaattcccctcatggggctcagaagcttatatatcaccttgaggttacagaaagaatggtggctcacaggatgagcaaaaacagcctatagtagtaaatcgggttatcgtggcaagacaggttatgggagggagagaagaggaggcctggctagcaaagggggtcttgttctatagatgaaacttcccagggagcagcccgcagaaagaagagatggtaaatgtttcttttagacctttaaaggtatcagactctgttaatcttttcctagatccaaacaaggcctcagagaaagcctggctgcatcaatgcagattctctacagatgcagatctctgcccaacagagagctttgcagctattatcatgtttccagcccttcctgaatagccattttgaaatatgtcaaagaactatattttggggtgaaatatttttattttctccaacagaaaataagaaaaacaaacattctaaaaggtcctgctcatttctttaatttatatttaactttatcattaataaaatgatagcrttatcattaagaaatgatttattagttatcactgataaaatttcattaagacccatagtgtagcacagtgaaataaaatttaacattaaatcatggttccccagaagcaaattttataaaggaaagcactgcaatatgtctatttttaggcataaagaactctgaatctgttgttccttccctcacttcatattcttggtaaataggaacatagctctttcactagacgtcatcaagctagatgtcagactctgggatgaaacccagaaatttcactgttaacaagctagtgattcttatccatgttaaagttagacaaccacacccatataacatctatctaatcatgtgggaatagatgaaagatgagtgatttagtgagaccccgaatgtataaggaagagcttgctttcctgcttnnnnnnnnnnnnnnnnnnnnnnnnnnnnnnnnnnnnnnnnnnnnnnnnnnnnnnnnnnnnnnnnnnnnnnnnnnnnnnnnnnnnnnnnnnnnnnnnnnnnnnnnnnnnnnnnnnnnnnnnnnnnnnnnnnnnnnnnnnnnnnnnnnnnnnnnnnnnnnnnnnnnnnnnnnnnnnnnnnnnnnnnnnnnnnnnnnnnnnnnnnnnnnnnnnnnnnnnnnnnnnnnnnnnnnnnnnnnnnnnnnnnnnnnnnnnnnnnnnnnnnnnnnnnnnnnnnnnnnnnnnnnnnnnnnnnnnnnnnnnnnnnnnnnnnnnnnnnnnnnnnnnnnnnnnnnnnnnnnnnnnnnnnnnnnnnnnnnnnnnnnnnnnnnnnnnnnnnnnnnnnnnnnnnnnnnnnnnnnnnnnnnnnnnnnnnnnnnnnnnnnnnnnnnnnnnnnnnnnnnnncccacttctgagtctccagtgcccattatgccactcgctatgcctttgtgtacccatagcttagctcctacttataagtgagaatacagggtatttggttttccattcctgagttactttgcttagaataatagcctccaactccatccaaattgctgaaaaagatattattttattctttgtatgctgactagtattccatggtgtgtgtgtgtgtgtgtgtgtgtgtgtgtgtgtgtgtgtgacattttctttatctacwcattggctgatgggcactttgcaatggtgaattgctcacattgcttttctgtctctccttgtccccagctctccacaagccaatggatgctgagtggacagcatatgcctaatgaggccagcagcttaggcctgccccayctatgctgggctatccttaaatttatgtgggaagtccgtgctctgatcacccaccaccagcgtgggctggacttcaggtgtcttctgccaatgataatggttttttcttcatcaaaccacacttcttcatctaagggttatgaacaagagtatctatttgtaaaacagtcaaagtttgggaatrtaaactgtggccataaaatagaaaaaaaaatgctaactagtccataatggggactgaatctgtggtctttttatcattatcacagggctataarcctgagrttggcaaaccatgtttcacttaagaatcctcaagtttcaaggraacatggactcattgatatatccattcatacctcccgtcttcctcccttgaaacctgcattctcccacccaagaaacatgattgaataccaggtttccagatcktgtaaagttacttcagagtaagttagatagatgaccagtgttttgtaaaactgtagcactcacactgatatatgagtttatggaacctctttgttcattttttatctaaacaatggaggttttgaggatttaattttrtctgatgtgtgaagtgtctagtgcctaatttcacattgattctttcagctgctctgcactttgttagcactcatttcaagagtaaccatggagagctattaaaaacgtccattcctaggtccctcgccggagattctctgtgtgctttatggtcatttgtcttacacttggccatctattcggtgatttctatttaaatataaatgtgtgtaacttccaaaagcttgaaaatgtgtcaagggttttctgagtcacattggctgttccaatgtggtcctgcctgtctcagttattgattgtaggtgcttaagtctctcaatattttagtgttactgttatcagttgtacagaataatctttctagaaggatatgtatgaagatagtaaagattcgatcccattgtaactctgctaaawctctaaagctttagtaacttatttccctgagaagaggtcccctttacccatggagtatctgtcgtttacaatgaatagaaaaaaactcttaaccttgtaaaccccatgacattttccacagcagtcwgactggtccccattgtctaggccatattccaccagaggcttcagcattctgcctatttacacagcctgtttaaattcctatgaagcaaactggcactttctatggttcagagctcttgagtaccgagtgccttccttcacagaatgcttaaatgacatgcaaagctttcctaatagtttgtttaaatttacatagggatttgggrcctgtatactcctgtcttaatccatctggtgttgctataaaggaatccctgaggctaggtaatttatttttaaaacagtttattttacccataattctaatatctgggaaagttcaagattgggcatctgcatctggtgatggccacaggctgcttctgcttgtggcagagggggagagaagccagtaatatgcagagatcacacagcaagagaggaagcagggtgggtcaggggggcaggaggatcttttaacaatcaactcttataggaactaatagagtgagaagtcactcacagctccccacccctgccctccgccacaaggagggcattaatctattcatgtggttccacccccatggcccagacaccttccactgagcaccacctctgacactggggaccaaatttcagtaggaggtttggtggggacaaacaaaccatatccaaacaatagcaactcctaaatggctgtttctcctagtatcacttcaagatttaggaagttaaacatgaaagtgaaaattgatttcaagcatggctcttctctacttagagttaacaccttttaaattggtgtcaccaaaaaaatcactgggtattttacttgtttgttgaatctcctttccttaatgtatttatattaactatgcatttagatgataaaatactgaaaggacaagatctgattgtttaaccatgaccctttgggtagcatagagtgaaggtcattcatttataaattaactcaactgatgcacactggaacccttctctgagcagaacaggtccctgctctagtagagctcagccttgcraagtaacaaacattgagccaacaagtacttaacatataataacaaatggtgataaatactataaagaggccaggcaccgtggtttacgcctgtaatcccagcaactttgggaggccgaggcaggtggatcacttgaggtcaggagttcaaaaccagcctggccaacatggtgaaactctgtctctactaaaaatataaaaattagccaggtgtggtggtatgcacctgtaatcccagctactcgggaggttgaggcaggggaatcgcttgaaccctggaggtggaggttgcagtgagccgagatcacgccactgcactccagtctgggcaacagagcaagatgctgcctcaagaaaaawaataataataatactataaagaaagaaaacagagtgttgtgagaaaaatgggaaaacagtttatataatgatgagattaaagtatttaaatcaaagcactagaccctaggctttagtaatgatcctaaatgctagtttgcctccaaatataggatgcaaaccctttattttccaaaatgtaattcttttgcattagggattttcatttatttttctctactttgcttatcaatatctaattttagtcaattccatacataaaaatatagttcctgtacttaaaaggtgtggattaggttttgaatgccttggtagaagaagcttttattctacctgtgtttaactcagttctagcaagtttatgccagatttaatcaaatgtacttgctacaataagctctttccatggcatataatttttttaaataaaatatatggtgtgtttttaaggagaaaagaaaaacagcacattgggaggaaactaaactgagctgagaaccaataaatgaagtttcagctctctcttctgcatttccaaaytgtgtggcctcacttcaatgagttgtatacttatttttgaggaaatgcaataggcattggcagacagagagcgagaaagggagagggagagggagagcgaccaagagttaactgcaaaagagccctagagctatagcggatccaggactgacaataagctccatgattcaatttcagacaacagattctgataaaacaacaacaacwactttagattcttctttaaataatcagcatttctcttgtaaagcaataaactcatgtcgtatttaaatacaagtgaacaaagaacaactctataacgagaaacagtgcttgccttgttggaaagaaataccaaagttgaatgtattgttgtctcacttattgttattattaatacttacgctctagataattaaatagcattctctgcctgttgttgttttctagcctaataatgccagacaaaaccagctgtctctaagttttgttcaatgaggtcttgtcactaaatgttgaccatccatattttaggcacagtgcacctgtgacttaaataatcaaactaattgggacccaaccacatttttcctatgtaaatgtagctgtagggaaatatgggtgctttcaaatggggtacagtagctaaaatattctctagttattggatataccatttatttctcttccagttggttgcatgattttttaaaattttgttgggtctaagaaaagaaagagaaagtgttatatttgctttctccctatttctttttacactgtagagaaaggttgacccagtcacaactcagaagaatasaactagctatcgtattaaagtgtttgaagatttcttgctgttactcaccagcacaagatagcattgaaataagaatgcatatctggagaaactgttgccactgatttcttaaaaaatgtaatgatgctaaaaaagcattttaatgtcaagtggctgcccccatgaagtaaacaagaggaaaatcctattggtgaatttcagtggttctaaagtagaaaaggcataagtcattttactgtcaagaaaactaatgagacaaaagctttgaccttcaaaagtttagattaatggaaaaaggaaagtgttgcaagcaagaaacaaagtttctttactagaatctggaagttttaatattctgatttgtcctgtgtgtgttaggcatggtgattcatccatttcttcagtaaacactttctgagtgctgactgtattccagtatgagatgtattcattctccagtgaaaacttacatttacatttttgggacaagaaagaacaagtttgagattacaatcggtctttatctgaggtcttcagaaaactgcatgttgtgtttgttcatttaggagtttacggtattggttaaactgtatgatcgtagatgagctatgatttracaccataaataaaatgttaacaacaacaaaaacagcaacaaaaactcattggacctgggtagaaaaggcagttggcatgatgacataagtggctgaacgatttttaaattctttatattaacattgttaagcttttggcaattgatttgccttccaaatttaagattaacattaaaatgagtttctaggggtcatgctgaaattacagaaaatctagaaatataaaacaattatttctgcaataatagattctccctccctcatttccttctaaaaattttcatttttatgaaaatttaagtgagagaaccttgctgcactccttcaagcccttagatgatgtataatcaaaatagtgtgtctagctagagtatgagaggtagaacctaagaaataatatatccatccaataatctatgccaaaaaaatttactgatgcacaaagacatgaatatacttacccaagtttaggcagttagtagaactaagtctagaatccatttatatcgcctcctagtttattggtctttattctacataaaacattttcatctactgtatgcatatgtcttgagtatgtcaagctttataaagtattgtggagaaagatgaatttcacttattttcttcaaaaccatctatccctatgaataaggttatctgctcatatataggctatgaagaatgttctccaatgtcttcatcttcacttcatgctttttgttgaaaatattgaccttgtttcattccttttattttcattttatctattttaaaaagtcttaattggttgtttgtggtatttaaattatcagagtttaaatagttagctaaacaaagctttactatgaataatctgactttcattgactcatttgactaaggatctccaaaatagggtgatgatatctaaatatcttctcctatcagtgtcaaatttttttctatttcttattgagcagctaatttattttttaaaaaacattcattggaaattaatcaagtttctatccacttagttttttgtaggtaaagaacctctgcttatttatttctgcctaacattaaaataaggtcactttgatttatgcattaaaccacttttatcagaactcttagatatgcttctacctcttttttcccccttcattatcctccgatagcactgcctgaaggtgacttccctgatttgaaaatgtaaagccagaagattaaaatgaattcatgtactctctggaagaacgtgctgttgatagagcattttaatatcttagttctcttcttactaaagtgtgaactcctaattccattttcctcttagataaacagctgtgtgtgctagggcttgcatagatttttaccttagagtctattttgcatgagaaactgggatttacgaagccctgctctttttcaaaaaattggttatgagttaagagcctggttactcagacttctacaggtaacagcacagatgtaagggaggaagcctagtaagcaggctgatgtcatcccgtttttctaagctcttttctttccacagtttatacttctcctctttcccatcccatcttaatctccttggtgtgtgtccatgattatgtgccactgtttcagttgaggaaactaagagtcagggaagatgagcttgcatgcagtcacactgtttgtaatggggagtccagattctaaatccaagtagacttactctgaagtccacgttctcactccaacattactaactccgggaccctatgcaacttacttaaattatcttgcctttgtctctttatctgtcaaatcaaggtgtaataataataccttcttcatgaggctgttgagatagttgagttaatacttatctataactcataacattaaaagtggttacaaaagataatgaaggtctggcttggtggctcacacctgtaatcccagcactttgggaggccgaggtgggtggatcacttgaggtcaggagttcaagaccagcgtggccaacatggcaaaaccctggctctactaaaaatacaaaaattagctgcgtgcagtggcatgcagccataattccagctactctggaggctgaggcagaagaatcacttgaaacccggaggtggaggttgcagtgagccaagattgcaccactgcactccagcctgggcaacagagatgactccgtctcaaaaaaaaaaaaagataatgrtgttgaaaatgatgatgatgttgatcgtgatgatgatgatgataatgaaaatgatgatgctgatgaaaatgaagatgaaagactgatttctaataggactgatacattgactatttaggacacatcacatctaagagaagccaatctcaatctatgaaaaaaaaaagtttcatcattaccagtgaagtcagatttcaactaaaaatgcagtgaaggtctttttttgtgcccctaaattatctgggctccttaaagtaattcttctaagagaaagtcttcagaaaaacatagactccaagtttttgctttatactgcttaacatctacacagaaccgatgctacctgtttaatattcaccattagcagtactgcggcctccaacacagacacacacagcatatgtcctcagcctctacaaggcagccacaggaaccaagagataattaaaatttagacacacatatatgagcacattcattatattctgtattttaaaagtacttttcagtggggaaagtgaccataagtcaaactgaaactcctctcttgaagtacagctctgagggggctgcaatatacttaggaacaatgggaactttgaattaacaaagttgaaattctctctgtaatgatgaatgggtatttgaacagagttagaaaatcataatgacaggctgcaagtaagaaggctytcattgtctcttccacctctccttcgagacaattcagacaaccagacccatccttttggacctattacaatgtcagagacaaacttttcttgcagtaagggatttcagaatagtgtcattatcgtacattgtgaaagagtaagcactaatataatgggactattattagaggtaattctaccttagaatgcggtgatggctgtgtagttttcctgagacgacgctgacaaatgtttcttgggaactgtgggagagggcactgccctgggaagtcggagatttgaaatcattaaaggaaattataaagcattttgaatagcaaatcgatcaccragcagaacttaagataattacatttatcattttgatgtgcatattattatttcctatgaaaagttggttatattaatatttaattttcccaaagaaagattccaatccagaccacagatttctcaataatttgggtttttcaataaatattttagttaaatatttgaatacacacacacacacacgtatatctttatataaagttttagcttttaaatttatattttcccatttctaaaaatcaattctaaggaaataagtcaaatatttatttcatagttatagaattatatataatagtgaacatgtaaatatcttgaatagacaaaaataattatttactctgtctcctacatttgcttagattatctctgattgaaaaatcacatttctcataagttactaggggctccaaagaagcaaatctcagttgagtagagatgagaataaaggttgccttaagacaacaccagcttttgagatggggccagtttccgatgattcttatgtccactaaaatctgagaaataatgaattaatactcacttttttattttttaatagaatatgatagatttctgagaggcacgtattaaattctctcaacacgacttttaacttcttatacgtattgtttttacttcatataattaaagagctctttcttgtttacgtttatgattattatatctttgtggatccaacctttttatccatatggaaatgcttcttttagccctgtttaaggctccttgccatgaattctattttatcttatattaatacataattaattaataaaataaagagagttgcttttctgactgctgtttctcttggcatggatcttggaaaatgaagaactgttttatagttatcatatatgggaaaaactgttatgcaaaaaaaatatacttttataagtaacttttatataacttctttttacttgaattttccaaaaccgatattctcttttcagatgttgattaatcagtgtgagtttccgtggtgtaatagtgagcactctggactctgaatccagaggttgattaatcataaaaaaaagatttctgtggaggtaccaaaaaactctagtatttagctgttgtgaaaaaagttgggtagaaaatgcagaattaggccagatgcggtgactcatgcttgtaatcccagcactttgggaggctgaggtgggcagatgacctgaggtcaagagttcaagaccaacgtagccaacatgatgaaaccctatctctactaaaaatacaaaagttagccaggcgtaatggcaggtacctgtaatccctgctatgcaggaggccaaggcaagagaattgcttgaacccaggaggtggaggtttcagtagatgagatcatannnnnnnnnnnnnnnnnnnnnnnnnnnnnnnnnnnnnnnnnnnnnnnnnnnnnnnnnnnnnnnnnnnnnnnnnnnnnnnnnnnnnnnnnnnnnnnnnnnnnnnnnnnnnnnnnnnnnnnnnnnnnnnnnnnnnnnnnnnagaaacaaatgaagagataaattggccagtgtattagtccgttgttacattgctgtgaagaaatacctgagtactgggtaatttattttaaaaagaggttgaattggctcacgttctgcaaacggtatgggaagcgtgatgctggcatctgctcagcttctggggaagcctcaggaaacttacaatcatggcagaaggtgaagaggcagtgggcatgtcacatggccagagcaagagcaagcgagagcatgggggaggtgccacacacttttaaaacgcagatttcacgaaaagtcatccactgtctcgaggacaataccaagggggatggtgccaaaccattcattagaaacctgcctccatgatctaatcacctcccaccaggccccaccttcaacattggggattacaatttgacatgagattttgtgacgacacatccaaaccgtatcagtcagtatgacttgcactttacaacaaagaatcatcaatccccaaggcatgattttcaatgtaatttacaatgatatgtgagggaccccaattctcatccttactctcattcacttaatcaagaaatacttattaagtactgactatgaaccaagtgctttgaatactttatatcactgagaatttcaaggaaaaaatgcctttgctgtggaagaacttacactttagtaggataaaaataattaccatttcttaagcacagtcatgattgtgctgcatgccaggtaatatctatctatatactctcagagcaatcataaaatgtaaatagctctaaccccaaaaggacattgaaacygagaaggctaagtaactcaatgaaggccatgtagcaaaatactaaagtaagcctatctgactccagaactcctagccttgccactaagcagcacttcttccacattaagctctactaataatcagagagacaacaagcctgcaagtcacttaatttctgttgtctctgtttcctcacctgtacgcgtggacatcggattggatgttttctaaggtgctccccagttcctggcttttacacatttgacatgttcactgtagttttaccaacacacagcagatggcagtacagagcaagaaccggctaacctagctgcttctcttcaggtccctrtgattccaaaaataatgatttctcttcatttctattatttattaggtattacatagtcactacaaatgtaaaaacatttttatacaataatgtatactataaagcatattttatgcgttaaraatgcatagttatgcatcatgtttattaatatccaaaaataatctaaacatctaaatcagttcatgatattgttggtatattaaatatcacaaaatcagaagactaaagttatggtttccaaatgtaaatatatgkaaaaatrtatgacattaatatatagtatatatcattatatataatatgcataaatatgcctacrtacataaacatatgtaacattataatatagtttaaaatttatgccaaaacacaaagtgtattatttattcattcattcaatatttattgagcaactactgagtaagtcactattacaagcctagagatacagtagtaaagaactaatcctcccctcatcaagcccatattgcattsaggaggcaatgattgaataaaaagagagaagattagtgtgtatatagtatgccayatggtaataaatgcaaaggagaaacaaaacagagaaaaggawtatgtctaaatgagaaggagggtgtgctttkatcattttatatatataagtrtaatacatattatgtacactatgtgtgtcaatggaaacagtcaaactctgtaaaatatttgaggttgattctggccaaatatgagtgaccagggcccaaggcacagtctcaagaggtcctgagaccatacaaccaaggtggttggtctacagtttggttttatatgttgtagtaagacataagtcaatacatgtaaggtgtacattgattcggtcaggaaaggggggacaactagaagtgaagggaggaggttctaggtcatargtggattcaaagattttctaattggcaattgcttgaaggggttaagttattaatattatctaaagacctggaatcartagaagagagtgtctgggttaagataaggggttgtgttatgcaggtgaagcctccaggtagcaggtttcagagagaataggtcataaaagtttcttatcagacttaaaaaaaaaaatgccaaactctcagttaattctctcctgggttatgttrgtatcttattgctacaaagagtctgctttggcagtctcaagatgtctgttttaatgttaacgctggtcaactgtgcctgaattccaaagggagaagtatataatgaggtatgtccaacccctaactcccacttcccattgtggctttaactacttttccttccttccttccttccttcctccctccctcctttcctcccttcctttctttcttttttacttttatttaakttcaggggtacaagtgcccatttgttacacaggtaaatttgtgtcatgggtgtctgttgtatggattatttcatcactcaggtattaagccccgtacacattagttgtttttcttgatcctcttcctcctcccaacctccaccttcaggtaaggcccagtgtctgttgttccccactatgtgtccatgtgttctcatcatttagctcccacttataagtgagagcatgtggtatttggttttctcttcctatgttaatttgctaaggataatggcaccctgctccgtccacgtccctgcaaaggacatgatctcattcttttgtatggctgcatagtattcccatggtgtatatgtaccacattttctttatccagtctatcattgatgagcatttagattgattgcatgtcttgctattgtgaatagtgctgcaatgaacattcacatgnnnnnnnnnnnnnnnnnnnnnnnnnnnnnnnnnnnnnnnnnnnnnnnnnnnnnnnnnnnnnnnnnnnnnnnnnnnnnnnnnnnnnnnnnnnnnnnnnnnnnnnnnnnnnnnnnnnnnnnnnnnnnnnnnnnnnnnnnnnnnnnnnnnnnnnnnnnnnnnnnnnnnnnnnnnnnnnnnnnnnnnnnnnnnnnnnnnnnnnnnnnnnnnnnnnnnnnnnnnnnnnnnnnnnnnnnnnnnnnnnnnnnnnnnnnnnnnnnnnnnnnnnnnnnnnnnnnnnnnnnnnnnnnnnnnnnnnnnnnnnnnnnnnnnnnnnnnnnnnnnnnnnnnnnnnnnnnnnnnnnnnnnnnnnnnnnnnnnnnnnnnnnnnnnnnnnnnnnnnnnnnnnnnnnnnnnnnnnnnnnnnnnnnnnnnnnnnnnnnnnnnnnnnnnnnnnnnnnnnnnnnnnnnnnnnnnnnnnnnnnnnnnnnnnnnnnnnnnnnnnnnnnnnnnnnnnnnnnnnnnnnnnnnnnnnnnnnnnnnnnnnnnnnnnnnnnnnnnnnnnnnnnnnnnnnnnnnnnnnnnnnnnnnnnnnnnnnnnnnnnnnnnnnnnnnnnnnnnnnnnnnnnnnnnnnnnnnnnnnnnnnnnnnnnnnnnnnnnnntacttttgcttttgttgcaattgcttttggcatcttcatcatgaaatctttgactgtgcctatgtcctgaatggtattgcctaggttgtcttccagggtttttatgatcttggattttacatttaaatccttaatccatcttgagttgatttttgtgtatagtgtaaggaagaggttcagttttagtcttctgcatatggctagccagttatcccaacaccatttaagagtatcctttccccattgcctgtttttatcaggtttgtagaagatcagatacttgtaggtgtgtggtcatatttctgacttctctatgctgttcccttggtctatggtgtctgtttttgtactagcaccatgctgttttgattactgtagctttgtagtatagtttgaagctggggagcttgatgccttcagctttgttctttttgcttaggattggcttggnnnnnnnnnnnnnnnnnnnnnnnnnnnnnnnnnnnnnnnnnnnnnnnnnnnnnnnnnnnnnnnnnnnnnnnnnnnnnnnnnnnnnnnnnnnnnnnnnnnnnnnnnnnnnnnnnnnnnnnnnnnnnnnnnnnnnnnnnnnnnnnnnnnnnnnnnnnnnnnnnnnnnnnnnnnnnnnnnnnnnnnnnnnnnnnnnnnnnnnnnnnnnnnnnnnnnnnnnnnnnnnnnnnnnnnnnnctgaattttgctgagttgtttagcagcttaagcagcttttgggctgagactatggggttttctagcaaataggatcatgtcatctgcaagcagggatagtttgacttcttctcttactatttaaatgccctttatttctctctcttgcctgatttccctggccagaacactacgttgaataggagtgatgagagagggcatccttgtcttgtgccggttttcaagggaaatgcttctagattttgcccattcagtataatgttaactatgagtttattatatatgttgcttattatgttgaggtattccttcagtacctagtttattgagattttttttaacatgaatggatgttgaattttatcaaaagacgtttctgcatctattgagataatcatgtggtttttgtctttagttctgtttatatgatgaamcacatttattgatttgcatatgttaagccagccttgcatcatggggatgaagcctacttgattgtggtggataacctttttgatgtgcttctagatttgatttgtcagtattttgttgaggatttttgcatcaatgttcttcaaggatattttcctgaagttttctttttttgttgtatctttgccaggttttggtatcagggtgatgcctacttcagggaggatccctccttattaattttttggaacagttttagtaggaatrtactggctcttctttgtacatctgttagaattcatctgtgaatccatccagtcctgggcttttttttattggtaggctatttattactacttcagtcagaactgattatgagtctgttcagggattcggtttcttcctggttcagtctagggagggtgtctgtgtccatgaatttatccatttcttctagattttctaagttatgtgcataaaggtgttcataatagtytctgatggctgtttctatttctgtggggtcagtggtgatgtcccccttatcatttctgattgtgttcatttgaatcatctctctttttttctttgttggtctcgctagcagtctatctattgtattatttttttcaaaaaaaatctcgtggattcattgatcttttgaatggtttttcatgtgtctctatctctttcactgaactagtttttcaaattaactttggaatgtccttggctgagaagaggggtccattcagttggttgaggggcttagaattttatttttgatctacatatatatatagttttgtgataagaactgattggagggtgtaaaagatatatgagatrctgtccttttaatttaaatgagaattcattagtggaaaaaaaaagacaaaacctaagtagtagattatatggtacagatgatttctctagaatatcagatcaatgacaacaaagcttttaactgatgatgccagatgctaaaagactgagtaagttttagatccaggaggacatgccaggtgggtgaaactacattaggaaacacttggatttgagaatgaattgtgggggccataggctctcagccccttaaagattcactaaaaattgctgacatgaggtggattgattaatagaaaaatgggctacaaatttatttaatatgcatacatgggagccttcagaatgaagacccaactacctaatgagttacagaaaccaccctgagaccatgtaaagaatgcagcctcagagcctggccagaaacaggtaaatcagctttagtggcaacaggttaagagagaaaggaaggaagaagcttgggtagcaaggtggccttgttatgtagatgaaggctcccttagtgagaatagatagtaaatgtttcttttcagatttttataggtataaaactctttatctctcctagatctgaggaaagrcatggaargtagagggggtatgactgcattaatggagattctctaaaaatgcaaatttgccccacttaagacagccttgtaaggccacttctgtcagggtggccaaccaatagctgtttcaaaatatgtcaaaaaatatattttggggtaaaatattttaatttccttcagaayaaaagatcctctcttctgtatcttatatagtcagataaataagagactttcctgctagcttcattgccttagccaagcttatctgcagacttttgagctcaaaatgtagttattcctggatagcaatggaaacaaaacccttcatagattgtagtaaactccaatattsaatatattgataggagaatatgtgtaacattgcttcagtgactttactgtattatatatgctagccatttatcgcctctcattagagaagttctactctgtatctgttaccaagaaaaactctccttttggataccaagcttttttataaagtatagkctctgagtcccaaattttccattaatgtttttagccaatttatttgtctaaacataaaaaaagcattaatacacctggatgatgttttcaaaggaatatatataatgtatktwtgtgtgtgtatatgttagaagcaatgaaatctttaatattgagagaatggtatccctcactaaggattatatggagcttgatggcccatccctcttgtttcttctaagctgtagccagtgatcactggttggttcacagtaagaaacagggtcagtctaaattgcagggaaaaaaaagaaagttaaaacaattgatgggactagaatctaataacaggtatactatagttcttgaaacataatttttctctcccattctcatttttattaaaaacaaatcataatgagactgatttgtttgcaaaataaactttagtcttattacacttggcctgattatttgcatgaagcacggcaaaaataattatttgccatataagtttctttttaaattggctttgatggaacttcattccataagaaatctcagataataacttttaaagccttaagcccagccataggtttgtgccatcaaatacatgtatgagttgggtaagyttctctcctcaaggtcccaagataacttggagctcctgggcctgtcagaaagtgacattctttacttaccacaaatcaggtaccctgtacacrgactgtgtagatgaggtatgaggccagttttcccaaggggcttttattggcttgataagtcaaatttgattgcttaaaggaaagcatgccattccagttaaagccctggtaaaataaccagtttctccaattgtgtcctgttgtgaaagaaaacagattcttaytgyrcttaggcaaatcactatattgccrtaagttaagaatactcacaaatagtttccaaattttggagtactcaggtagaaagaaatatgctccaaattttgtttagaagaatacactttctgaaaaacaaaggatcagcaatattttaaacaaaaagtcacacaaggattactttggctacttaattcytgttttgcttgatatttatgaacacattagttttccaaaagagtgatagaagttctttcctctccattttaatgtcacaatctctaaagttatcagcatcctgcatttaagagcacctgttacagtcctataggtgattataaaaccatcttttcaagaggattaaaacaagacaaaaactgtctgtggatgacaaaaagtcctagggaagccayagtcaaagacacagctgatagaaaatttgttacctctgtggcacacataatttactgtaacaattataattattactgataacatatactaagtcatatcagaattatagaagttttgcataattttggaatacataccagtaacacacttatacaaataccatccaaagaaatccaaattgtacctttgcatgaaagcaccatggatgttaaacccaattcttagtaaaaccttatagacaaatgtatctaatcttagtcagtttgaccataagataagatttttataaaccttttataatcttttacaattttctgttaaagagcagaacagtgatctcaaaaaaaatgttgtacttttattccaatgttcaatttatgggtaaactgaataatacccctttaaatttagctaatatgttcacacacagattttttataagattaatctttcacaaaccttccacracttcctyaaaccttcagctttatcctatctaacttaaaacaatcctttaaccctctaaactaggcaaaaaaattcacattcccatgtattcttataatcttttacaaaaagcacattctaatttccttacatgccctgcatgtaaaattatttttccagtagtctcaagtacatgttacactgttaactcttggcaacttttacttttggtgaaaacttggtaagtargcaattctaattatgtattaggtgtgaagactaggacaccagatagaagtgaagataaggtctgactctgtccagcatagctagagggcatggctagctttrtatgtccccaggccttaccgaggtttaaagaaggcaagttgyacagttaagagtcgtagtagcacttcatgatgcatttagtaggcctaataacctttaaattttaccacatttctttcataaatttcctttcatgaattttctcatgacttacatagatcatatacaacatgcttggactttctgacttctccaaaacatctttctttttcaaataaccagtcattttgctttaggacaagaatttaccatacaagatcctttatcatagaaaatatttttatttataatcttccttacragaaatacttatttaccttgataacttttgaatgagataagtcattttccttctgtgaggaagttgtttgtactgcaagttgttgtgcaagttctgtgaagggggagcaaaatgaggaagttatgtacatactgtagaagctattcktcctcaagatattgctcagtttgattttcactagagcttgtctgaataattgtgggctatttttaaacctccgaggcaggactgtygaggttaaagttgcaggttgaagatttaggtatctttccaggagaaatagggctatcagagagaaagatgaattcagaggttggtaaatattaagcaggtacccatcttgggaagtatatttttaccctaaagcagtgttaaccttttcttttagagggagggggtgccatttgccccattacccaacaggatttggaggagagttgctcagaggagactagcacagagtaggcagcccttgaactcaagagagaaatttatcattttacttcccaactccagarttgcccttggctttatcccattaatgacaatgtctgatttggaagccagctagagcagagagacccttcatcttaaggacatcaaggattgggattctgtcctggaggccctttggccttaagggaagtactgtttccagtggcagagcttgtaacagagggagcaagttgtgcggggctttttcccactaattccattggggcagtttgccttccagtggcctggcttctagcaccagtggccattacctgggagggtattctgagggcatcctggagggggccggacaacttctaaagcagccagtagttgagcctgcctctgcatcttgcatttctctttctccttagccctgtcctccttgttctawtctcagttataaaagactgaagaagctaatttgaggatttcctgtctaagggcacgagttctaaggctgatttttgtaattttcttccagtctgwttatttatttatttatttatttatttttgagatggagttttgctcctgttgtccaggctggagtacaatggcacgatcttggctcaccataacctccaccttccaggttcaagtgattctcctgcctcagcctcccgagtagctgggattacaggcatgcaccaccacacccagctaattttgtatttttagtagagacagggtttctccatgttggttaggttggcctcaaactcctgacctcaggtgatccacctgtcttggcctcccaaagtgccaggtgcggcggctcatgccttctagtttatttttaggccaaacagtgttacaaargaaagctagtttttttttgttttaaggtttggggaaatcaaacttttcccaattcttggggatgcatccaaggggagtgtcctgagtatggagacacagttacccatgtgcaaagaaagaaaaggggagaaaaaaaaggaaaaggaacaagggcagccctcttatttccctatcctgaacagggcagcccccattcatctttaggattctggaatgaaccagtcttaccatggacccttggtcccatcttgccacaattacagaggaggcaatggagcacacagagggccccctattcatcyttggggttttgaaatgtactggtcttaccaytgcccttacctgtgtacccctaaccctgcctgcatctctgttctcatggtaatctgttagcctcagactagccttcatctctgtcctgtgggtctcttgagcctttggccttgggccagcctatgtccttgtctccatgaccttatggtgactctcactcagagcattttagcaacaaaatgattgtctcttttctcagattcccaatttcccatgttctttaagtagacaggaggcctgttttgcagctagctgctgcaagaatctagactcctctccctttgaataagaccttgaaggtctcaaggcatattgaaaagggcatggacattattagagaaacggaggctacaggaggaagtgggagaaaacragaggaatactcatggaaagcctttatatgttggattcaagagaggaatgttcatttgccctcttgacataaagaaggaacttctggaggacttgaggattggggtaagtgctcataaatggtaaagaaagaattttccctcctcccaaaggggtgctaattcaaaaaaagcaagtaggcrgggcccttaaaaggctacagagtaaggccctgtgcaggcagaaaaactgcttcaaaagccactgaaaaacttggccctggggcatagcaggaacaaaaagtatatggtaaatcataaggagctggcagagttagggttccaattagtgtctgtcctggcaatgagccaacagacatatgaaagggagtctatttctttgctgctacacaaatgcaacaagagccccgggcacacaaataacagggagtgtgtctttacatgtgaaattaaaacagagaagagacagatttgttcccaatgtggactgtctggcaggtgtgcaaggccatttcaaatatacacagagaaaacaggagaataggctgtgtgggtttttgggaaagagctgattttagttgaaaaagcagaggaaaccccaggcattgcatggtctcaggctttaaccctactactctcataagcctcctgtcccagagggccataagtgcctcaggtctacttagtgcagactccagggttcttccttcctccacaagccacccatcagagtgaaccragagatcagccaggaggagcagagcctctatgkctgagaggaatcatccctactagttggttagtaagcacaatagtgaaaggggaggagaaaatcatgtacaggggttgaacacatccagctaaggaaggcaagtcatagaggtgtcttaacactgggtgacatatccaagtcacagtgccaaagtatgatagcagcggcraatccatacaggtctgaagcatacttgattcttgcctcctccgaataaagaatttgactaaggagcataaagcagagagagaaagagagagaccaagacaaattttagagcaggaatgaaagtttattaaaaagttttacagcaagaaagaaaggaagtaaagtacacttggaagagggccaagcaggcaacttgagagattcacgtgcatggtttgacctttgacttggagtcttatacattggcaggcttstgggggattgygatccttctcccctgattcttccgttagggtgggctgtccacatgcgcagtggcctkccagcacttgggaggggctgcacacacagtgtgtttactggagttgtacacatgctcacttgaggtgtttttcccttaccaataaagtgttcctacaaggtcatataccagttaaagcctgccattttgcctcttaatgcatgcttgggtgtacttcaactcctgagatcttatcgagaagttgctgatcaccagtttcaggagttttctgtctattgggagactgcctttccctggtgctggctgccatcaattattatttcagagacagtttaaaaactgcctaaccatcagaccatcacctgatggtcacctgacattgctggtggcaggagcccctctcctgccctgctcatgtctgtctaactacctgctgtaatgtgtgtgtgtgtgtgtgtgtgtgtgtgtgtgtgtgtgtgtgtgtgtgtgtgtgtgtatgtatggtcagttgctaataaatgcaaatgagaaaaaaagaaagctcctagttatcttctccagtctgctaccaaatttatcccacaatgagtctagttatcatccggatgtgcttgtggattagaaagatgctaaagtgcattggtcttagattcatctagaaaatcctttgaaaataaaagggctctgtagattcattagaggtactttcctggggtcagtctgaatatctgaaaccaaatcagtcccccaggtattttttagtgtatgtctcaattcctaggtggctcctagggtcttaacctctttggaattctccagactatataagacctcagaccacagcctgagaggacaggacttactttggtttcagtgatgaagtaacagtccttgacttttgaggttgtttgcttattagttcaccacttgttagcttcctttggaattgtactatccaaggaagaccaatgctaatacagaattgacaggatctaaaaaccatgtgttgtagccataaaaatgtaccacccagatctcatgctgtgggatcataactgtctgagggctagtttctggccrttctgaatctaccacatttatgtcaarttttgtgttttccccaggccgcttctggccagtgactaagcacatcagaagtatgaagacaggcacagctagcaaacagtgctagcgctcttaggagtgactttggcttgcaggccacccatcagcctgcccaaacctttcttagaaacaccttgcagtacgaggatcctcattccttccccctttctttcatgacaggatcagacctgagctttggtctgaaggctccacggccttctcctgcccccttccccatagataacctgcctctctcacctcatcatcrgtgtttgcttcatgacagccctgaatttatataccacatgaatatgtatctatctttaaagggaagatgatcaaccctctatttttccccttccccgcatatatacatcctttgtaaaagtatacacctcctctgtgagagtcgttttcttttattaacattgagagaatcagccgtggcaacagtggagtgaagatgacacatccacctgcacatctcacctttcttacttatgacagtataattctaagcaatctggaattttctaatatatttttcctaaatttttatagcagcccacttaactcacacctctgatggcacagggacatgggggtggcccacacacatctcaccattctgtggcagcattagtacagttcaccaaacagygccaggtcgctcccagggcacaccacagaattacacttccctgccttatttacagttagtcgtgaccctgggacttgcactggccaataaaatgtaagcagaagtctcaagatggatgtagctggaggccatttccataagcaaactaatgcaggaacaacaacaaaaaaaacaaatactgcatgttctcacttaagagtgggagctaaaacattgagtacacatggacgcaaagaagagaamaacagacgacaccggggcccacttgaggstggagcrtgggaggacagtgaggrtaaaaaactacctatcaggttctgtgcttatcatctggatgatgaaataatctgtacaccaaactctcacggtgtgcaatttacctatatggcaaaccagcacatgtactcctgaacctaaaatttaaaagttaaacaaatgaaaaagatacatcaggagagcccacagagtccccagtctctctcaaccgctgtggtgaacttggaaatgcatgtccagatgaaacccttgccagcctgtgtccctcagtgaccacagtgaccagatccctgtgccaacctcactgctcatgtcacatgagcaggaaccaaacttgtatttggaattatttatcacagtatgtgcggacctatattttccttgactaaaaatctccttgagaacggaaaacataccatcaactttctgctcccaaagcacgcaaaataatacctcagtttaaatacttaataaagatgatctaaatcataaaatttgatctcaacttgattcaaagttttggtgcttgcctcctaaatataaaaagggaattttctcttaatcattctaggagcatgcattttcyaaagccagtgctcaagtatacactgaagaaaatgttattttcggtgagtaatatgtaattaaagaaagaatgctatgaaaggtttgatattgtggctaaaaacttaaccacctttaaatgttaccaaatatgaacaatctcaatttagattagcacctgtagcattgtcatcttggtgtgtttgggtcttgtaccttcagtataatttctgagaaaaactccaattgaaaagagttgataaagttacagggaattttccattcactaaattcaccttaatacttacaccaacgtgtcctgctcttcctaaaggaatggyacatccctgttgtctgtctatgtgtactgttgtgtagttatgatttatacttgtggattttctagaactatttatatggagctattaaatgaactgtgatcttatccatgcagaacaatgattcttttcaacttggaagaaatatgcacttttcaaaacagactaatggtttactttgccatgctgagaaggatttcattaaaattaytgagaaaaaaaatcaattctaaaagagcccacatcataggagatttgggggtgtttttcctccctgccgatatactatctatccctcatggggctcccatggtgacaagttcataatgctaccaccaataaagcttcagagaatacatattcagacctaaaagatcagggagcgagtgagaatcatgagagaaagttctccattctacaaaactagtgacaaagtcacctgacagcaaatggcacagaagtatcaggtggcagtcacactgccctttgacctcacccctcatgattgtcaggttgctctctgcttaatagaattaaagagttataagaccagtttttagatttctggaatacccttgcttcaagtattcaagaaactataaaataactgttaaggtttatctgcatgaacagaatccacattttaaaaatgagaaatttcatattttaaatacttttaattatatgataccaaatactggattttacccataattccagaaacaaggtgtattagtccattctcacawtggtataaagaactacctgagtagtttataaactacctgggtaatttataaagataagaggtttaattggctcacggttctgcaggctgtacaggaaacgtggctgggaagatctcaggaaattttcaatcatggtgaaaggtgaaggggaagcaggcacctcttcacatagcraagcaggaaagatagagcaaagggggaggtgctatgtacttccaaacaaccagatctcatgagaactctaattcaacatgagtttcatatagtgatactctttggctgtgtccccacccaaatcttatcttgaattgcagttcccataatcttcacatgtcatgggagggactcagtgggaggtaattgcatcatgggggcagttaccttccaatctgttcttgtgatagtgagtgagttctcacaagacctgatggttatataagggactttggcccccttcactctgcacttctccttgctgctgctatgtgaagaaggacatgttttcttccccatctaccatgattataagtttcctgaggcctcaccagccatgctaaactgtgagtcaattaaacctttttccaatataaattaaccagtctcaggtatgcctttattagcagtgtgagaacagattaatatagtaaattggtactgcagacagtagggcgttgctgtaaagatacttgaaaatgtggaagcgactttggaactgggtaacaggcagaggttgaaacagtttagaggactcagaagacaggaaaatgtgggaaagtttggractccctagagacttattgaatggctttgaccaaaatgctgatagcgatatggacagtgaagtccagactgaggtggtctcagatggagatgaggaactggagcagtggtgattccagcaatgctttagcaaagagactggtggctttttgcccccaccctatagataagtgaaactttgaattttagagagatgatatgggatatctggggaaagaaacttctaagtggcaaagccttcaagaagaagcagagcataaaagtttggaaaatttgcagcctgatgatgcaatagaaaataaaaacccatttactagggagaaattcaagccagctgcagaaattcacataagtaatgaggagtcaaatgttaatcaccaaacaatggggaaaatgtctccagggcatgtcagagaccttcacagcagtccctcccgtcacaggcctggaggactaggagagaaaaatggttttgcaggctgggtccagggccccccatgctgtgcccagcctcaggactgtgtcccagccactccagccatggctataaggggccaagttacagctcaagacattgtttcagagggtgcaagccccccagccttggcaacwtccacatagtgttggtcctgtgggtgcgcagaagacaaaacttgaagtttgggaatctccacctagatttcaaaggacatatggaaatgcctggatatccaagcagaagtttactgcaggggcagatccctcaggagaatctttgctagggcaatgtagaagggaaatgtggggttagagtccccacagagtcaccagtgggacactgcctagtggagctgtgagaagaaggccaccatcctccagactcccaaatggtggatccaccaacagcttgaattgtatgcctggaagagctgcagacactcaatgccagcccatgaaagcagccaggatgggagctgtaccctgcaaagccacaggggcagagctgcccaaggccatgggagcccactctttcatcaccgtgacctggatgtgagacatggagtcaaagaagatcattttggaactttaaggtttaatgactgacctattggatttcagactcgcatggtgcctatagcccctctgttttggccaatttctcttatttggaatgggtgtatttacccaatgtctgtaccccacttgtatctaggaagtaactaacttgcttttgattttacagtctcatgggcagaagggacttgcattgtcttagatgagactttggacttggacttttgagtttatgctagaatgagttgagaccttgagggactgttggaagggcatcattgtgtttgaaatatgaggacatgagatttgggaggggccagcggcagaatgatatggttttactgtgtctccacccaaatctcatcttgaattgtagtttccataatccccacattgtgggagggacccagtgggaagtaatttaatcatgggggtggttaccctccatgctgttcttgtgatagtgagtgagttctcacaagatcttatggttttataaggggctttccccccacttcactttgcatttcttcttgctgctgccatgtgaagaaagacatgcttgcttycccttctgccacaattgtaagttccctgtgacctccccagccatgctgaactatgagtcaattaagcctctttcctttctaaattacccagtcttgagtatgtctttattagcagcaggagaacagataatacaggtggggacacagagccaagccatatcacaaggtaaatagaaaaatagggtaactaagatccaggagtgtgatacacatttgaattttgccttgtttattaatatcttaaaactaaccaccatggtggacttaaggaggctgcccccaaaagaaacaactgcagtttcaaasacacaaactgtttgggaaaataaaagtcatagtgctatataaagaaaaaggaagaagaaacaagtgacatataacaacacattctgatgaccctagttaaatatgacaacagatgataataggatgaggcttccccatgaagggtgatggagaggaaaatgccacagyagaacttcagtcatgaatcaaaatctctaagtgttctttggaaaatgtttcctgagctacctgctgtttttgtcagggtttaataatgagctcacatctttcaaagataagaggcaagtgatttcatctttctacctccccacttggattcatagattaaagtaataaacagttaatggaatataaatcaatactttagagttctgtgtgttatcttttgtctttttataaaacaagtgacataaaaggctatcctgtgagcattaacctgtttaaaaatatagatggcaataactggaactgacgttcctaagattttggaaactgtgcaagtttccattgagtattaataacgtggatagaagcctatattgacaataataaagcttaattttagtttcagctctaggctttggtaaaactattttaacttttatgaaccttagtttttgttccatgaagtgaggatgaaaataatacctatcctgcatatacctcacaggtatgctctgaagaacaaataatatctgtaaataaaagtatttgcatatttcaaaaccccatacaagtctaggggattattacgtaaatatgtgtataatgttaatgcttgctctcctgacttggaatgatagcattttttttctcctaaagttctcaaaaagagaactgaaaatactagtctgttttgcctccacagagtaaagctgtgtgcacttagagaaacagggcaagacagaagtataggaacttggcattgcacccacccacttaggccaatgcatgagacagcgacttatcacactttgttgtaaatgtttctttaacttctgtctcccttgctagaggaggaatgatatctgtcttagaaaccattgtttctctaccactaagcacagaggctggcaaagagtaagttcctaataaatgagagaaagaataaatgaattaaagtatggatggatggatggatggatggatggatggatggatggatggaccgttggatggatacataggtagatacgtgaatagacagatggataaatgagtaggtaggtgtttgggtaggtgagcggatggatggatggatggaaagatggaagggtggaaaatcccagaggcaattatgatgatagtcaagggtaaagtaaaaacctagtctaagcgcatgattacaatggggtaagcagtccaccaggcagtccacatctgaggagtctgtccttgggtggcatgctggagacaggaactgacaagagcaaggactaaggcagatggcccagtcccaggagggagctggaatgcttagcagtttaccagaaaaggaattccctaaggaaactgaggcaaaatcccagacttataaattagagcccagagggaagtcaggttcagagtataatttttagaacagggatatggtggcaggctggacttgggcaagcagttaaggagcacagaggctccagtgtgacggccagcatgagtgcctcggctgcatgggaggaggagacgggaagcccctcagacaggactggctcagctactggggcagggctaagttggcaggagggcagctcccatgaatgcagtcacagagccaaatataacccaggctatggctgacatctgtgtggcgggaagttctacgaccaggcatataattttttttttttttttttgagacagagtcttgctgtgctgccaaggctggagtgcagtggcgtgatcttggctcactgcaacttctgcctcttgggttcaagcaattctcctgccacagcctcccgactagctggaactacagagatgtgccaccacacccagctaatttttgtgtttttagtagagatggggtttcaccatgttgccctgcctggtctcgaactgctgacctcaagcgatctgcctccctcggcctcccaaagtgccaggattacaggtgtgcaccactgtgcccagcctcaaatttttaattctgaagtgagaataagggttacatgtgaactaatgacttgcaaaagatagaaatatttgaaagaactatacatacaagtagtcctcagttgataatgtattatactgagaaattgttgtcttagagatagtgacaaaagtcagcttttctttttcatcccaaagcagcctttttctactgcttttgccttggcaactaacattcagacttttcataatggctggcacttatagtcagaattgtccccataccctccccaggtatggtgaaagattgatctagtgcaggcacaagttggtcaggtcacagttttcagattctctcagtctatcgacattgtaggatttgtttgtcaaagaaaaaaattaccaaaaaccctccttaagtcttgtttaaattattacactggatgagtgagtaggcactgagtgagtgacaggccttgtcaagaaaatgccacttctgaccaaaaaagatttggcaaactgcaagcttcattcttgatcatgctgtgaaaaactctaagtaatttagaatcaatatggtacaagataaggataaaaggcaaaatttgaatttcattgctttcaaatgtcaagaatgagctctgatggcttagattagtgttttaattcttcatcttaaatatgagcaattacatttcttcaaaaacacattttttaaaaatggctgaaaaaatgtttttatatgctctttgcattatgtaattcacaattctacrtttaatttgtttttctaataatctgttcaaatgaacatgggatagtcgagatgaacaacagtctccttctaattcaaaaagaagtttttaggactggatgctgtggatcatgcctgcaatcccagcactttgagaggccaaggctggaagattgcttgagcccgggagtttgagaccagcctggcagtgtagtgagaccccgtctctacaaaaaataaagaaaaamttcgctgggcatggtagcatgcacctgtggccccagctacttgggaggttgaggtgggaggatcactggagcctgggaagaccagactgcagtgarttatgaccaaaccactgtactccaaccagggcaacagagcaaccccatctctaaaaactaaaaaataagtttttactttctcattaaacctcaatgatctaatggaagaagccattttacaggtgataagcagattcatggaccatataacagctcaattcttgatctggataaaggtgattgaccaaggtttcttcctaaagataatatgtgtcttgagacatctgatacaaatggactaaaagtaacaactgaggcattcacccctggctacaacacctaagtcacatgggatttggtttctagtttgtcaacttatcttactatgtataacctctgaaattatgtttcatagctaaatattctttatttcataattatctggtctgtttcttgtatccatttattactattggctactttacatagagcttgatcatgatgcaagcaagatggcgcaatacaatttttggttataactaagtctcattacatttacccaagtaatatttatacaatatccttccaaaaaatatgttttgcataataagcaaatcattattccactatttgccacatacagattgatatgttaattatgcatgtgttattatagttaaagcaaaccattttatttgtctgaaaattgcctgagaatttcttgtaaagacaggaagctccgggagtggaatttagaaacagttacatagacaacataaatgttctttttgcatggttctgcattcagagtagggttaagcaacatttgactytaattttcttctggaaattcaacattgaagtaagttatttgagtaggctggaaaatatactttcctataattctgtaacaaaaatctctagttccaggatgtggaggcaaagaakaagggtcattagcatctcgctcaggtcttatcaatctgacatcccaaaattgtcacatctcctgcagatttgcaccttttatcctgaggccagcttagagagcaaaggtaaaggcactgttgcctctagacatgaacttcagacccatgtatctatctccagctatatatgttctacagacacttcaaacttagcctctgcaaggcagaatttcctatcaacccacaacctccraggataaattgtcccaatgtattcactcctttgattactagtgatgtaagtttaatcagttgtttatttttctttcaaaaaacatctattgagaacacttcagacactgagcttagccagagacctaaggagataatgcccaaatactcagaattaatatgtccagcacgtttcacagacctatattctaacacttaattatttgwtgatatctatggtttcttatcagattgtgcgcccctgggcatagttgagaacttcatttttgtatcctaagaattgtttaatctacctttattgcatgctaactaagatgatatggaaagacacccacttttcttaggccaggaacagaaggcctattaaatcagttatcaccatactcaccccaaatgatcctactcactwgtggtctataattaggtaaatattgctattattgggatttgggcaatagatattttgcaatctattatgcaatctttagaagctctaccaataaataagtgaacaagtgtacaaccaaccataagaagtgaattttggccaaaaaactgcacgattttgttcatcagaattggaaactaatcagcttacaggtcagttctgttctggttagcccctttgtataattggcaggttaatgccagatggggacatacagactgcaggtaaactgaagcttcttatggaatctgataattttagtgctgtaagataaacttggctcttatgaggtccttactattcttagtaattttttaaagtagtgtctggtttttatctcttttaagaagtttaaaagagccagataaggtggctcacacatataaccccagcactttgggaggctgaggtaggaggattgcttgaggttatagtgagctacgatcataccactgcactacagcctggtgacagagcaagatgctaactttaaaaaaaaaaaaaaaaaaagttttaaagattaaccttttaaacgaagaatgccaaatagtggtaaaatatacttggcgtgatcaccaacaaaaaaaatctaattaacattatattactctattaattaaatggtaggagagaaaagcagcaatatgattatgatagcaaaaatatgttgggtttttttgtttgtttgtttgtttgagaccagggtcttgctctgttacccaggctggagtgcagtagtgacacgatcatggctcactgcagcctcaacctcccaggctcaagcgatccgtccgcctcaccctcccaagtaactgggactacaggggcaagctttttttttttttttttttttttttttttttttgtagagatggggtctttctatgttacacaggctgtgatctstatttccaagaaatgcaaatcttaggtaattctagaaattgggagccaatgatcaagaattactaaaagataccaaggagttatcagttcctttttccttttattttmggcacatatgaaactactttttttattggagaaagtgagatgattagaagagggtttcatggatggctcctaaggcaagaaaggtgaaagtcgagggacagtgcagggcagttaagttagtaggagatgagagtggctcggcgtggaggactgttgcccattagaacagaccgtctcttagaagggataaaaatattatgttgacctggaaaataaatttgggttaattatgattataacttgtctttagttactcatctctgattgacattgttctttggtttatcttggkgtttgctgggttgtttcctctatgggaagaggaggtggtgatatgcagtgttccccaagcctgaagaatgaaaaaattcaacaagacatttgtaaacatgatccagtcacctcccaccaggccgcaccttcaacactggggattacaattgacatgagattttgtagtactatttcttttacctgaggtcaacctaggtttttgtttgtttgtttgtttgttttgtttgtttgttttttgttttgtttttggtgagggagtcttgctctgttgcccaggctagaatgcagtggtgcaacctyggcttactgcaacctctgcctcctgggttcaagcaattctcctgcctcagcctccagagtagctgggattacaggcgcccaccaccgtgcctggctaatttttgtatttttagtagagacagggtttcaccatcttggccaggctggtctcaaactcctgacctcatggtccacctgcctcggcctcccaaagtgctgggattacaggcgtgagccaccatgcctggccgggatttgtatttttaacaagtgtgtctgttgattctcaacaccgggcaatttggagaaatacctacttggttttctgtgctgatttgagtgttcaaattggaggactgtagagatgttccccgtggctttttactgttggaagttacactccttttacgtgaagccataaacagcatttagatggagatgacttggtgtgaggtggccaggagtataaatatcccaaaacccagacattagataaagtgattgaactttccaggaaagagaaacccagacttctgtaaacactgtaaaggaaatattaatattacttgtgttttgtattttgtgcttgtctcctggaagacatttcatatccctgatttttaaattttttgaagtaattctagtttgccagaggcaaacacagaatagaggaaatgtcttacattacccaatttgcatttagtactaattttaaatactttttaaatgcacagttatgacattggtctgtcttcgttacacaatgctaagatgatgttcaaaagttttatcaatttcccctctacatagttcttacttactaacacttgagaaaatgatagyatctcaacaccaagtgcctgaatcagctttttagttgttctcaataagtttctgctgagatttgctggtcccgttgctccaatgtatccttgaaggatacccgttgctccaatgtatccttgaaggatacacacaaagggaaacacagatcacttctgtggatattctaaatcggaactgtgattcataaaatcttcaggtgcttgctttcctgacttattaaatcaaactggggatgttgaagtataaaagaaaagatgcatctgtcttttcaatgcagtcttcagatataaaaggcaaaaataaataaataaataaataagatgtaggttacatctaaattgatcatccttttgaaatcttccatacaaatattctccacctgggaattttggctgagctaaatataacatatggtttgttgaagaggttttaatataaataaatgctagttttcatcagaatacagaaagacatctgcccagaaaccatggaattagatactattatgattcatacatttctgccttgacaattctgttttaatttcagacatttggtgattaatttcaagcttgtcattttctacatttgcataaggtccagccagactggctgtgcaaatgctttttgttaattaaatttgattgttttgcctatactgrgtatagaaattatatttacaacaaatatttccaatagaaattaagtatgtgcaaatattactacagtaatgaaaatcatatgagaaggtctactcttccctctgcttctaaaaaaagagatcaacagaaaatttaaaacctaaattacgtctgaggacaaatacaaaaacattttttagtggttggaacataaaatgttatattttgtttcaagtaaattcaaatcatataaatgaatctcttttagaagagaaaaattatcctatgttctgctgttaactattaatcatatataaacttttaatattttaaagtatttggtttagccaaaatgatgatcttttggggaaactcggatgttttaatacggaaactattaaaaattaaaagaagtgatatacatcgttgctatgaaccataattttatttcattttattttactattttattttattttattttgagacaaagtctcgctctgtcagccaggctggaatgcggtggcatgatctcggcttattgcaaccttcgcctccgaggttcaagcaattctcctgcctcagcctcccgaacagctaggactacaggcgcacgccacccctgaccagctaattttttgtatttttagtagagacaaggtttcaccatattggccaggcttgtctcgaactcctgacatcaggtgatcggcagaccttggcctcccaaagtgctgggattacaggtgtggacaagcggtgtcctgaaggctatcttcatcttggtgaaaaataactgcctgtgaattctagtcttgcagatacaaacttgataaagtatcagaaaatatcatgtaatatattgaaaaggaatttaggaaagtctgaagtgctttattaaaccataaatttgaagtaagttacatttgatggggaatgaaaaagagaatattacttccattaatcaggacacttgaaacatgtgatttttgcaaaccttccaagtgacctgaatgattgtaatggtacactgcaaaatccattaacccaaaactgtccaatctagtattatgggaagaatggtaactctctaagaaaatgaaatgtggcacatcaattacaggatcatgtatttcttctgttgctcttctttaaaggaacacacaattcttagaaacgtggatgtcatcaaaacatctctataacacaatggaatgagaaaattcttctttataaaaatcagctcaagttattgtttattccattccatatctctgcccacagcccggtagatcaaccctagatttcccatattttcttttcaaaaagattcacaaaatgagatatcagtgcctttattattaatctctttgtaccttatatgccctttaatatgttaagaatttattgtttaaawccctaacagagatgaagagcaattggtcaccatcttttgtaggaaacagatgtggttgtatggactttcccatgaatccaactccacagtggaactaatgagttttttcttgctactggtccaggggcaagggtgggatattgaaagagtgggataaggaaagttgtatgagtggaagaacaagatagttccatccttattctttgctttggttttgtggtaataattatgctaatatgaacatgtttctttcgggagtatcagtaaaatacagaagatacttttaagttagaaataggtcagttataaaagaaagatgctcaaacatgaaacattacctaaagaagacaccaggacagggaattcagtaagcatgtcacatattgatgttgcaaatgtttcttaactttgtaacaatctgacctctgtaactgtagcctgcctgggaatattttctactccatattcctcatttatgaatagtgtgacaatcctataaaatcactcagataaatgtagtgtaacatgctatgatgatgatgatgacataaataagcatcaaccaactacaaggaaatagaacatattttacattgacatctccccactattgcattgcaaaaccagatttctagatatcaaattagtgcaaaagtaattgaggttcttgccattaaaagtaatggcaccaacataatagttggaggaacacttcgggtgctgcgtttgctctctgttctagctgctgctattgcttcaccctgctgcttctgagtctgtaccaagggcgtggaaatgaggactccatgtctgttcaggcattgctagatttcctccctagggagaatcatgttaatgccgggtctctctggatcaggcctgtggcaggttgctcactagcaaccgtgtgtgagtactttcagccacaatgataaagctgtttcttgacatagagaagttaagcagccctttgccttgttgaaacttgcctaaaaagaacacaatgctgaaaccccaagcctgctttgagattctagtcctatgcttgtagcagattttcacgttcacatgtcagcttccaagacattgtcttccagaacttcatctcctaaataatttgccatgagcaccacttatcaacaaactgataycttggctgaaatgagtcctcactcaaattttttaatggtatgtcaagatttgtgtgacagggaaaaaagagatagcmaagaaactactaatcacttacttcatagtttctaccacattgtgaaaatgaaatatttcttttttctttctctttacttgagccaagatagaaatctctctgcatcctagacctgttatggatgaatgtttcgtaattgtataagaaagrgccatccattaaatttaagtaaacttctatttatctattataagtttcatcaacaataaaatatagctgttttataatgactagaattataatagccaacattaagtgagtgttcactggtatactagcgtaagctgtttacatatattaacttatttaatcctcacaactacatgtgaggtaatatttttacctccatttgatagatgaggagcttaaagcaaaaagaagctaaggaatttgcccaggatcacacagcggatgagtggtagagttacaatttgaccctagagagtccaaactcttaaccattaggctacagctgttctgcaaggcatattattctaaaacatctttagaaaacaagaataggtactgttttgcccaaattgggagtccttgaatagaaggctgttctatatattagcagaaaggaattaaagcgaaggaaggcatttttccaaatttttattgtgtcctcaacatggaaatgtatgatgctgactcaaaggtaatttatctcaagtaataattaaagctatcatttgcaatgttgtaaaaagaactttcacacatagttctcttaattctatcaaatttgatttagtaaatacaagctaagtagcatgggggttaaaaatattggttcttaattgttttatcactgcttttatttgtatattctttaaccatctcaacaaataagttagtgttatcaccatcaccattttatatttgaagagtcatactctaaaaaggtaaaagattaacccatgcttactttacaaatacagtaatgaaacataccttgcaggaccacattcttctcatttttctggccacaatgtatattccctttctattctgtctgctttgccattgatgtttgatttttttatattttgcttcacattttcttgcaattttctaggcatttatttgatggaataattaatagcaagttttctcttaggaaagagaaaaagaggttttcttcagcaacatccactctaccctaccccagcatccatcctggacatcttctgaaggaggatagagatggatggcagctgtactgctgagccctagagagtcattcagagacattcattgggtgtctcctgttgggaaggttctgtgtcaggctgtacagaggatagtggggcctgggtcagagagggaataactataaataagtaaactatcgtctccaccctcaaggacgttggtgttgaatattctcttattctctagaaaaattaatttgcattccaatttgtatgaaaaaaatatttctaaaagctgagctgaacttttttttctttcttgttttcgaggttgagggctaaggtagtagcgtaaaccctagagtaactgatcaagttaaccctctttttcctcgtgctgccgttttcctctgtgtgcttgtgtgcttgaccggaaggaaggggatggaatgcaacccttgtggcgccttgattttgacttagtggaatggatttcagacttcaggcatcagaactgtcagagaataaatgtgtaaggttttaaggcaccaagtttgtggtaatttgcagtaccacagccagaggaaacgcatacagccactctgcagaactcctgtacctctggactgtatctttctttctttacctggggcaaagatccctgtccaacctcagaggcaggatggcaaaaagaggaagaaaaatgaattaccaagaggaaaaatactccagaacatattttgaaaatattttttatgttgtgtcttgattattccttcaatatttgtggaccggctagatccttaactgccttccttctctcttttcacccttgcattttgtctattttacctcatactaaagagaatgagaagatgttaaaaataaacctactttatagaagatttgaaaaatggagggagataaaaattaacacagaactatctgcaagcggttttcattcctgcctctctgtggctgctctcctataggcttctgttattggctgtgaaatatgaaatgggtcatcatccctaacccccccagactgaagcccatacatattaccttcaagagtgtgtgtttatctgaatgcatatgaatgtgggttattaaaggttaccaattctggcaaaaagaatggcatgaarcaataggcagaatcaactgaatgagtgaagttaatacatgtttaaatcattacttaatgttggttgaaacgtgttatcaagtcttttgccttaatataggactgattctctgcattggaactgtagcatctaggattaagaaatcactctttagagccatgaagaatcatgcctgtattgcatgattacatatctagagttattagagtgagcaaattgattatagaaggactatcaaaagaaacttatggatatggcagtcatgtttttgcctctgatcacatggcagttaaaaggtaatttttgtttttgagacggagtctcactctgttgcccaggctggaatgcagtggcgtgatctcagctcactgcaacttcsgcttcctgggttcaagtgattctccagcctcagcctcccgagtagctgggacaacaggcatgcaccaagatacccagccaatttttgtatctttggtagagatggggtttcactatgttggccaggctggtcttgagctcctgacctcaggtgatccacccactctggccttccaaagtgctagtattacaggcatgagccaccacacccagctgaaaggtaaatttaatctatgttccctgagtctaaaaagttctatccagagtttcaatctggggacacttgyctttgctgaagagcccccaaaagagaaaaggcatggcgcagctcagaacaaagggaaagtaagagaagggctcccatcttyaattataactgaataaaaaatccatgttcagatttgttacagtaatataatatgtatcaattaatgtggatttaaccaagtctaagaagttttaagatgaaatcttcacatgatacatacatataagtaagtgaaagttaaactcactggttatgtgcatgaattgaaaaaatggctatcaccttctccacttttgctcataaactggccatttttcttagtatagactccatatccatctatccatattaataatattaattattaactttctgtagtcagcagcggaatgatatactttgcaaatcaaccctaaactggtgttctttatccttcttatgcattgacagtatatttcctaactgacacgttgctactgtttctcaactctcttcatcttctgaagtacaactttgccttctagtatttcagtgccagccaattatcacttctcacaatcaatgagcaaagagtctgtggcactatacaatatgaactctcttactaatgaacagagagaaataggctttacaatttgcacactactcaaaggaattttgtcaggcaaaagcagtttcatggcaattcactcatattaagaaactgttgccagagtttgaaggatagaatatactgaagagaaaataatgctatttttgtttattgaatacttatcctgttgggctttattttgctattgaattctattctgacttttttttcttcatcattcttaagcatgagaaatttacaactccccttctttcaggccttccccccctgaaaaattcttaaatcataatgattgaatggtacacagctgtggcttaaaatgtatactttctgttaaaagagcaaacaagctaaatgcattcttcatgtcaatatgacaatcttaaattcctgttgaaaaagtatttagaacgcatgttcagtgatgcaagtaatcacgtgtcttggcaaagaatctgtgaagtgacatcccagtactttgtaaggatccttgagaaagaaatactgatatacagaagcaagaaaaattctacttaagttaaatgaactgtcaaacttggggaagggaccactatgccaaattccaggttaaaaaatcttttctaactatgtttaataatgttaggactcagtttcttcattttaaatgtaagagttttaattaaatgctctccaagattcttcctaagtactgcatttcaaaatgcagtgccttgtaccttagactgatttgcatgtcctcttcacacccactttgagttttaacacatctgcttttaaaggatgcttaaattgatggccagctgtgtttctcctagtattacctcatttcaaggacttcttttgtacagtagtgtgtaatcagcttaataaacatcattaaaagctgtcatagaacttgcaaatggaactactagttttaaaggtatctgttctatctttccatccctgaaaataaatagctaaatcatgccctttaccaaatgacatatctgtgatacctgtaggttttcccggtactaagtgtcctcttggacacttagtcttagtagactaagaatttatgtctacttcttagtagacataaatcgtaaatattgaatcgaatgtcaccaaaattagactgattatgtacttaggaactttcaagatagaacagaactgagtgctgtatcacagaatcagattagccagtggactgagattgatctggaaagaggtgatcccttggtgattaagccaaagaaaatcaaatcctagccagaaaccattagcaaccgattagtgtcaagtgagtaggtggtttcatggtagcacgaaagctttttaagtgcgtaagtggcaatttcctgttgttctgagctcaacggatttatttcaggaacattcctaaagctcagaacctagagaagtaaaggtatacgatctcctctcactttagatattttttcctgtggagtaaataatcaatttttgtgtcttctcatccctgcagatttttaaaaatccttttttctcatcagtagccatggaatgtgaaacatccccaaaacatcatatatgacttattttatttaatgatatttcagtatctttaatcctaactcaggtatcttatcttataaactttatttgtttttgtttttgttgttgtttttgttttttgagacaaggtcttgttctgtccctaaggctggagtgcagtggcaccatcatagctcactgcagccttgaactcccaggctcaagcagtccccccttgtgttctcagcctccttagtagcttagaaataccatttgacccagccatcccattactgggtatatacccaaaggattataaatcatgctgctataaagacacatgcacgtgtatgtttattgcggcactattcacaatagcaaagacttggaaccagcccaaatgtccatccatgatagactggattaagaaaatgcggcacatatacaccatggaatactatgcagccataaaaaaggatgagttcacgttctttgcagggacatggatgaagctggaaaccatcattctcagcaaactatcacaaggacagaacaagaagactttttttttttttcaaatggtggtaagaattagcatttagtgcaggggaaagtagttagagtctgtaatttcaggcatttgaaagtttactatgactgaattgctaaattcattacacttgtaatatatttgtttctttcatgggcccaccacagtgctaggcacaaaggctacaaaagtataaacctcatgtctgtacacaagaaggcaatgttagtgagacagggttcacctacaaagtgaaataagtgacgttctcttgaagtgaggcctgtttttccagaaaggtgaccaactttgctataaaggtgttggaagtaggaagcattccaacttcctactgaggaaggttataaaatctgtaatgctagagatcttttcaggagccaccaaattgacaactatatatttgtgaatagtttaaaggtacagttttgcttacaataaggcaacaggactagttaatttatagttgtgacttgtgtgggtttttaatgatttttatgtttttaatgtgattttaatgtgattaataatatcttggctaaaatggatacagtgacaaatagtatataaaaatttgcagccgggcgcagtggcttatgtccgtaatcccagccctttgggaggccaaggcgggtggatcatttgaagtcaggtgtttgagaccagcctggccaacatggtgaaaccccatctctactaaaaatacaaaaattagccaggcgtggtggtgggcgcttgtaatcccagctactcgggaggctgaggcaggagaatcgcttgaacccaggaggcagaggttgyagtgagcygagatcacgccactgcactccagcctgggcaacaagagcgaaactccatctcagaaaaaaaaaaaaaaaaaaagggcygggcgcggtggctcatgcccctaatcccagcactttgggaggcggaggcgggcagatcacgaggtccggagatggagaccatcctggctaacacagtgaaaccttgtctctactaaaaatataaaaattagccaggcatggtggcacgcacctgtagtcccggctactcgggaggctgaggcagagaatcatttgaacccgggaggcagaggttgcagtgagccgagattgcaccattgccctccagcctgggtgacagagcgagactctgtctcaaaaaaaaaaaaaaaaagttgctaaacttcagtggtaatcagggaagtgcaaaataaaggaagataccatttttcacccgaattatttggaaaaaaataatttaaatttgataatagaaatattttggcagagatatagaaaatgcatatgctctacattgctggcaggaatgtaaatgtggtgagccattttttggatgacagtttggccatatttgaatttttaaatttattatccaacagttttatttctgagtatctggcctaggatacaaagatgttcactgatacatttcccataatagcaagccttggtaacacataaatgtctatcaatgggagaaaactaaataacttatggtacaaccattttatggaatcctctgcagccactgacaaaattttaagtaatttatatttcctaaaatagaaggaccttgaagacaatcttgtatgccaaacagaccccaagctttccagctctgagtaggaactggcgggtgatggtcaagagacacgttagccttatctgaactgtttcaatgttttacacatcatatcatatgaaattaaaaataatgaatgaaattaatgaataaaaataaaaatgaaataactaatgattagggcagaaactagggaaaggttgagaactattattcttgtaccttccaatctaatggaaatatatcattgattaaggactattttatttaagagctgcacttggaaagaataagttcctctgatccaatattcatattctgtagcttacaataatattcattcatttattcatgctttctgtcattaattcaatgtgtatttacttatccaacaccaactaagacscagccactgtggatacaaaggtgaccataatgtttgctatcatcaagaagcttacagagacggagagacagagacagagaggtttgcactctattgagaacaatccttaagataatttaaacactcctatagtggatagtacaggatatgatgggagtacatgggctcagaaaccttcctastagcccctaaatccattctatacaccttaaaactttggcttccaagtgacttstgtccaaacgatgtgacatgatcatccacccctggattttagccggccctgctgtagaaactctctagggacaggctttgatttagctgtttctgtctttggagagaggtttcctctttacctcctgaccccaacaattagatataaggccagtcttcctcagaaagttttcaaggacaaagaaacctggacttagctttgttatgtcttgttttcttatttttcttttttttgatgttcaaaactttattggggaaaaaccamggtatctgtgtgcttaatgcactgtttgctaatggtgcactgtaaaacactggttttctcacaatatcaataggtagactacagagattttcagaccctttaattagtagttgcatgatgaatctccaaaagacatcaaagcttgttttacctcacatcccttaggtctgtgggtgatgcagctattatcaggcaaattcagaaagcacagttttggaaattcttttcaaatgtcagtatgaaaatgtcagcaatcaccttccatttaaatcaagttttccttagttaccttaggtaaactactgttaatatcactcatgccccatgaccaatatgtttttattattattttattccttgcaatgtgaagtatcaaaaccgggaaactagagaaaagggataattttgcttgttactcataatgctaccttgtttatctgtgtgcatatgttcacatatgaccatatgtcatatgaccatagccaccacaygtggtttcatatatgtcaagaatttaatattgtttcatatgatttttcaaagttgctctgtcatttttatcatcatcattttaattgaagcactattttcttgtcagtaatttatgaatcatttccttacttgaaaatgttagtttccttccaatcatttcctatggtaaaaactgcaaagaacactttaaccttcattatattttcattatcatcagacagatccctcaaagactcatcctcctttgaaactgactattggaaagctctttcatgcaccttactgaagattactctttaaactacccagccacccctgtggttttaacaaatggttccttgacaaacactgttgcttatttcccatcaactgcctctaaaggggccataacagctccctattgaaccagtgagactgcttttgggcgaacaaaatgaaacgttgatggtaccctttccgggtgcacttacagaggattttcatgagggggccattattttagttacaaatttagttgatggtatagtcaccaatgttttcagtagtttggtagaaatatgtttgtaaatacaatatatattttattgtatcatctaataggaagccaacttttgatactgattaaccagctaaaactccaccttcctttttttttcaaaccagactttgctcaacacataatttcgtatatcttctccaccagcagaaaaaaaataacttatacatctctttgttattgaactgacttattcagaaatcaaactctgtcaagttttgtcattcagaccaatgatttgtcatgctggacccctgctgacttcaataggaatggcgccatgtttgagaggccaaagaagagacccagagccagtgaacgagatatagggtttaatgaggggatttatgtagggtggtccagtggcgatgggctggatagaacagctaccgtttgtgaaaagcttgcagtagttttttgtttttgtttttgttttgagactgtgtcttactctgtcacccaggctggagtgcagtggtgcaatcacagctcattgcaacctccgcctccccgggctcaagcaatcctcccacctcagcctcctgagtagctgggactacaggcacatgccaccatacccaggtaattttttgtatttttggtagacaatgggtttcaccatgttgcccaggctggtctcgaactcctgggctcaagcagtctgcccgcctcagcctcccaaagtgctgggattacaggcatgagccactgcacccagccaaaagcatacagtttacatagcaatttcatttaccaccttccaactagctacctccacttggcaaccttcactcaatccaaaacaagaggcctcaatcccctgtatggcctcgattccatgggatgggctggaggttcagatgttcctctctggaaaagaatgaatctctgggttggccattcctggattccttagcttggaactctgaacacacattcttcttagcccataaggtcattctcagggtatacttcagttaagtttctgctgccaggtgcatctgccatatatgattttcttaacaagtatttattgagcacctattatttgccaggcagtattctagccctaggaatacagtcatgaataagacagacaaaaatattttctgggctaaggcgggtggaacacaaggtcaagaatttgagaccagcctgaccaacatggtgaaaccccatctctactaaaaatacaaaaattaaccaggcatggttgcacatgcctgtgagatcagctatttgggaggctgaggcaggagaatcgcttgaatccaggaggtggacattgcagtgagccgagatcgcgccactgctctccagcctgggtgacagagcgagactcccgtctcaaaaaataataataatttcttaatggagtttacattctagtgggaggagaaaggcaataaatagaatgtgagaaggtgatcaatgctgtagagaaaagaacaaatcaaagaaaaccraaaggaatgccatgagtggaaggaggttgccaagttaaatagggccatcgtggagggccttactgagaaggtgataaatgaggaaaaccctgaagtaggagagacattagggcacacttgaatttaagggaagaacctgcctggtgagaacaacagcaaggaccaagaattcaatattattgggaattatgtctactaggaagacactgaaattaggaattaggaaacgtaggcattagggtgagctcctggtatatccacctgtgtgggcattagcaagtcacttagcatctctagcattcaggtataaaatacaaggataggcctgggaaatggaatcatttcagagtttcttgcccactcaactatttatttaataaaaatggagtcattaagaggccgttagatggatgtggaggaaagggaacccttggtgggaaggtaaattagtagagccattatggaaagcaatatggaaggtcctcaaaaaattaaaaatagaactaccagcactcccactactgggtatatattcaaaggaaatgaaatcagtatatcaaagtgatatctgcattttcatgattattgcagcactattcataatagccaagatctggaatcagtctaagcatccatcagtggttgaatgaataaagagaatatggtatatatacatagggaataccattcagccttaagaagaagaaaatcttgtcatttgcaacatggatgaacccacaggacattatgctaagtgaaataagccaggcatagaaagacaaatactacatgatctcacttacatgtgtaatctaaaaaagtcaaactcttagaagcagagagtaaaagagtggttactatggagaaggtgaggtttagagaaatgatgatcaaataatataaaatttttgttgaatgggaggaatgacttcaagagccctagtgtccaacatggggactattgtwaatgtattgcatacttgaaaaaaaatttaagtaaaaatgctacttgcttggaaaaaaacaaagggttagatggcatttagcacatttaattcacaaagcagggaaataatgtgatgcatttgagaaaacttcccatcacaaatgcttacaataaaagggttcagtgcttaaatgttaaacttcagtagtctggaaaatgtaattacactgatgcctcatctcctgaaactgatcagtgaggcgtgactggatgtgataaaggtaaaaaagatgtaaggataacagatttcattttttcttttaagttttattttcttttgtattgacatatttatatatatttatggaataaggtatggtgtttcaacacatgtatacattgtataatcaagtcagggtgagtagcactgttcatattaagcaagtttctgtttagtttgatcatttcaacatttggcgtgatgtgccctgtgcctgcttttttaaaactgagatcaggtaataacgtatttgctgccacctgaatgcacaagcaagtcaggaggctgatgccccctcagagcagagcaaggtaatgctgctttccacatgtcacttttatggtctattatgtgtttttgtatttttttatataaatatgctttgcatagagttacaaataaaagtaatgaatagctatgtaaatacagagagacagttccctatatatttacatattttgggtaacctatgttaaaatccccaaggcctcagattgtctttgcaataacagcccctcatctaggaaaggaagagctaagttttagaatcttcttgacaatcttgggtttgtttctagatttttctacttggtagcactttacagccatttctagcaaagaagcacactttatctttctccagattgaaatgttttttcttttctgttgaggtaggtgacaccacaactgattggttatcaagggccatttgaggaagacatgctacttaagcaaaaccatcttgaaggcaccacaaagaatggttttaaggagcagcttaagtggagtaaatcaaattcaaggtcactcattactcaagctctccctaacactgctgagctggaaagcaaattatctgagtcaccataatctgaggtgttttttatgttacattttgctatctctctgtttttgcaacaacaaagttctaagttgatctcaaataaattacagttttatataacaagggaatctgtgttaacataaatgatggaaatcacttcttcctacagagaagagaaggagtatgagggaactaacattttttgcatcctgaccatgccccagactctgggctcactaggtaagtgtgccgtctcatttaatttcactagagcatatcattattctttttttytttttttttttttttttttttgagacggagtcttgctctgtcacctaggctggagtgcagtggcaatcttggatcactgcaacctcctcctcccggattcaaacaatcctcctgcctcagcctctcgagtagctgggattacaagcatgcaccaccatgcccagctaatttttgtatttttagtagaggtgsggttttgccattttggccaggctagtctcgaactcctggcctccagtgatcctcccacctcagcctcccaaagtgctgggattataggcatgagccaccacaccagaccacattatttctatttttaaatggggaagcgagcctcagagacatcacacaaatcaaatgttaggatataccaaaaacctccaaaatttctgtgctttttcctaaaaagcatgctgactatctagtaccctatcctactgctattgttaatattcacctgacataaaactcaagaacagcactgtggctgcagtagagtcagggtaatccaggatgtaaggagcctgtctcttctccccaggtgctctctacttctgcatagtgaggttattcaggccgagcctcccttggggctgagccaccacctgtacaattcctatcttaataacagcagcttagtgcctaaaccttggaaaggaacaatcctgtcaggctaaatcagaaagtcgcatgccaatttataattaattttgtgagatatyccaggacaaagactgtgaaaaggtttttgcatgtcttttatgataactagtttcactgaatrgactatttcatagcccagaaagtccctgtgtgwccaaagaatcagaaatagaaaatgtggcaccactaaaggatagtttctacttcacagattatgatgtgatctcctgatgatttttccaatctggagaaccagaaatgattgcttatactcmgagctccatctcatagatagtgctatagaaagaaaattcctattctctcgactcttcttttttttcaccctttggtaacatccaacccctaagtacctgtgtcctgtgtacctgtttggtctgtgaattttgagttttaagtattccaccctgaaaagtgcaaaaccccttctaaactggagcagaagaatttggcttcattatacttttaaagtaggctttgtaaaaccctttcttgcttcccgctcagaatggcattttagaatatggatatctcacactgaaaaacctagacatctgtatgacccttttagtgaaaaatccacccactgacccctggcatggtttcaacagttcagaagcctttttctagcacttcttaaactaaattcaacttaacctaactagtgactttgcatgtttgtgtgtgtagatgacagaggtcaagaggaaccaacttaagaaccgtggtcaccttttataaatgaaagcattattgctgccgcaagaacctgacaacattttgtgatgtgatgctgttaatactataagcctgaaaagagtggggactgtcttgacacttagattcacttcctgggaagagaaaacagattctgatttaattatcttatggctgtctatatttggctattttagagatgagactacttttatcataacaagagattgtttcaaatcaaagtaactgttttttaaaaataccttcaatatattcacttggcttttaaaaatgtcagtttgaagaatcccttagcagtcatgtaaaacaattttatatatgtgtatatatgatatttataaattgtatatatatggcttgaattattttcaaaacttagtaattatyagcagaaaatagaactcagatggaaaacagtaaccttagaaggcagagatctaaactctggaaacttacaatatgtttgttctgttaaaaatgacaatgttattgtccaaaaataaaatgaaaagggcctttagagtcagaaaaccaggacttggatcaattgcatgaccgtgggccaatcactttaccaccctgaagaactgttgcctcattggaaaaatggytatacaggttgagtgtcccttatctgagatgcttgggtctataagtgcttcagatttcagatttttttgggttttggaatatttgcattccacttaccagatcagcatcccaaatctgaaaatccaaaatctgaaaatttttgagtactgatgtgacactcaaaaaaaaaatgctcattggagtattttggatttcagatttttggatttgggatactcaacctgtaatagcagtactcacctctttgagttcttgtatgtttcaaatgagccgtgggtatgaaatactcagtgtagagtgcacacacatgaccttggacagggtcactccacctatgcacactcaaggcctcacacactcttttttatttcctctacttgtctttccgctgctaaatccctagaacctaaaatagtgcttgccactttataagtgcacaagaagtacttatgggaggcaggaggacagagggcaggtaggtgggttcttgttttgtctgatttccccagtgtccgagtctcctgctctctgcctggtcccttcatattgatgacttggtagcactgcctgcctaagaacttggtttctgtttcactcctggattactgtttcatgagtcaaccatctggctctcgaacaccacagctccccagcaagcccatcaccttcccaggtaaagtccatgctccttagaagtcactcccacctctaagtctggccagtgtgccctttgattaggcacagctatactatgtaaaggcaaagggtgtcattatcatcatagtcagaaaaagtgagggttgcagaaggtggtagtcattagtagtctttacccaatatttctcccccctttctgggtacataaaagaattgcactcccctgaccccttctagacagatgtggccacgtgagttgctttaatgccagcttgtgagcacgaacagacatgtcactccgagcataagtgttaagaggggaatttgccacgtcccctttgcctgtcttgttgaactcggaagccagtttccgtgaaraagcattagtatcaccattgtgggggtagcactcccttgatccagatcaggaacatggggttcttcccagctgtggtgctcccttcctgtttaggcctcaccgggaaagtggggatcctacgaggatgggagatcagggttccattctcagaagctccagactgaagtgcaacatgacctccaagtcctgatactgagaatctttctgatgctaatactttgtctttgacaagtcattcatgtatgatttaagaaaagagctgaacaattaakaagagggatgatatttgtatatactatctcagagattaccaaagagaggagttttaatttgacttccaaagtttgagttggaattttacacttctaaattagatttaataatttttcaaagcttttgaaataataggaaatttaccaagaccagaaacctcaagtcaattacatcgagataaatgccaatgagagaggggaagaaaaatacataaactttacaaaaaacagacactttcacacagagatacacacacagacatgtgatccatatataaaccttttctactaagcagaatagaaaccaaaattttttttattacattaataaataaaaagaaaagagaaaccagattcaatgctaggccattccagttttgctccagcctgtgtctcctaaacagcttcaggtgacttcagtggtcttccatctcctatttgaaaagcgtgttgttgaactagatgacacctacagccatggaattcagaagcctattgtcactttaaggtgagtgggaacacattttgttctagcaagaagaccaatttaaattaaactggaacattttgaaaaaaaataagcttattgattcacttgtgcctgactccttcaaaacatcttttgagtcaggttatgacaagagacataaaaataaagttaataataacattgaatgcaaaaattaggttccaagaaagtacaagaatgcgaatacacttgctgaaagggaaaacacagctgtgattacatggcaaatatggctgtaggtttcttgaaagtcaaagtcaatgcaataaagtttacccatgacagttgtatagcttttaggaaagcccaaagttttcctagtgttaaaagccttttaaaaagactgtccatatggtacatttttaaaaagaaaagaaaggagaaaaagaaagaaaacctaaagaaaaaaaataagcaatgtctctgaataggcaattcacagcaagagaaacctaaatgggtagtaaatattaaaagatgcccaaactctttcaaaattaggaaaatactaattaaatcattgataaagtgtcagtctataatcatcagattgacaaaaactaaaaagttgcataacatcaaatgctggcgaagatatatagaaatggaatccctgataccttgctggtgagaatataatctaacagagctatttgggaaaataatctcactgagtttgctgacatttagtgtggatacacccaacaatccaccaattctactgctaaggaaaatactaattaaatcattgataaagtgtcagtctataatcatcagattgacaaaaactaaaaagttgcataacatcaaatgctggtgaagatatatagaaatggaatccctgataccttgatggtgagaatataatctaacagagctatttgggaaaataatctcactgagtttgctgacatttagtgtggatacacccaacaatccaccaattctactgctaaatataccctccacaaatcactcaggtgctcaagaataaggtgtgttcatgttcatggcagagctattactgttagtagacttaccaatgtatgaatagcatggcatatgatggaatgtaaaaagcaatcacttagacttatatgtagcatcgtgagtagatctttaaaaacagggttgaataagaaaagttagaagatacttatgccacagtatcatctatgtaaattaagcacagtgaatgcaaaaatttttcacatcttctctgtgtgtgtgtgktgtgtgtgtgtgtgtgtaaaaggtagaatggatgaacatatatattataaatattatatatttcatatatatataataaaagctgactatggttggagggggctgtgagattagagacagaagataatagagaacaaagtaaaaccaaagtaaatgaaacaaaatagaagcattctgtggattgacgataataaaatrtcatgcagttcacaatcatcttaaattttcttatctaaagtctatrtttaaaaaagttttctgaacatttaaaagttgaggaaaaaacaaaattaagaacatgtgaacaatactataaaaacaccaactctgtttgagagccttcatgaaagctcagcttgagtctcatacaatgtgaacttactgtagttttaaaggattagtctttctcactaggggacagaaaatgtgataatacctccttacagttactgcagttgaggacagaactcattcatttgagttctgtgttagtctgttcttgtgttgctataaagaaatacctgagaggctgggcacagtggctcacgcctgtaatcccagcactttgggaggctgagacaggcagatcaccttaggtcaggagtttgagaccagcctgaccaacacggggaatccctatctctactaaaaatacaaaaattagcctggcatggtggcccatacctgcaatcccagctacttgggaggctgaagacaggagaattgcttgaatccaggaggcggaggttgtagtgagccaagatcgcgccattgcactccagcctgggcgacagagcaagtctcggtctaaaaaaagaaaaaaagaaagaaaaagaaaagaaaagaaatacctgagaccaggcaattttacaaagaagaggagtttaattctcttgaggttctggaggctgtacaagcatggcaccagcatctgcttggcttctggggagacctcagggagcctttactcatggcagaaggtgaagcaagagtaggcatgtcacatggcaaaagcaggagcaagagagaaagagagacagtgggaggtaccacacacttttaagcaaccagatctcacaagaaatcactcactgtgttgagcacagccccaggctatgaaggacttgccctgatgacccaagtacctcccaccaggtgtaactgctccatggattctccttgcctgctgcctagacagagccgatttatcaagacaggggaattgcaataaagaaagagtaattcacgcagagccgcctgtacaggagactagagttttattattactcaaatcagtctcccccaaaacttggggatcggagtttttaaggataatttggcaagtaggggctcaggaagtggggagtgctgattgcttgggttggagatgaaatcgtaaggcgccgaagtgagtttttcttgcggtctactattcatgggtgggattgccgagctggttgaaccagtttaccagtctgggtggtgtcagctggtccatcagaacagaacacaggttgtgcaaaataactcaagcactgatcttagggtttacaacagtaatgttattcccaggagcaatctggggaggttcagactcttgcaaccagaggccgtatggctcctaactgtaatttctaatcttgtaactagtttcttagtcctacaaaggccgactggtcccccgttaagaaggggatttattatcatctttgtttcaaagttaaactatgaactaaattccttcccaagcttagtttggcctacacccaggaataaacaaggacagctgagaggttagaagcaagatggagttggttaggtcaggtctctttcactgtcataatttcctcagttataatttttgctaaggcagtttcacaggctccacctccaacaccaaggattatgtttcaacatgagatttagtggggacatatatccaaactacatcaagtcctaatttatatgaggtcctcctccccagcccaggacctggcacataacggttactcaagaagtctgtagaatgaatgaattaacattttaaaagcatagaattattattcatgtagctaaaccttgggacgataaaccaaaaataaaattcaaaggcccctcacaaccatctgaatgtacttcctcctcagccaggcgctmtaaaatttaacctgaaagactggttcaggccatgacaggaagtcgggggttggacatgcctcacaatacccctccagcattaacatcaacacagaccttaagtctggtgagaaacatttacagtctattctctctgaagcctgctacttggaggcttcatctgcacgataaaacctaggtctccacaacccctaccataacccagacattcctttgtatagataaaaactcaaccagttgccaatcagaatatgtttaaatctacataaaacgtgagttgtcccacccttccagatcaaaccaatgtaaatcttacatgtattgatggatgtactatgtctccctgaaatatataaaattatatgccctttataggtcatagaatttgctcttggtgaaatttcaggttttgggagggaagggggtgtgtgcgtgtgtatgtgtgtgtgtgygcgcgcacacgcgcgcgcctatgtgtctcgtttcctagattccttggacaggcatagccaggtaccctggttaaagattgatcctgcaacacagaagaagtatctacttaataatctagttaaatgatatattctaataattagaataaaatatttaaatcattagaacaaaaaaattcccccaaacaacctgactatcttaagctacagaaacaaatctgtgaagtgccaataagttatatttgccttatatggacagaatattcttccccaaagacattgaagagttataaaggcaagtctggaaaatacacatttgcataatgaaaacgaaaaggacttttcattttaagaagactcttttgcataaaaaattatatcttgtaagtatatgaaaatgtgtatttataagcttttaatcagataaatcttaagcgacggaagtgtttataggttaagtgtcagaatctattttggtatgaagaccactgagaaaagaagataaagcatctttgaaattaaccatataagcccctggataaaatagattctaatttatataactttataaagtaaggggcatcttctaatgcataatgtcgggaaaatgtctttgtgattagacggctggctgcaagatgagcatgcccagacactcagaggaagaggaattggatcattagatggagcagaatagactgtgctcagaaatgaccttcgcaagaattttagatgttgattactgtagttgaaagagctccaagcaggaagagtcattaattttgaaaaaattcagtcaatgatgtttttcacttctttcagctgcttcacacagactaattatttcctttttaaagccttgagtttttctgtcaaattcttatgtatagaatgatagccctttccaagtgagtggggaaccctcacttattgaaccttgaccccccaaatcggagtaccttttccatctttcccctctacttttgctgtaaagcttaaattcagaattcgaataattaaatctaatgacgaagtcataatacagatatctaggctgaaagttcttctgctctgagtggtttattattataattctgtatttgtcttcagccttatttaaatcccttctgatggagtttacatccactactgatcattcttccatcctaataaccactcatttattcattcgacaaatatttgttaaatgtcctttatatgcaggttacatgggaagtactcattcctaaatattttgttatttaaacttgccggttttagcggatgctgtagttggcgacccagatactccttcagagccaaggtactcgttctgccagctgctggaattggtggcacctgacagctctcagctgtatcccttctggaaaattgcctttggccaaagggagctgcctcacacgaggtcatgcttcctccctgggcagcccacatccaatgtctggccactgcgggggatacaaagactcatccccactgcttcagtttgggccagttctgaagggcatcccagctcgggactccagcgtgcccctcccacccgatccttcttccttcactgctgtcatagtggttttgcccagagcacatcccagtggaactccccacagatctccatctcacaatcagacctccatggaagcaaacctaagtcagagtaaaccacagcatcacttgtcatagccaatcttcacagtccctgctatttctattaatataatcgttgttagtatccagagaaacaatggatattttggttaccaacctaacttaaggcatgtgagtgattttctgcgtccagattatacttaaagagagtgataagattaatgctgtctgctagtatcttttgaaaagcaaactgaatcattaactggtccaaccgaatgttgccaattgatgccttctccattgaccaactttctggaaaaaaaaaaaaagtatagcacattaggctttaggtagacttactggtagattgtttcactaatcggcaaagcaaacattgataactggcaaaccattcacctgagagtctttgtttgtattatgcaaatgaactacttcctcttgtctccgctgtattctgcttacttatagtgaagtttaaggctgagccaggagagggcgagagctccaccctggagggcccttgcaagataaacagcagtttcagcaggggcactctttgctttatttgtaacctattgctacattgggtttccagaaattgtttactgatgtttatttgtttgggagcattttttgggtatgtgcttgaggaaaatgagtaaaaatccaatacctttttctgtggtagaagattaaagactttctttaacttttttgttagaaataattattttatttatgctgaactccagggaaaacaggatatgaagtcccaaaccatttctgctttctttctgagtattcagtttatcaaatatttattgagcatcaaatctgtatgaggattttacacccttggtgtacacgagtgaacaaaacagacacaagccctgccctgagttctactttctttgctctactaccctgagggagagagaaggaggagtgagggaaggatgcagagatgatgtgcaacatatttccaggttttctgcacaggcctgcttttaattattctgtcctgttctaagaacacataactcacttatttccttagattatatggtcacttttattttgactacccaaacgtgatctttggtgtaaataagactgaaaattctcacctcttattcatctgaaaatattgctggggagatgaggggctgaaaggtgaagggagggaactagtatttattgagcctttagtatactccacgtgctttacatgacatgcatttaatctgcacagtcaatctgcaagctggatatgacttttatccctactttatgtatgagaaaactgagactgagaggttgactaaatcactttgcagagatcacacaggaagtaaggcactgaccctgaactgagctcaggagccctgccttctcccttgcagtgctgactccgctggagcctcgcaggtagaagtatcacacttctggtctaccaaacttgtcagcatacctagagcttgagaaagattttttttaattcaaggaacacttacgcaggtcttgaaaccagtgtgcttcaaaatgaacttgagcaatagagcctcctgggcctaagaaattcagaagaaaagtattccaaagatttgtgtaatggttaagccttccttcatgatgatagccacaaacttccccaagggtaatctgttgtggctcagattcttctctagaagcttctcccaaagaatgtacacaaggttttctgtgtatcctacccatccagccacttctctcccatatatctttgaactgggaacaattccacacttaaatagggaagtgtgatgagaaaagactgatgataacaggtgaggccgctcaccagcggctgccttggtggtctgggaaacttgttttggagaagttatttgaactagtaatttatttatattaaaaatgaacaactctgaagaccactgtagatttatattgcttttatattttaaaattttgtgttctttctcctatataaaattgaaggctaaatatctgtctctagggaaaagaagttattcagtcatactggaaaggaatatgaaagggaaggcttgaactgtagttagatacttaaatctgctgatagcatgtgttcattactcttcagtcttaaagttggaaaattaatgaattttctgaagccaaaggaaggagaacttttgtttttcatgggagaattaaaatatcaacatctatacaatattatttgtttacctttatatatcttgatttgttccacaaagaatttggagtggcttgtaagarttgttagctcaacagtgggatagattgatggatagagatataaataaaaattagtatcattgtatgatttttgttatagtgtgctatgcaattgttgacattaagctgatattcctaaaagccgaagcaaagaggaatactgtatattatgtcactcatattttgtcctgaaagaataaaattcttcagtgaagcaaagattttcctgacacttaggtctgacaaggacattttttctgatatgtcgtagccagtgtttttcaatgacattctgacaaaaaaagtgaaggcaggtgtcatgggaaacttttttaaattttccctaaaagcaaacaggatataatgaccaagtccaactcaatggaagcaatgttctggatacattagaaagtgtgtggtcaacacacacagcttgctagtagactaccttaatttccagagtaaggataccaaaatcatagcccgtggcccagcagcttcctcaccccaacttagggtgtgtggatccatcatagaactcttttctgcttggacaaaactaggctcagatccatttcaaaacagtgctcttggtcttcactaccaattgattagagatggcaaaaactgaagcctatttttcatcatggacagaaccctctagggcgtcaatatgcacttcaagagagagcacaggcctctgaagttatacacaccattatctctgtaagtctctctaagtgtttttccagcgtgggacttcagagctttcaatccacagaagagtcaccgtcaggaatgcattgaccacacatcctttaaacactttctctttaatatttctgtcaagagctttcactaaaaggtgagcagcaaacagttcaaaggcatgttctcgcaagagtctgggcccagtgttctgtgctgttaataaaaggcagggccatatgaactaaaagatgaaagcacaccatccaccgacacactctttagaacttagagcctctcccaggctggcacctggcatccacctgcacctggtgaggttggggtagaacctctgcaggaccaatcaaaaatacttccgcagtgtctactgggtgccagaaaatgaggatatggtgttgaacaggtgcttgtccagaatggctctagtctaatatttacactataattaataactatttgggtctttttgtttgtatttatttttattaatatacaacarttgtacatattttggggggatatgtgatattttgatacctgcatacaatgtgtaatgatcaaatcagagtaattgagatattatcaccccaaacatttatcttttctttgtgttggggacattacagttctttgcttctagctactttgaagtgtacaataaatttttgttaactgtaatttccctagtattctatcaaatctaggacacattccttttatctgactgtactttcataccccttgaccaacatctcttcacccccacaaatcactatgtttgttatttgctgtgaaggataaggatggctggacttgtccttaaaagttggctaagtaggccgaggcgggcagatcacaaggtcaagagatcgagaccatctggccaacatggtgaaaccccgtctctactaaaaatacagaaattagctgggtgtggtggtgcgcacctgtagtcccagctactcgggaggctgaggcaggagtatcacttgaacctgggaggtggaggttgcagtgagtcgagatcatgccactccactccagcctgggcgacaagagtgagactccatctcaaaaaaaaaaaaaaaaaagtgggctaagtatcttccaaaacacaaataaaagaacaaacatgctcctgaaattctcaccaactataccaagtatacggtattgattttcatagtctcttacagattgatagtcatcttattagtttaggaataaataaatatattgtttatattatgaactgttctctatttatcttgccagcttaggactatagaaatatgttcgttatgactgtggtcataaaatggttttttggtggaattcagagaatagattactcaatcatcataagtagattcattaaagttacttttaaatatttaatagttaccatcagataaatccacaaatggacaacttttaaggaattcagtgtttcataattttacgattgttagaagcatcctattgcaatgggggacaaaagtgtgtggtggctgtcatctggtgctttctatttctccggaagtatgagaaacctgcactgaaaagaaaaagaaatgtcagagagttgaggagaatggagcatatagaaattattattgtgatttgtcctctttacacaaaagcagagaaagcctctgacaactgcctacattgactaatttagtgcttgaaacttttaaccacaaacagatatccaaagtgcactacccatttgaaaggaagactgtagggtcagactgtctggatttgggtccagctccttcacttactaactgtgtggacctgggcacagatcagtttccttacctgtgtgagggaaaccctgtgcctcagtttccttatctctatattgaggttagtaatagtccttaccttagagaggctttttaaatattaaatgattgcgtatgtaaatgcttataatagtacccggcaaacaataagcaagcatttgcaatcatgatttgaggtaccccaacagcacaagacacactagggctaaaacgaacattcagaataaatgaccccaatggaaacagaaagaatttttttaaataagaaaactttcagaaactacaacttaatattactcarttagttttcacagaacattgaaaggatattgcaatcacaatagaagaatataaatagggccgggaccggtggctcacacctgcaatcccaggactttgggaggacgaggcaggaggatcgcttgagctcaggagttcaagaccagcctgagcaacataatgagaccccctgtctctataaaataaattctttttaattagctggccatggtggcgcatgcctgtggtcccagctactcaggtggctgaggcaggaggatcctttgacaccatgagccaagattgcgccactgcagtccagcctgggtaacagagtragaccctgtctcaaaaaaaaaaaaaaagaacaggagcaatctgttaacaagatagtcaaagaaaatttatagaataaaaagaaaaagacaaatgtcaaatacatagaccagtttaaaggacccacagcagacagcctgctgctcagcaataccagctttctcttcctcttgtgccacagccagactgcatttcccaggccccctctgtagcttggggatagccagtggaacctgaaaaggagtatgtctcatgcccaggcctggctgctgaaactgtccacagtgccattccgtgttgtgaggctgtggtgcagttatacagtggcagatgtttttgcagtggctgggggaatctttgtgtggaagtggcagagggggggatggcaggtgggcaaaggtgtcagtctgaaccatcagtgctgctctgaggagcctgaactttgcctcgggccatggggatccactaaagtctgtgctatgcgtagacaggcgtataacaagcagatgtattagaacattcactaactagaatattctgagaatttcagaacattcactcccttggctgggggaggacactgaagaggccaggagaggtgggcatggcactgagactggaagcagttaggaggttttggtaatcaccaggtggaaaaggattgggcttgaattcaagcagtgttagagggatgaaagggagagatggatgcccaaggacattgtagagtcaactgttctgttgggtgtggggagttgagatgccacaattagaaataaatgtggatacaggtctcatcacatttggggatgcatcatgactttgggtgcttatgctcatggctgttattttctctgagaagttagaagatttttttttaatttggttttgtgttgttgttgttgttgtcgtttgagacagggtcatgttcacaccactgaactcacccaggctggagttcagtggtgtgatcctggctcactgcaggcttgacctcctaggctcaaaggaacttctcacctcagcctcccaagtagctgggactacaggtgtgcaccaccacatccagctaatttttttatttttattttttggtagagacaaggtttcactatgttgcccaggctggtcttgaactactgagctcaagcaatcctcctgcctcagcctcccaaagtgctgggattacagacatgagccaccatgcccagcccagaggactgttatcagcaccctctccaccgccacattctatactctgtccatcccaaactattggttatttcatttattgctgcccctgtaggtactattgctctgtctgaaatatgcacatccccttgacaatctagaaagtttctaaacagccttttacctacatcaagtcttctgggaaggcttctctcacttcagaaaagcctggctgcaccccccttgagccttttctctcccacgccctctcccttccggtggcacttataaaagcggggtcaccatgctcacgacctctttacaactagacagagagcgtctgatggcaggtaaggattttttttttttttttttttttttgaggcggaatcttgctctgtctcccaggctagagtgcaatgacgccatctcggctcactacaacctccatctcctgggttcaagtggttctcctgcctcagcctcccgagtagcagggattacaggggcacattaccacgaccggctaatttttgtatttttagtagagacgggatttcaccatgttagtcgggctggtctcaaacttctgacctcaggtgatctactcgcctcggcctcccaaagtgctgggattacaggtgtgagccactgtgcctggccggagggattttttttttttcatccttgtgtttccgatgactagccaagggcctatgataaataggtgctcagtagacatttgatgaataagataattcattaatgagaataagggacaggaaaaagatgcggatcttgaagtagtagcatccccacctccattcttatgagaatagaggagctaacgagcaaccctgaaaggaccaatagcattgaaaatttgataaataaagttgaaagcaaaaaatatatacattccacacagttgtatgattcctatgctttttgttgcctcaaatgcttcattctcatgattctttatctttttaaattttgtttattgatttttagacagagtctcactgtcactcaggctggagcgcagtgacgcgatcatggctcactgcagccttgacctcttaggctcaagcattcccccaacctcagcctcccaagtagctgggaccacaggcytgtgccaccacacccggctagttttttaatatttttttgtagagacagagtcttcccatgttgttcagactggtcttgaactcatacgctctagcaatcctccygccttggcttcccaaagtgctgggattacagcactgagccaccgcacccagcaatcctgatgattcttaatctgattttacttttattttattgtgttgccttctcagcaaacactacactaaactgtgtagcaatcaaagtaacatcagattaagaatcatctgattacaaacttttatctcaatggaatatttagagaaatggtgtgtaaccctgtatcatgtcctgtggtagagtctgttacaagaaaacaagacaattgtgctccttgtggatcacagatatgctcaagttctagaatagaatttgcatgatcttgtaagtagtgcagatcatgacttgccctctttacatctttagtctttagaaattcagccagatatgggagtctaagaatccttctaacctttggagctcttctcttctcctctacctccctgtccatacatgatccagctccatcctgctactgttcccttggtccggtgaggagactcattcacctaaaggttcccattcctgggagggtggtggatgctgtcattcttcagcttgaaatcactactaaacaaacccatccctaccatgggaacatgaatcccattcatggcataacttccgtttgttattatgcaaatattttctacttccaatagagtgaggagaggaaggaaatacagcaacaaaggaggaagagaaccctatcctgccatgggcatgttatgacagatctgtgtcctccaggagactttaagttcattgagggaaagcaccccaccttcttgctcctctctatctccagtatctaggagagtaccaggcacattcagcaatattgctggttgagtgaatgaggaaatgattgaataaacaaatgtgtaacagcaaggcaatgtttgctgctgctgtggtggttgtcccagtatcggctgcaatacagtaggaaacatggatctcaatgaatgctttctgtagttaatgctattcatacaagattagtgatgccagacgggaaagcagcgacctgatgatccgcatccgctcatttgcagattgggtcagaagtcaagaggagcatggagcgcaagtggagtctaaagagactcggtggcggccaggtgcagtggctcacacctgtaatcccagcacttcgggaggccgaggcaggtggatcacgaggtcaggagatcgaaaccatcctggctaacatggtgaaaccccgttctactaaaaatataaaaaattagccgggcatggtggcgggcgccttgcagttccagctactccaaaggctgaggcaggagaacggcgtgaacccgggaggcagagcttgcagtgagccgagatcgcgccaccgcactccagcctgggcgacggagcgagactccgtttcaaaaacaaagagagagactcggtggctgtcactcccttcccacgtcctgtagcaaggcttcatcagcagcagcatttcttcttcttcttctacctttgaataatccagttcccattttgtgcattggtttaaaagtcagaaaagtaaaaacgaatacaaaaaagcaacatattgagcactgaactacctaaatcaaaagcatatggtagttgtataggaattgttatttttttccccgtcactggttttggtttttctgcctttcattgtatgagaataaaacactttcacagagcaattggaaagttcaaaattgctaggcatgaaaaatgattttcatttttagacagatgtgatttcttcagaagccatttatatccaactgctgtgcctgtctttgggaaatttaacttaaaaaaaattgtagcctgatacaagacacgacagctttctgtacagagcctttgctaagccttcctgcttggattcaaagataataactatatggcctacaaataccttgcgaaaataggtattttttgtttaactatacctgaaaaaatataactagatgtgcagttttacaaagagatgacaagttgatgtttattttacggaagagctggacataataactttgttgttgttacttggtgtatatgtgtgtgtgaktgtgtgtgtgtgtgtgtgtgtgtatatatatatatttatttatttacatatagggtttggttctgtttggggcatcaggcatccactgaggatcttggaatgtatcccccatggataaggtgggggctactgtatgtcataaagttcagtggaaaaatcccagtgggtgaggagtccagacagaggaaacagcccagcaggatttgttagtgactgattccaattttaaaaaatagtttatgtgataattaagcaaatgaatagtcatattttccaaatgtgggtttttagcttgccattgacagaaaaagaagctgcaaaaaggggaaccactcttacatgcaaaataataatagaaagaaatctcaagataacctaaaaatacaggcaggttgagttcctgagtgaatgctgactaggatccatagtgtttgcacaataagtatttataaatccttgacataagtcaccatggtatgaccgaatagcaagccaatacacacacacacattttcccttttgagaaaactttagggttttattctgatgcctcatagcagtaaaatggttttttgtttgtttgtttgtttgtttgagatggagccttgttctgtcacccaggctggagtgcagtgatgcaatctcggctcactgcaaactctgcctcctgggttcaagtgattctcctgcctcagcctcccgagtagctgggattacaggtgccagccaccacgcccggctaatttttgtattttttagtagagacggggttttgccatgttagccaggctggtcttgaactcctgacctcaggtaatctgccggcctctgcctcccaagtgctaggattacaggcgtgagccactgcacccggccagcaatgaaatgattttaagaaagtaataaaacagcacgaggggaaacgtgggggttggaactcaaatgctcccttaagggtcactcactcttcagccactcttcagaccttggcctttcaacccttccagtcagcacctcctggagctgccccaggagcaagaagccctgcctctgccctgggctccaaagcccataattattccctgggagtcttttcgaaatatctgactatgatgaagataatatgtgtcaccagggttattcttgtattgagtgcttagcatgggccaggcgctacattgatagttttaaccttgttatcccattcactcctcactacagccctatttctatacaattactgtatgtttcttattcagttaaacattgcacttcatagaacactgcattgttccatgaagtgtctgggtgcagtggctcacacctgtaatcccagcactttagtaggccgaggtaggaggataacttgaggccaggagtgcagcatcagcctggggaacagagtgagaacttgtatctacagaaaaattttttaaattagccaggtatggtggtaggtccctgtagtctcagctatttgagagggtgaggtagaaggatcacttgaacactgggggtcaaggatgcagtgagctgtgatcgtgccactgcactccagcctgggcgacagagcaataccctgtctcaaaaaaaaaaaaaaagccaggggttgggtggggaacagaggcactaattttcccagggacacataactcaaaagggttgataagttaggctgcttgcgataactatgattaaccctcctccaactgtgactgcaaaaattcaacagctggagcactcttagagtgacctctgttcttatcaagaaacaaacaactttatactcgttggtgagaacagagtggtagttttcttggggacaaggaaaagagagtattaatgaagaaatgagaaatgaaatggtgcttcccatggagagaagagaatgctggaatttcaagtgcttcttggactttttctaagagaaaattggaacaactcattttctgttctttcaaacacagtttagccctgctctggccctagaagacaaacaggatgcaggggctttgctagtctcccatagttgctattttccctgtaatcaaaatggcaagagaagaatacttcataaaatgaagatgtggcaagaacttactgtccatcattaggcattaaagatggggtaaaaggaactaatacttacagaaagctgagtagcatttcttggcctcagtgttgtcatggtctagtgaaatggactgagtggcacaggaataccaatgtaatcagtaaaagtgaagtacaaagaactagacacacagaggagtgaacaactgtctcttgtctggaagcccaaggaaatcaccatttagagattacatatgaaccaagccctctacaaaagggttcctaggcatccgtgtcaaaaacagacagataaaaaaaaattaccaatacatttgatgcagaaccaaggttgagaactactggaagaggttagagagtgagaaactggattttgaagctgtagcttttaggctccctgagactatggagcacttgattgctgtgggccaggtgtgatggagaaggctcctatcagagcagctgcaatagggatgggaaggaagaaactaaagacacaggtgcacttgacaggagggagaggatgcagaaagggacctgctaaattgtgaactcccgagggtgggcactaacctatctctccatcccagagtacccagtacgtgactcacacaacatgccaacagaatagatacttgttgaataaataattgaactgggtaaatatattttaaaaattaggaaaactgggcagctggggaatagagtatcaccaaaacacaacaaagaaattcagaaggaaagatgtttagaggaaaaaagtgaattcagtcttagaccttttcagtttaagtaattagacataataatttgaagattcaaacatctgagaagtctgtctaatgtgcaaaagaaggtcaagtcatagggcgctcctaaattcctatattttgtcaccccctcctatttcatttgtatgtgaccaggagactaaaacatgcattatgctcccaacaggctaaatctcttctgggatccactgaatgccactagagggtctgctcgagagaattcctgattgaatgacaacggcgctragaacagtaagtcatggttgggaagcagtaagggaagaatggagcccagatatcytaaattaaaatataaaaggctaacgttattaggcatgtacatctaaatttcaaagtaaaaggccaacatcccactacgcctcccgaatccagcacattccacctttccacctaacacacgcgcrcacacacacacacacacacacacacacacacccttccctctgaggcaattaatggacccaaactgacttttttatggaaccataatatagaaagaaatgcctgtgccgaaaatgtcaatgcacacaataatttatcagaaatcaatgctctattctatgtccccaagctcaacactaacattgtaacctcttaaatgtgccttgttgtctgcagcttgaattcctttgtggtttcacatacgttatttggatgaaggctgaaactctcacacactggttattatagactgtgcagttgaaattaatagaatagagacgccctctgtctgatgagtcactatttttcctcttctgactcrtagtttttcttttttgtttttttcacattattgatcagtgaatagtctagtaatctaattcatgtgtatttcagggctaaaaatggaacactaaccttgaatggggaaagcggctgaatgatgttaacatcccggtaaagaacaggttaattcggaagggaagggggaagaagggactccccggagagcaggaggaaggcagagggcctcgggggtagctgttccccgagtgattaggtacttatatcatgtgctctgtcatatccaggaaacaggaaaagaaaaacaatcactgggaaaaatattaataccatagagaggagaaatgtgtttcaattacctcaattcctatgatccttcattagtaatggaagatacatcatccacaatagagaaaacataagtgcctcagaaatataaagttgtctatttctctgaagtcaaaacgacaacatttttgcttatagcagaaatgtctactaacttacaaatgaaccatctataacaattatttgtttaattatatgaccctcagttactaacgtgccctggacactgtagcttctgtgggttcctcagaaattatcctgaatattatagtctgttaagctcttacatcatacaccaggactcaagtcagaccatcagttctttgacacttctctgtcttcaaatcatcttaccaaatacctgaccatcttccttccttagagcctgaggctgcaccagtcctggcattcatatagagcattaatacacgcacacagcgcctttatttttctgtgcacaagtgaagataaatacacttatgaaattagcagtttatggtcatttccagcatccacttgctgctccctatctcttacatctcccttcccagcccctctgccttcctgtattctctccctctattaaaacagccacagatctgatgtcatcagtttttctttgatggagacactttcaccccaaatgccacctctttcaaactttcccattcaataccttttatctctacctgtaaaatgaaatactttgttttctgtttagagytgaaagaatttcttagctagactttaagcaggaataacaacaaatgctttcaagataaatctgttaacttccaaaaaaaaaaaaaaaaaacaatgatattaagcacctgaaaaagaagatgggtccaaaaagaaattacatccttgggctcctgccttcttttctctcttttctcctatcccttaaatctcagtcagtcacttcccagtcctgtgcctgaggatgtccaggtgatctggacccatggccaattccatggcaccttccctgtctctaccaagagcagaggatccaactacaacccggaggaggcctgttagaaccaactgggaagcttttatcaaactattgtttcctcccagtatattcccccctcattttaatatgttcccacgaggggtcatggttctctaagacttatcctctaccaccctggtgaagaatcagggctcaaagcttcttaggggaggaaaggaaggagagatgtttgtgactgtcctgtagcctagtaatcacacaggagcacttcagatggacaatccaccttcaactggccttgtatcagcatccagaacactcaagatagtggcaacaaagagacacgcagagacttttcacagaccgggaaggggagagagagatagagacctggcagtgtagaaagacatcaatagatccctgaactgtgcacatattctctgttgagggctcaagtattaacaacatgcatggacgtcaatatgaccatgctgattaaacaatagttgaccccggaataatgtggcgattaggggaaccagccccaaagggtcacaattctgtttaatttttgactctccagaaacgaaactactaataatctactattgactggaagccttactgataacatcgtcattgaatacatatgttgtatgttatatgtaatatgtattacatattgtattcttaccataaagtaagctagaggaaaaaaagtgttattaagaaaatcataagcaagagaagatatatttcattaactggaagtggagtgggtcatcataaaggtctttatccatatcctcacgttgagtaggctgatgagggagaagagatgggtctggtcttgctgtctcggggtggcagcagccggggagaggcagaagaaaatctgcatgtaaatggacctgtgccgttcaaacctgtgttcttcaaaggtcaactgtatagtgcatcagaaaacctgttaacatagacaggcaggtagatgcttactaacaaagtacaacagaaatagactaaaagtttggttgcttaaagtaatttaaaagtttcgttgctgaaagtttggttgcttaaagtaattaggaaagtggtggcaaggtggcataatttttccacctctccaaatcaccccatggaaacagagcaactaagatagcaaaagcaagacctcccagacaacatctccaataaagcagcgggaaaacacatccctataaacctccaaatatgtgtgggttgtaataaactactggtgagattaagacctgtacagtgtcttcaacacatcagaggaaataaaaagaggacaaagggacttctgatggccccaagaggcagagaaacaaaaacagttcacaagtatccactgtaaggcttggtgggccactctgggaagggcaactgaaacccctagagtcctgccgcctccaacttgtgggtgaacccaagagaaccagcttgtgctggaggagcctgtgccccatggaccctaaagggacccttaatagccatctcctccacagcaaaaccccacattgaggagaaactactggaatagaatccaaattgagcaggaaatagatgataggagcaaaggaggcaaaagaaagaagaygcagatgcaagtggagggaagagcaaagagccaacagatagcagatacatacttgtaaacacatccaaaaataacagaaaaggcagctctaaatctctagagctaggaagctatcctggttcactctcctaagagtacaagaaaactcatctcacttaaacattaataaagaaaaaaatggccatcgaatctaccataaagaaaaatgatttgaggaatgtaatgtctctgcagacaataaaagcatgccagaaagatttgcaaacaaaacagaagaaaatttagcctaatattttaactcaagctgaaaaaaaagatagcagcttttaaagaacagcataacccagaattttaagaactcaaaaagaagctaatttgaaaaaacaaagacttcaaaaggagtttatagaaatagaaaaatattaagagttgaagaaaaaacttattccaaaattttagactacactagaagaaataaaatagtgaatgaacacygcagaaagttccttaagaaaaatagaaaagaatgaatatttttaaaataaaaagatttaaaacatacatatgaaaawggcatagaaaataggaataggagaacaaatgaacatataatagaagttcctaaaaaagaaaatcaatgtaatgaaagaacaaatattatcaattataattcaaagactgcttttctgacataaaaatacacttgcccaacatttgaaaggacgtacctggtaaaactggcccagaatgcactacatataaacagtctactaaaactattgacctttaaataaaaagaaaaaaggtttttttggcactagttaaaaagtcaatatcccttataagagaaggaaaatcagattgtcatcagactttttgacagcaatgctttgtgccagaagacaatggtataaaatatttcagaaatattaaggaaagcagatgtgagctaaagattttataaccagcaacattgatctttaaataccatggtcacaattcttaataaacacacaacaactcagggagtaatgttcctatgagcctttcctggggaatttatggagaccaagcctcggaaaaccaatatgactagagaatcatcgacaatagaactggcggtgagcattaagtagacatttttttgtataactcataatgcctgtagtttacgagggagagagtacaaaatgtgatggccatttgctctatatacaattaactgtcaaaaaatgaggaggggcataaactggaaagagaatataaaaagtagaataagctctgtgattgcctcaaggatatcaatggagaataaaaacatatccgttgaaaatagatgccagggaacaggggagaaagtgaagaaggggttattagctaatttcaattttattcatagtaggatgagaaaagtaaaaatgggactaaaggtattatttacagatattaataaaattatagataatatgaagatgttaataaaaagggctcagaacaaaatagcacaaacatttctaaatacaaaaagaggctgggtgcagtggttcacacytgtaatcccagccctgtgggaggccgaggtgggaggaytgcttgagctcaggagttcaagaccagcctgggcaacaaagtgagaaccctattccctacaaaaacatttttaaattagccaggcrcagtggcatgtgcctgtagtctcagctgtttaggaggctgaggcaggacaatcccttgagtccagaagtttgaggttgcaasgagctatgatggcgccactgcactttagcctagatgacagagcgagaccctgtctcagaaagaaaacacaaaacaaaaagataatgagagagagagaacacatgcgcacaagcaaataatgtaggcaagtgcttctcagactctgtagtgaagggccactttttccccccaataatttgtaagcgacacttgaaatatacaaaatcatakgcttgaatttagtggcaatatcaaattactttaaatgtttctaaatgtgttttgttgttgttgttgttkttgttactttctattcacaagtcatcatagcttggtagcaaacagttcatggagcagccttgatattgaccacataggaaaagagtagaaatgtaaggcaataaagatagaggtagtcacgggtatatagatgtgacgatgtttgcatgcttgtatggacagaaatacatgtaacaaatatgacaaaagtgatgccaagcatttggatcctaaaaataaatttactgattaaatttacatttataaaaagatttccagattacctaacaaagcaaaacccaacactccaggttatatacatataaacttttaataatamtatatatgtttctttcaggtggagaaaagtctgtatagtatgckaccaattatctaataaaggagacgggataaaaaatacaaatatatatcaattttgtataatttgtatacaaattatatacaaatatatactaatggacatataaatcacagcatttaaaaataaaatatttaaaggtagaggaaggaaataagattgaggagacagggagaaaaactagacttgttttgtaaatttgactctagagtcatgtaaaactttgcattattacaaagcaaaattcaatttaaaataaagtgattcctgaatatcaaaagtaaaataagcctattkagcctgtctgtccagtagrtggcagaacagcaccaaagggactattcccaagtgaccgtaaaacacartaatttgcctgttttagcggaatgttatcataatgacaaaaacaactgcaaagtatcttaagctgatttttgtaatcattttgctrgtggtagtcttctatttattcgagactgttgcacatgtgtattatgaatamagcaaatgaataattatattcatgtcaataaaatttgaaatttgacagggaaaaggacactgtgaaaaaagtcctctacttgaattygaataggaaacatcatgaattcatgatgaatattattttattaaaatacatgttttctagctttgttctctgaaaagatggaacgtgctcaacccttcacacacagataatgttctctacataccattttccactaaaaggaatcamaggctccctgaagaaatagctgattagaggtctgtggaaggaagtgtacaagacggacctggaatatcrtaaacggctttggtgatatcagaactctgcaattaagttaactctgcaatgaactgaggcacatcaaatattaacattcaygaattcctaataatactgttaaaataaaatattattgatcatccttggaaaatgcaaggaaaccaaaatcattattttaaaaactggcaaataaaaggaagagatcaaacatttktyctaacttccctatacatattattccaagtaaccaagcagttgatgagatgtttctcttgataaaagtactccatctaataaatgaagaaggaattttaaaatttgagtattgccattttgcaacctttaatgaattattgggtgtagacaatggtaatcaatgactgccaacatcacaaaaaagccaccagacatatgcttctgtatggaggtacacaccaccacctgtggggtattttggccaaaaattgaacctcagtctgatgatgtmcctgggtctactgtattcagtactaatcccatgtggctactgagcatttgaaatgtggataggccaaattgagatgttctgtacacgtaaaatacacaccagatagcaaaaacttaatatgaaaaaaagatgtaaactatctcaataatttttaatattgactttaatattgacttaaattttaaaatttaatatgtatgtatgactacatacataatatttgtgacatattgggttaaataaaattatattattaaaattaattttaattttaatgttttctttttttaaatgtgtattttaaaattttaaattatatttgtggctcatatttctattgtatggtgctgttcttaattctaactacaacttacaggaaatacactggacagaggaacatgttaaatgacaccttacaggaaatacactggacagaggaacatgttaagtgacaccagaaggatagaaacagtaaaactcaggctttagaaaactctgcaacttgaggccctcataaggacttttctgtcctcctttgaccaaactgtttaaccgagcctaggggtgasggggagcgacccaagctggcatctttctctacggagacagattttagaaaatacttttcttgcccatgaatttcttttctggttgatttttatcattttccctttacttacaagaaaataagattgcaaccactcctgctaatgatttagtagttccttttcatttcagtttttgtaaattaggagataattctaagagttactaaaggatgatttatttaagagaactacgtcaaatagcgaatgagttatgggtaacattagacgaaaataacctttcccgtgggaaaggtttctcgaaggcatggatgcaaatataaaatattaaaaaaaaatctaaataaagcttattttaaaatatgaaaaaaaaaaaaaagaaaactctgcaacttatatttctaatccaatttaatggtggagtcaaagttactaaaaatttataaacatgagcactgtaattaatgtgtagtgtagtcctaaacatcaatatctgcaaaatcatagatttgatatctcagtttcattttcactattgctcaaataatgcataacaataaaaagcctatacatttgcattggctaaagtaatttatcaccagtggtatgtgaactgcaccatggaaaacagatatattttcaatttttcaatctttaataatctgaaaacttgattctctcagtttattcagatagaggaatacatagttatgatttctatactattagccttttttaccaatataattaattttaataatatattttgtttgacatatctaaatataaatttcaacatgtactaaatataacaattattaatgagaaatattacattcttttggctttgtactaaacatttgaaatgtgctgtacatttttcacttatagcctatgcaattmaaatgctatatttttattaggaatatttaatctaaatagatatcttaaaatttacatttgaaaaaaatagattcagatacctaagttgttacaagcatacgtaaaagttttcagtgactgaattgagtatcaatcagttttaaaatttaaatcagtgaaattaattaaaatgaaatgaaaatttagaaactccatttctcagtcacactggccacatttcaagtagaaagcctttgtttttaattcactttgtcctaaagctgcaagtagaatttctacatcttatcagaattgacttgtttaaaatatttttcaattaaaacataatacaaagccacttagatatgtaaaatttaaaaattctcccttttctctcttccatctttactgttttccccaaattcgagatcaaattaataaatatatttaaaatgtttctaactttaaaagttaagtattgaattaggcttacttagacttcacttgtaatacagtatttcttacatgtctaacataataggtgctcaaaaatattaggtaatttgtctccgtttattagatcaggaattatttaatagtatctaaacttttacttttgcttttacccatttatgaaaaaaaatcattccagcttagcatgctttaatatcttattgggataaataaataaataagattaaatatctaaataatttacagaaagatatcttacrttctctatagcaaaacactgatgaatacagtgtatatattgaaagtaaatcttggtggtttttttttttttactcacgttgcaccaaagcgagagaacactagggggcagtgtggttagagcagaactctcaagaggcttggaaaggtgcgctgaaatcaccaacagctggtgcgataaatggggtctaatagcaagaaaagaatgcattcgtttaactttactttgtgaagttacgtggcccacatgcatattattcacaaggtcttggaagagacgctttgttcaaaccctgagcccataagyttagggacaagctcttcctggaaaggtctttcttacggaattttctgtcccgaagaagatacaaaagagtagagcattgccagagagtaacaattcrtaaatactaaccccaagtgccagtataatatttagttcctacctcattttaaccttcacttgtatccaccattccttctattttcttctattcacccgggcttctttgcagcacagtcattttaagaatattctgagagcatcttagctctcactccatttcagctcagtgaattctaaggcaacarargtgtattaagtaattaatccataatgccagccactacctaaaaaaaggataaggccaaagctaaaaaaaaawaaaatcaaaagctaggaaaacttattaacattttctaaaattacattgttgttgcctattttaagggcatgagtagtgactttatgctacattttgcaaaaagtattgagcataatcyatagatacttaatgtatgatgaggtaaacatttacacctcagactcagaacaggcagacagctaagttctctcgctttttaaatatgcaatgaattttctaatagtcaagtaacaaatctatttctcttttagaaaattagaatctatatgtattaaagagctgtgctccaaattgtgagtctggcctacttaaatttgaataaatcattctagagagttgacattatttagttttgaacaattcttgaagtctttttggactttataatttagcagcaggtggttttggtcattttaaaagtccgtgattaatgtaactaatcctagttagtgtttagtcatctcttcagatcttttgtacctggaatttctagagcctatttgcctgaaattgtataaataataaatggtttgctgtcctctatatagtggcaagcatccaggtttctgcaactcgaaatttcagctcctctcagcttctatcaggtttgagatatttttagccgcactctgtcagtcagaatcccatgaaagagaatcccattaagagagttgaggtgaatttagagaagggtctgtttatagagcagggagcagggttaagaaaatacagccagagaggccgaggtacccagagmcaagcacagtgggaagccctcgccactctaggcctgaagagtcagatgaagggaaggaacggggtccccaagcctatgggcactagagctgtggacaggctgccatcgcagaggggcagattgctgctgaaacaccagcacagggaggaagtggcacagaaggacccagagctgtctcccccaccctcggcaccccagccagggccttgcctggatcacccggtgccaggcagggaaaagccaagcactggggaaggtggcctaggaaagggagggtcacaggccactgaacattctcactcttaataaacagagttttacgcttcaagggggtctctgtggttcttctctccttatctttttacttcactcaccacattcttaccraaccaaaaggaaaacaacagtggagggaaagtcttacacatgtcaggcttttagacagaaccttttattcctcatctcatatatmttttctgctctataaaaaactaaaactttatcttctcaacatctcgctatgataagcttttaagtgggtcttaagcccacttaaaagatgctgcaccctgattttgttgctgcaccctgatttggggaagcttggtcagtgatcccatgagaagggaaactatgagagattcattctctcctgaatcgcttaggaggtcccattaaagcccctgctaaactcgtcatccccagtctggaccacgtttggttaatttccagtttttcctttccttgcaataacctgcttgaaaytccaccagggaaaataaataataattcaaatgcaaaacgcgttgtcacttttataaaatattgctctccttgccccaccctcaccccctccctttctccccttcatgatttttactgaaaggaggaaagacaaggaaatctcaatggtttcattcttagcacacattctaagtctgtcattaaatgaccgctgattttgtcacatacatatggacaaaactctgtaagaaagcaattgattaaaatcaatgagaatttgctgcgctgaaatggaatcagtgaataaaaatttattctgtttcttttcttttttctaagagtcctctccattattcaaaagaagcctgtcttatcctgtttccaaactccttttccttttctttcccctatgctgttgatttcctaccttcttcccacgtgagtcgccggtgcaagaggggggttcctgcttgggtacccacatcagtaggttttgtctcctcatctgcttgtcttctgaagataaatcgttggcagaactgaaaaaaaaaaaaatcatggaatggcttttttacatttctgccagggggaggctattttgtaatctttttgcagccttcctgtgcacaacccaatcccaagctgacttgattatctccttaactgttaagagcaaaatttaaaactggattttgttacctgccccaggagcagatgctacattgctgaggtgtcttgtgaattgccagcgttccttttcttttacagacaggtcttaaaggtcttccagggaccccctattagccaaataaccttgatagttattacagagaaattgtaattctttttgaaagtatttgtacactcatccatgccaatatttatagatcagttgatttttccaggttgtgtaagttgctaacaatggaactccatttatttatttatttatttagagacagggtctggctctgtcaccaggctggagtacagtggcataatcacggctcactgcagcctctgcctctcaggctcaagtgatcctcccgccttagcctcccagttagctgagactacagttgtgcaccaccacacctggctaatttttgtaatttttgtagaaaacagatttcaccatgttgctcaggctggtctggaactcctggactcaagcattccacccacctcagcctcccaaagtgttgggattacaggcgtaaaccaccgtacccagctgagactccatttaaataggtggcttttatgtgaattattaattttgataaagagaagagaaaagctgatagatcagtgtttaaaaatcattttatgaactaagttcaaaagaacaactagggcctgcagacttccctactttacaaagtagtggcctggccaaggatgttccaaacaagaaatcttttcaaacgtgctttaaatcattaaaataggggaccaatatgagtaaaccaatataatgaggcaaactaagtaggagatttttaatgaacattttcaaggcacagggaaagaagccacaaagagtaacagcatttttctgcacatactgtcttatgaatctagattcatcttgtttattgtggaactatgtgattgggttagccatcaggggagagaagtactttatgatgtaaaagctgagtctccagagataaaaatctcttcaatttgtcatttttcaaaatatcacaaagaatccatgtttccgtggtcttcgataaagaaagcgtgtcaaggcaagatatacacaaaaaaataagtcaaagtggttagttacaatgggataagcaacagctacactgaaaaattctatatgtaatgcagttttctttttgtgtggaaaagagtaggacaagatatgagattcctggtctggagagtgggtgagatattaacatattaaagcaggaatgtctgaaacatgcattgtgtattttccrctgtctcagcccaaatcaggcatagctctggggagaagggagaagggcaataccaaccagaaagtatctctgtgattcttcaggctgcttgggcagtcagcctccagaagagaccccactcaaatctgggtcatccaggcacactggccactcaccacctctgcggtgttatttcaaggatgctaaccccaaggttcccaccactgccactggccaatatctgaaattcccctgacaaagcttcctcattagcataakgtttggactcctgaaatraaccaaccaygtctcttaaacttttccttgaactctatccccccaccggaaatasagagagatgagtaaatacaaatatataagaattctatttaattctaatcatttcaatatttactgaaaaagtctgagcaagacatcagtaaaaaactataaaatctcagaatgggcttgtgctttagagatacaggaaatgaggtcttttgttttttgtttttttatattaatatttactttattagaaattaaaacaaattttaaaaaaatttgaaaaattacctataaagttttatgctgattacctgggtgacaaaattatctatacaccaaacccctgtgacacacaatttactcatgtaacaaacctgctcatgtaccccttgaacctaaaataaaagttggaaaggaaaactaataactccattaaatcttcacataaataacatacattttagaaaaaaaataaccattttgccaaaaaaaagtgagtggttttattttacatttttataactaataactggtttaatagaaggcagctaaattcctatatctgcctctttattcactctgttgcatgtactatgttgtcttggtcaaactgtagaaggcaaatctggctttacatacatatataatgtgagaaaggaggagtatttaatagcacatatatttctggttattcttcttttaatactcaaccaaaactcaacaagtagtaatttctttttattattattattattattattattattattatattttaagttttagggtacatgtgcacaacgtgcaggtttgttacatatgtatacatgtgccatgttggtgtgttgcacccattaactcgtcatttagcattaggtatatctcctaatgctatccctcccccctcccccaccccacaacagtccccggtgtgtgatgttccccttcctgtgtccatgtgttctcattgttcgattcccacctatgagtgagaacatgtggtgtttggtttttttgtccttgtgatagttttctgagaatgatggtttccagcttcatccatgtccctgcaaaggacatgaactcatcattttttatggctgcatagtattccatggtgtatatgtgccacattttcttaatccagtctatcattgttggacatttgggttggttccaagtctttgctattgtgaatagtgccgcaataaacatacacgtgcatgtgtctttatagcagcatgatttataatcctttgggtatatacccagtaatgggatggctgggtcaaatggtatttctagttctagatccctgaggaatcaccacaccgacttccacaatggttgaactagtttacagtcccaccaacagtgtaaaagtgttcctatttctccacatcctctccagcacctgttgtttcctgactttttaatgatcgccattctaactgttgtgagatggtatctcattgtggttttgatttgcatttctctgatggccagtgatgatgagcattttttcatgtgtcttttggctgcataaatgtcttcttttgagaagtgtctgttcatatccttcacccactttttgatggggttgtttgtttttttcttgtaaatttgtttgagttcattgtagattctggatattagccctttgtcagatgagtaggttaaaaaattttctcccattctgtaggttgcctgttcactctgatggtggtttcttttgctgtgcagaagctctttagtttggtcctttgttttttaacttcaaatcaagactgacaagttaacatttgtttgggggatcattaacaaactagttgaagtcttggatggatggttaatgctgaataaagctcatctgttcaagctacacatcctgtttggattcatttgtcatccctgacgagttatcatacaatggctgtgtggatacagcctcagtgtggacacctcagtggacaggaagtcttccttctcttcattgacacacagcctcctgagcctgccacttaccagctctgttcctgcccgtaaaggctacaggaattagtggaatccctctctcctgtgctttgccactttattaaaacacaggaaccctcagaaccttctccttctcatcccatgcagctttactttctcacatgatatagtttccatttcccaactctgctggactcactaagaaaagacagtgcygtccaccarcaaggacgcaagctaggctgctccagggaactgggtaaccatggccagcaactcccttccctccaggagcatagggaccgggtcctgggagggagaagcaaaagtcccgagcaacccattgcctcggaagtgcagcagtggaggcaggagggagcagccgggcctgtgatgcctgccataacctcatgttctggaaaaggacagtgacgaggaattcatgctcagatttgcattcagctgtttatcccagttaagccacggcagtcaggagctggagctcaggaaatgtctgagcacatttacagctacccagcgccacagccgcggactggcattagaaactgatttccaggtttggttgaaagtgaagaaacaaacattataagctaggggtccccagcccccaggccacagactggtactggtacagtacacagtgcatctttcagacatcctgcagtacgggtccgtggcctgttaggaaccgggctgcatcgcaggtgagtggaagcttcatctctatttgcagccgctccccatcatttgcatcactgcctgagctccacttcctgtcagatcagcagcagcattaaattgtcatgggagcgccaaccctaytgtgaactgtgcatgcaagggatctaggttgcccgctccttatgagaatctaatgcctgatgatccaaggtggagctgaggcagtgatgcaatcactggggagtggctgcaaatacagattaacattagcagagaggtttaactgtgcagagaccataataagtcaatcgcttacagacgcacatcaaaatcctatcagtgagcggcaagtgacaattaagctgcctctggtggtaggctttatagtggcaagtgagttgaggtacttcaattgtatagctgcatctagtgtcctgaaatgtatgtttgagagaacttcaaatccccataggttctgggttaaagtcaaggcggaatatcctgagattgcagtgacagcaaccaaaatgagattatagagtgaagtggacataagcaacacttatatcactgtctcccatcacccccagatgggaccatctagttgcaggaaaacaaactcagggctcccattgattctaccttatggtgagttgtacaattattccactacatattacaatgtaataatagaaataaagtgcacaataaatgtaatgggcttgaatcatcccgaaaccatcccccgccctggtccatagaaaaattgtcttccatgaaaccagtccctggtgccaaaaaggttgggcaccactggtataagccacagagaaagtacatacatagtctaatgtataatttataaagtatagcacatactcttagtctaatgatttcaagatgaaatccaaaagttaaagacaaaacgctctttaaaatatgcatagaaatctgtaattggagcatataagaaagacaatatcatgattacatttcattaaatagtcattgtaggaatgttagctttgaataaattataacctcaaatgtatctaagaaaattataaaagtgaaaataaatatctctgaacatacactttttagactttaataactaaaaataattataatataggcatagttctgtgggtgaagtgagttcgaatacgcaaagcacttggaacgatgcctggtaccgagtagacccaatgtagctatttgcttttggtagacagatgccattctttttgttaatcacagttataattgaattttagaatttttaaataggacgaaagattagtgcccattgaagccagtgggttttttgttttccaaacttttttttggtagcaaaattcagttttcaaaatcctttctccaaacaatcgaggaaatggggacctcagtgagtaggcctggaagaggagctgctctgcaggaagtggggccagatttctatctattagcaatctccccttgaggcaactttggaacccagtctgaacactaagccaaggcactctaccatttgacagatgaggaaaataaaccctagggaggtaaataaacctagggaggtaaatgctctcattctcaaagctagcacagtcagattgttttccagaaaataattaatacctaacatacctggaaacgagcgctatttgcagggtgatagtcaagttattaaaccagtgtccaatcaaaatggctctgcgtagtcagagcctcgtcctgtgtcgagcattaacttttcagttgctaaatcataggacatttttgtgggaggcagggtgtcaccattgaagggtccagtatccggggagctcaggacaataggtaattaccaactggtataaaagtgattttaacaaggtacaatcataccagatgggtaacagctaaatgtcagccctgggcrtttgaagatgtcctccgcaggctagaaaaaaatccacgttggattggaatcctgctkagaatagctacactataattggaactctggagactgtatctgttccttctcatttggtctttctagaaatcaaagttctcctctggactcttccaaaacatttagacatttactggcttccaaaagaaggaactcatggtgatattgaccatttttaaagaaaataaaagcatgaagccgagcatggtagtacacacttggaatcccacatatttggaagactgaggctagaagattgcttgaggccagaagttcgagaccagcctgagcaacatggcaagaccccatctttaaaaaaaaaaaaaagttaaatcaaaataaaattttaaaaagatgcgagtggttgctttgtatttatcgttcaaaataagttgaaggatagaaaatgatagctgaatgccactaattgtagaagttgatctgtgtttccatcttaacaaaaggatttgtaagaatacttgtcatttgcttacacttattaaaataaatggcttctaccagcagtcttgacgcagactatccacctgcataagaaacgggcgatggtgacagaaggaaaaaaaagaacaaagccctgccgggtgccccagtgggagaattggtatgttggatttgaatgggaagagggaggatgttccagaggtgtgtggggagagatgggaatagaaaatgaaggactgtgttgttataagaacaagcaaagcatatacagacagcttatgaatttgcgctaggatgactttccgctacatcatggagtttagattccccatgtcaaaggcagatctgtatctcttttgtattccagaaaagtatttgcacatcacttttctggctcttgggggagggagagaggcatgggagaaaattcatttaagtgtatgccttaaaatgaagtgcatttggctaatgagtaagcagctgtttagttaagcaaatgactcatactggggtatttatagagcacaactatttttcaagcctgtacaaatttaaaagaaagaagtttccctataaccccaaagcagatgtttctacatttatgaacaaagcactactgaacagtaagcccgtccttcaggtttatcaatgcatctattaaaacatatgttagtcttcctaggaagtatatatctcttcattgaacagagaacacttatagagtatttattttgttctatgttaaaaaaaaaaaaaaagtaagtcgaaggcccaggctttaagaagtaaagtctgatcagaaagttatatcatctgcccaaaaaatatagctaataatgaaaagtgagattcaaaattgacaaccacaggagtgccatgagctgtaattagcttaactttttatttgcttgtaacttaatagccaatattttttcagagcttagtatgagccaggcctggagcatttgagtcctcttgttgaaaaagtatgttttacaaaaagactttaaaatgaaactgaaagcaataacataaatcacatcaggaagagagggagacagtatgacactggggatcacatgtggctcagaggttcttgctaatcaaggtagaaaggggatcaggatatgttagaggaactcaaggaggcagatgcatgtggctggtatctttgaataagggttcacacagtcatgagatgtgaaattacctttaaagaatgggttaggattagataaatgcaagtgatttccaagaagggacaatggctttaacaaaaacaatgagggtggaaataagacatagctcctcactgagtgaatacaaggcatggttgggatgggtcaataaacctgtctgaatggaggacacaggcaggggacaatggtgaagattggtcaggaatcaaatatgccagggccttcagaaccggctgagctctgtgggcaaaataaagacccaaacaccgagatggattaacaggggaaagatgaacctgggctggtgagacatgcatgcaacaaggtaggactaggggcaggggattcaattaggagttgattgtggactggcctaacataaataggcctcaaccaaggtcgaggcagagaaaatgccaaagaagtgaaaatgaaggaatggcaaggaaaggggatgactgcttggctgtgagaagcattgggaaagatcattaaagatggctttagagtcgccagcctgggtgacagggtgaatgtgagaggagtacatcagtctcatcagaggaggaattattttagacacctggagcttagagtgctgtcagaacagacaagtgaagcagtctcaaggcagccaaaaatgtgcaactgagacttagtcagtgcagacttgggatttccatttgaatgatctagcacagggcagacttggggtaattgaggtgatatgacctctgagacattgtagagactgaagccatcctgagtcaggggagaccactgaagggacctgccctcacaagggattttggttttcttaggtcaccatgagaagggaccacaaactggcagctgaaacaacagaaattgatgtcctgacagttctggaggctgaagtccgagatcaaggtgtaggcagattaagaaaaatgattaagatcctgtgtgctttgtcttaggattttctgattatttttttctctttcaaaagactgcaaattggagaagtttcagaagcttttccattccgtgaggatcttttattttcttttatctgtccccaagagcctctttttttcttcttcccattatttctgaccagataggctctctgtgcctgttttttgttgggaaagaaacctctaccacaagttgcagtttcatgttcccggggagcatttcagtggtaactcagtcattataggggtgttgtctaagaacttgcctagctgcaatggtcctgctgattctgttatctctttaaacaatgcggtagacgttagaatgggctgatgatttattttcccattctggcaagttttacaagtgcttctttcataataggagagtcttttttaaacgggggtaatttagatttgtttgttcttggaaggagggtggggtatgaggaatgccataatcttacattatggtattaatcattctttgttcagtttgttcttttacaggtttaatcttgcattcagttttgatagagaacataaagcatttttttaacctaatgatgtctcaagtagcggtggtacttgagatggctcattttgtacattacttcatggaaaatagattcttggcacccccaacaactagtgtgagctggcaagccacagatccttggaggttcagctgcttcctctgttaaaagcagatactgacacatagtgagtacatcaggcaaatgagctttatttggggaatgttgaatttagggtcctgttagaacatacaaataaatttgtccttatagcactgttttgagattatataagtacctggcataattaagtaatggcaatcactataattatcattattaattcaaggtacctttttctttttcctgatggataacccttacattcttacaaatactaaattaatgaataagaaaaaatgtgcatataattttgctttgaaatttcaaataaggaaaaataaatctaaaaaataaatattttctatattcctttgactctgaagaaccrcccaaaagaaccctctaataagtatgcatctaatattttctataagcaagttttttgggaacctttgttcctgatatgttattataattcctcagatrcaagcaatagtgaaaccactttactctttaatcatcatatgaaggttttagtaattatagaaaatgacacttaagaaaaaaattcaaaacaaatttcataagatatctaagcaatgatggttcatgttttgattttccaccattccatcacattctcaattcaaatttgtaagtaattattaattacctaagtctgcgactcacggtgctagaatgttgtagaatataccaaccagtacaaaatgggcttcttgccatcactgagcttccaaaccagctggagagaaaagacttaatgatgaggagaagaagggctataaatggaatgaatgtcttaagggcttaccatgtgtcaggcatgtagataataagaactkatcacaggctatcccatggaaacctcaccacgtctctgagaggtacccccattgatgttcagagaagttaattaccagcaccaaatcacaagtctgtctgtcctgctccaaaagcaaatgcattttctatattatagaaaataatatagaaaatattaattgcaaagttaatcattcacattgtatcttgtcamttccgtgtcatggagcacaagtrtgtgtattgagtcaaaggtgatctgaagaaggcacacgtccatgtataagtgtgccgaagtagctgagatatgtacatgacgtggagacagtgtgacttttagagataaacattttaatgacaacaaaacctgcatcctgaaaagcaaggtgaaaatcacagtgaaaaatggttaagatcctgtatgctttgccttaggattttctgatttttttctttcaaaagactacaaactggagaagtttcagaagtgtttccattccatgaagatcttttattttattttatctgccccaagagcctctttttttcttcttcctattatttctgaccagatatgctctctgtgcattattttttattagaaaatgcattttacttttacccatcaggaaaagaaagttaaatagtaaccaataatataatataaaaagtagtcaagataactacagaagagttgtcataagacattagcaatgaaaagtmtgtgttgtaggagatcagaggagggaagaatcactagattaggatgattgaggaaattcctgtgaaagagaatccatcactatatttcatatacatatagatggtacagtataccataaattctctattatccagttcaggccatcctgggacaccctgaaaatagtcaatcagtcctttatttcaatctcaagcrttttgtcccaagccatgcagaatctgaagggcattggagatttagtgagagtttttctcacctagtctactctttctcttgattgtccccagtgccctgttcttagttatagagccttctggggcatcacctgccatccctttgccttgggcagagaacattccccagaaactctgctcttccttccctccctctaagatccttaaatctttttgcaaccttttaactccctcacctcacagccctgcctcctacatgtatggccctagcaggagctgtggtctccgccaggtctgaatcctcatgggtcgggatgaggacggaagcctcaagagtgcagcatcagaagatactcctacttcacgtgtgggcacacaaatctttagtcacttctccctgtgctgagttgtgctgaagtgtgtccttttccttgctagctttgaatcaaatcacaaaaggtgacagtggagcaagtgcagaggaaaactgagtgttctcatcaataaaakaccctttcgtctgatgggggcaaatatccggcattctgcccgtatgaaaatacaggtctttggagacaaacaatcctactttttaaattctctcgcattttgaagttccactctttccaatgtatttgctaaccatgcattctttaaaaatgagaatctatatgaaaaagaactagatcttgtctttaaaaagtgaccttagggcataagtccaagagatctattgaacaagatggtgactatagttaataaagatgcattgtatacttgaaaattgctacaagagtagaattttaagtattctcaccgcaaataaatggcaaatctataaggtaatagatatgttaattagcttgatatatgtatatgaatatatgatacgtgtatgcatgtttcaaaacatcatgttgtataccacaaatatatacaatatttatttttcaattcaaaaaataaataaatttgtaaaaagcgacctgcaaaaatggtcagtaataagcatatggacaaactatcgggaccctagagagagaacagtgcagtgaaaattgctgagcgttttggtttttttcctttccggaaaggagtaggaaagctatgtggcagaaacacctgtacatytaagcaaagctctggtattcagctaggaattaggagatgcccttccttttgcaaacacatttaaatcacattgaacaaaattactatgggtaaagatgaatatcccacttcattttggacacaaattattataatgccgtaagcactttctgctcctgctcatcaagtgcagctgcaaagtctggtgtctctcctgtggcagagccgtcttcctctatgctccagtttggaactgggctgctcctcccaggtcctgccgcctccacccagccaagactcacttgaggccgtaggttctgcctccagataggccgcgatgcctgagatcagacccctgcagcctctcctcttctccttcctcaccatctctatctcccattatcttttttgttttttactttttactttttttgtttatttatttatttattttttgagatgaagtctcgctttgtcactcaggctggagcgcaatggcactatcttggcttactgtaacaaccacctcccacgtaaaagcaattctcctgtctcaacctcccaagtagctgggattacaggtgcctgccaccacgcctggctaatttttgtatttttagtagagatggagtttcaccatgttggccaggctggtctcgaactcctgacctcaagtgatccacctgcctcggcttcccaaagtgctgggattacaggcgtgagccaccgcgcccagctatatttttacttttaattgacaaataataattgtgtgtatttgtggggtacagtgtgatgttttgatctatgtatacatcatagaaggattcagtcaagctaattaacatacctgtcatctcccaatttatcattttttgtggtaagaacattaaaaatgtattttagcaatattgaaataaacattatgcttaactgtggttaccatgcaggataacagttgcagtgtaatagtccaactgaaactttgtacacttttaccaacatcttttctttccctatctcttcgtctcctctctagcctcacctcagataaccaaatttctactttttctttctaagagatacgcttttcaaaaatccacgtgagttaatacagtacagtcatgtgtcacttaatcatgggagtacattctgagaaatgcatcattaggcgaaaacactgagtgaacattatagagtgcaaccctagatggtacagcctaccccacaactagactatatggtatagcacattgctactaggctgcaaacctgtacacatggtactgtgctgaagactgtaggcaggtgtaacaccacggtaaatatttgtgcatctaaacatagaaaaaaaatggtaaaaatagggctctatagtcttatgggactgccactgtacatgcaatgcagtctgtggttgaccgaaacattattatgtggtgcatgaccatagtggtttttctgtgcgtggcttrtttcatttagcataatgtcatccaagttcatccatgttgtgcaaatgacagcattttcttctttttatggctttgtagtgttccattgtttatatataccacattttatttattcatttatctgttgatggacagataggtatgtctttattactcaatgtggtcatttcaccagagaggtggatttacctacgtacactttccacgtactcttcatttaattcttcctctaaaacctcactaatactgttccccctcctctgcctctgtccatcaagatctgtcctatacaacatagtaaattccaagtggaagaagttaagtgtgcaacgtcaacccataaaaaaactagggggaaaattgaatcgccttcgaaagttctagagtgggaagagctttggaacaatagaagaaaccataaaagtaagaatcaggctctctgctcctcccatttgacagacagctacatattcttatgcagaaccagccatgtccctgagacaccatggtgaaggtgaaggccagagtaaacgaacttggtcgtgttgggcacctggtcaccggaactgcttttcactctggtaaagtggatattgtcaccatcggttacccgttcattgacctcaacgacatggtctgcatgtcccagtatgattccacccatggctaattccacagcactgtcaagactgagaatgggaagcttgtcatcaatggaaactgcatcactcatcatccaaggcgagatcccacgaaaattaaatgagatgatgctggcactgagtacgttgtggagtccactggtgtcttcatgaccatggagaaggctgaggctcacttgcagggggtaccaaaagggtcatcacctctgccccctctgctgatgggcatgaacgatgagaagtatgaaaacagcctcaagatcatcggcaacgcctcctgtgccaccaagggctttgccccccaccagccaaggtcatccatgacaactttggaatcgtggaaggactcatggccatggtccacgccattactgccacccagaaaactgtggatggcccctccaagaaactggcatgacagccacggggctctccagaacatcatccctgcatctactggtgctaccaaggctgtaggcaaagtcatcctggagctgaatagaaagcttactggcatggccttccttgtctccaccaccaacgtgttggtcatggacctgacctgccagatatgatgacatcaggaaggtggtgaagcaggcatcagaggggacccttgagggcatcctgggctacactgagcaccaggttgtcgcctctgactttaacagcatcacccactcttccaccttcaaagctggggtgggcattgccctcaacaaccactttgtcaagcttatttcctggtatgagaatgaatttggctacagcaacagggtagtagaccttatggtccacatggcctccaaaggcagcagctagctggacaccagccccagcgagagcacaagaggaagagagagggggagtccctgccgcactcagtcctccacaacactgagactctcccctcctcacagtttccatgcagaccccctgaagagggtgagacctaggggagccctacctcattgtgtacatcaataaagtcccctgtactcagcaaaaaaaaaaaaaaaaaaaaaaacacagaataaacataattcattaactgacatttcagcattttagtacagtttaaaaataataaggccgggcaaagtgactcacacctgtaatcccagcactttgagaggccaaggcaggcagatcactggagctcaggagttcgataccagcctgggcaacatgggaaaaccccgtctctactaaaaatacaaaaattagctgggagtggtggcacatgcctgtggtcccagctacttgggagcctgaggcagaattgcttgagcctgggaggcagaggttgcagtgagccgagatggcaccactgcactctagcctgggcgacagagtgagactctgtcttaaaaatgaataaaaataaataaataaaatgagaagaatcaatcaaagctattaacaaatcagcagaaattctgtcaagacaattttttaaagagattgtatagctactaaagaatcgtattgaaacctgttaacaatttaaccttacctgtaatctaagagaaatgcaaatctaaatcatgagatatattttttctattaaattaacagatttaaaaaatgatatgacctaatctttgatgagggcatgatgagaatagtacctttataacttgctgataacgttataatttaatacagagtttttgaaaatcaatttgtcttgtatattaaatgctaaaaatagattcatgcctttaactccatgatttcattacaggacattctcctaagaaaataatgtaaaaagtcataaatacaaagttataagtacaaataatttaacctcaaattattttccaaatcaaaaagaaatgaacagagtaattttctcttgacataggtatagatttaaaaattacaaagactgcccagtaayatgaagaaaattaatactatataaaaatatgcagggaacagagaacaccagaagaaaacatagcagtggtaagctagggtgctgagaattatgggtgatgtttatttcattttttctattctctatattttccttaatgcatttgttattatggtaatatgtataacataaaattcacccttttaaccactttttttttgagacrgagttttgctcttgttgcccaggctggagtgcagtgcaacctctgcctcccgggttcaagcgattctccttcctcagcctcccaaagagctgggattacaggcatgcaccaccacacctggcyaattattattattattattattattattattattattattattgtatttttagtagagacgggtttctccatgttggtcaggctggtctcaaactcccgaccttaggtgatccaaccrcctcagcctctcaaagtgctgggattacaggcatgagccactgccctcggccttaaccactttttaagtgtacagtttagtggcattaagtatttcacattgttgtacaaccgtcaccaccatccatctccagaacctgttcgtcttcccaagtggaaactctgcaccccttaaacactgacttcccattccctctcccccaggccatggtaaccactattctactttctgactctatgaatttgatttctctaggtacctcatgtaaattaaattatacaatatttgtgtttttgtgactggcttatttcactttgcacaatgtctttgaggttcatccatgtcgtaggatgtgtcagaatttcctggctttttaaggctaaataatattctattctatatgtacatcacattttgtatccattcattcttcttagggcacttgggttgcttcactttttggctactgtaaataatgctgccatgagcatgggtgtaccaatatctgtttgagtccctagtttctattttttgcagtatatacccatagtgggattgctggatcatacggtaattctgtgtttaatttttttaacaaccaccaagccattttccacagtgastgcgttcaagggttccaatttctccacatctttgccaacrctcactttctgtttctttcaataataaccatcctaacaggtgtgaagcggtatctcactgtggttttgatttgcrttgccctaatgattagtgatgttgaacatcttttcatgtattgatgggccacttgcatatcctgtttggagaaaggtccattcaatttccttgcccatttttgatggggatgtttgttttgttagtgagttgtatgaagtgtttgttttgcatatgtatttatatatataatttttatttttaattgtaattaaaaaacacataaaagtaaccatccttactttctttgagtgtacagttcaatagtgttaagtaccttcacattgtggtgcaacagatctccagaaatcttcatcttgcaaaactgaaactctgtacccattaaataacaactccccatttatttccccttgcccagcccctggcaatcaccattccactttctgtgtctacgaatttgactactttagttacctcatataagtagaatcatacaggatttgcctttttgagactgattaatttttatttttattttttttttatgtcctcaargtttatccatgttgtactatatgacaggatttcctacctatgtaagactgaataatattccatgctatgtattgcttttatattttttatttayaaattgtaaaatactactcatcggtrtgartcttatactgtcctcttccctgtttcaatcacctaaaacctcctttttatgttaggtcttttgacattgaatgttttcartgtcatactcccatttacctgattaataataagttctttatgtttcacttttaaccaaagcaggaacaccagggcaattagtccagtaaagaagaaaagcaaacagtggccatgctgagagtgaagcaaacccatgatatattcatggaaaagctggactttttctctcctcagaaagtgagatctttttgtgtgaagaactattgaaatctgaagcttcycttaggaagttaaaagttcttttgaaaatatttaaaagccctgaattaaaagatcttaatacagtcacacatgcaatacaactacatttaggtcacggatgaattgcctgtaggacggtggtcccataagattataataatgtgttttcgagatcaggagattgagactatcctggccaacatggtgaaacccagtctctactaaaatacaaaaaaattagccaggtgtcgtggtgggcacctgtgatcccagctactcgggaggctgaggcaggggactcacttgaacccaggaggcggaggttgcagtgagccgagattgcgccactgcactccagcctggcgagggagtgagactccttctcaaaaaaaaaaaaaataaaaagtgtctttactgtgccttttctatgtttagataggttagatacacaaatacttcccacggtgttacaattgcctacagtattcaggacagtcacgtgctgtgcagatctgtagcctaggagcgatgggctctagcatatagcctgagagtgtggtaggctatgccgtctaggtccatctaagtccactctgcattcacacaaggacaacagcagcacatgttctcagaacatatcctcattgttcaactgtgcatgactctacagtattatcttctcctgtgttttccttgtgaaccctcagctggttaacatggatcccgagccctgggccttccccggaactttctagcctagatttagtttgtcaggtttcagaaagaataaaattatctaaaattgagggraaaaaattggcaggcaatttggaaaagactctcagttggcctgccaacaacactggcagaagaaatgtagtcragttagaatccttccagcatgttccctaggggatgctcacacaggaaccacaggtgaaatagggaagtccctggctcctaaagcctragcaggaaccatatactccaccactcccctcctgaagtgaaattgagtcccaaaccaggagtaacaggagcacaaaggtgacggagctcatacaaactgagatgaattgcagcttccaggacggaaatgactagtagcttattatttgtcattggctccagatawatcttacaacctgattaaaagcaaatgtattgacttttttttttttttttttttggctatggctattctgactattctcttttactgaaaatggtttttttctaattagatagcagcagcctgaaggtaggaccatcttagtttctgtgttccttatagaatctaggaaattattttgtacattgtaagtattcaataaagattggattactcaacttgaataaaaacaagcagatgataataccttaatagtcccagaattaagtttctttggacagtgatttgttgatatttttaaattagctattagacacaacaccctgcagcaaaaaggctttgcttacttgagctcacgcttgttatccttttggagtctgaagcctaattaatgtagaatagagcctcttttagaataaaagtcctctgccctatgggcttattctttgggtctctaaacacagattggggaacagaaaagaaagtcttttggcttcaggctagggataggcacctccccgcccatctgcctctcagtgttgctggccagggcagggggagctagtgtgatttgcccaaacctccctccctgaggtgtcatgttgctgtgatggtgtcacaggagtctcaggaaagctgagagctcaacataacaaagttcctacgtggacagtggtgctcaatagttgcttcttaaaaaatagattagttaggactatcggatgccagggactgaatctagtcacttaataatcaggttcccacagatctayttatctatatcccaaacactgtataattctaaaactatgagaaagaaagaaagagagagagagagagwgtgtgtgtgtgtgactcaactgcctcaaacacaccaaggaaacatgtttgaatataaataactgaagacagaaaagacagaatgaatcaaccagaggactagggagagttatatataaactgatatagatagatataattttttaaaattatttttaaatagagacggaattttgccatgttgcccaggctggtctcgaactccgggcttcaagtgatcctccaaccttggcctccagaaatgctgggataacaggcatgagccaccatgcccggcctagtgatataatttttttttatataggccttgaggtgttgtattttttataagaggtattatatagtttataaactcataaaaaatttaaaaacaaggtaaactgtaatattttaattgaaaacacttctttagttatatccttgaaaactgaaaccttacacattacaggattgttatcttgttagttggacaccgttaaatgaccaaagctattcatggtctcctgatgagaacccaagtaaagagtcttcccttagttaattcacaggatcctcccttactcaactggaccagcactttacagttgcataaaaccctggttttgagtttttcttgtccctcaatattcactaaggctgtcatgaaaattattatgcttattaaaataaaactccatggattgcttaatgaaagatacttaagaatttgccaggtttaagttttattgctatttagagaacaagattttctaaacctattgccctgtgactcttcaaaaccatcagccaggaattctttttggatacactgatatttctctatgttatccttagtacagcttagcttaccaaaggatagatggacaaaagagtcttaaargttaagtcttggaacaatataaaatgcagtctgcaaacacttgggggtgcatcataccagtcaattacacataccaatacttttttagaaaaaacaaaagaatagaataggcaaaatacattggacttatttacaaaacatgtttcaggtatacatgcacacatatgtgatattatgtcatatatatgttagcatacattttataaatgtcttatgtatgtatttccctgtatatatactggttaggatgtaaaatttgttaccatcggtagcagtcaaaaaaaatgttaagccactgatttagaggacttaattctaaactaatggaaagcagttagcatgaaaagaactcctacctctgaaaagaaataatagaaactaccatcacaaactggtcaacaatttactgcaaagttcttgccagaggccagagtctggttcattctctaggtcaatgctacagactgaaagctgggtggagaaaagcgaccttgaggttgtgctgtagctaccgaaagaaggcaggcagagggagctgttctttggttgcaataacctggaatagatgtggggtgctagagggggacagatgtgaaactggaaggtggttccagctgtctcaatgcttgattaggccttaaatctctattccagcatttcccacttctggaaataaatgcatacctagcccagagacaagggtggaagcagacctcataggcccaggatgcagggctcctatggggacctcagaactagggcaggggcttatattttattcttgaatcccagttgatattaaagtggatttcagttcaattagggggaagaaacccttttgcttccagatttttaatgttaatattaatgtcaagatatctctaatatgatttagtaataacatatccttcattctaaatttagtacctgtttgagaattaattgattaaaaactaagagtgaaactgtattactattttgcagtctaatatggggcaagatgtttatcttctttgtttctctttattttttagattttctagaagatgtacttcttgatgaggccaacatttctctctcatgtcccacacatttctattatatatttgctgtaatttgtagcactcacatttgttgtaaaatcgcttttgacagtgtatttgagttaaagtacaaaggttcattaccaaagctctctttctttggagagctttttattattagtgctacaaaattgatcctaatggcttcaataagaatactgggatgaaattgttttattttcttttcctttgtttctagttgtcatattgtcatggaactccgaggtttgaaaatatgcaaagaattcatctcatttattctctatgagatttaaaactaaaactctgattatttagccaaaataaaattcaataaaatcatatttttatatgaaagaagagaatgatgacaagggaaattgcaggagtacaatggtagtcaactcatcttaaattttgcattttcatttttgtaatacgtttgcttcatgttgctctggaaaactgtgttctgttgctttacctacaaagacaaacattaatcaaacttaccactagtattaagcactgattaaacacccacatcgtaacacaacaaatctgctgacttctgttcgtgtgctttccatcttaacacacagacacagacaggactgatagtcttaagaaggccctttatcagaagtatttaatcctagagtcttttcctttacatattctattcaagaaaggccctttacgtgaaacacattaaaaaattatataaggatcatcgctggctagagcctccttaactgcaagctgacagacatagaatagttggcagaaggaagctggcactcttattaagggcctaattttgattttgcataatctgtggatagtcactactaaaataaaatactgaagagctgcatctgtgctaatttctttggtaggattttttttaagaatagaccgaaatcgtgaaactgctataacttgggccacagtttttctgcaaggacaggtacttctacttttttctggatctcttttacaaataaggtcttaaaccactgtctttctgtgtatatctattttgtttcgagaacaagcacccttttctctttaatattcttttcctacggctagaatgggtcagcggtgtaatacactcagtcaacgcctaattgagtaaaatgtgacagaacgttttgcaaaaaccagtggtaaccgtaggagacctcactgtttttctctgccacttagtcttcaagaaggaatgactaaaagttgtatttcttttcagatgacaattattggtgtgttgattgactacatgatcattagtgagatttctagtatattgtttttaatagaattgctgtaaaatttggcagatggaagttcgcatagtttgacctggaaagttgaactacttcaatcttcaaatttttccttgtaaactctttcatagtagcaaaataatcataattttctttgaatattgttaaggaaaatagtatttctctttcagaatatacatcctatgtccccagtgctgttcattcattagttaacttctttcctttgttgtctcgctggtctcttgccacctgcaaaatgtcttttaaaagaaagttggagaaagaatgccgtgtcatttttcttcaaaagaaatcaatagttttgtttgttaccaggtcctcttaattatatttctcttcttgttgctaattattttgattattagttccacatagctgggcagggacaaggaagaaaaaaataaacctcccttgcatggtattacttattagctgttccaataaaagtttgattgggtatgatgattcacagttttcaggaaaggcattttctttgaatttcaattacctccacttgttctaaataatatttgcacaaataattgaatattggtttgaaatcagcctccaaatattactgtgttctctctaaaacttcatcaaactgtgatctgtcttttgaaagccaggaatacaaatataaagatgttaactatttaaaacttccgtgatggtctgtttgggtaaagagattgcacaaaatatgtttttcagtaactttctgtgttttcaagttttttttaaggtgtatagttagccattttattcagcaggtcttagttgagtgcctgccatgagctaatgacacactgattaatagggatagaaagggaacaagatagacaagtgctagaaattttactgcataaaataaaaagtggagatcaatagctgcgtaaaaatgatgtgaaattggggtaagatctagcgttgccttttaagatgaaagagtatcttagcatatttaaatattaaaggaaagatactaagggtcagtgaaggatttaagatacaggagaaagaagtggggcagggtgaggtcccagtaaatttatgctcagattagagcagttatgtctccttcatctaaacatgatcaaaagcagaaagatgtgatagagctagttacatattctggattagtgtcaggaagtttttccaataacttattttatctgtgaagagtaagcagtaagatgatttattggtagtgataagcaaatggacaaatgaaatgttcaaaacagccacaaggagaatgtgaaggagtcctaagaagggaagtatggcttgcctctcggtgttaggtgtccagtgcagctgagaggcacacatttatcctatatgtgtgtgtggggatcaatctgcatagttgggtgattttctcagaagcccttaacagttatacttagttgtggaaatacataaactcgaatttttaaaaatagctccacatagtctgaagccaaaagtagagtcaaatgctctttaagacaaaataaccaagtatgggcttcagaaatgaaacagagagtgatcaatactaccattacatctgttttacactttctctttagagactataatgtttaaatggagcttaaatgacagctctgcagaggacagcctgctctcctccttaccagtggttctcaaatttcagccggcatcagtcacctgcagggattgttaaaactcaggttcctgggcctcaaccccagagtctgggattcagtaggtctggggtgaagccctagaatttgcatttttaatgagttcccaggttctgcagagtctgttgatcgcagtaccacatcttgagaatcactgttctaaataaaactctgcaatgccaggacaaatatctgcaaaggttaaagtcactgtgagctcatcagttcataatctatttctcattccttgctgattcgctcagtgcctaccacagtgcctggcagtgcctggctggagcccagcgactgttttgaggaagaaagataagttagtatttatggaatgccctctacaatgtggtaggcacattccctccaccaatgtagacaggcactgccatatttacacagacatattaaaataagattagtcactcagcagtttgagccagtggactagtccttcctttttaaactactctcttctccaggttctggactacctcacctcctggtttcccttctgcttcactggccacttctcttagaaaacctggctttctcctcctcctcctcctctcttggayctcagaacattgaatgccccaagcagctcttttcctgatgaccttctcctctattcctagatgatctcatttagtcccaaggtttcagataacatcaacatgctgatgtcatccaaatctgttatctctagctcagacgtcccctctcacctcatactcgttaatccagctgccaactcggcctctccacttgaatatctaataaacatctccaatgtaacaggtccaaaacaaaatcctcacttacctcaagcctacttctgtcccgtctttcctgcctcagtagatatcatccccatatatcagttgcttaagccaaaaacttaagcattgtcttggatttcttttttgtgctatctttccaaaacccctttgatcagttttggctcccaaacagtttctagtccgattttttttagtatctcatcttctgcaaccagagattttctcatcccctaatccatggcaatagcttcataattcattcctcagttcccactcttacctccaatggttcattctccactgagcagctggagtgattttgtggtagggtgaattagatcataacagttccgtggttaaaacctgctaaagccttccccccaacaaatagaaccaaatccaaacttcttaaggcaaatagagcactacttctccatcctcatctcctactacttccccacccaccaagccctgtgaaactccagccaccctggccccctttctccttcttgaacataacaagcttctccagcctctgagctttcaccctttctagctgctgttccctgtagtgctcccctccaaccgcattagcgaatgtggtttctaccaccctatcattctgtgtcccatttttatttttttcagggcacttattatttaaaattattcatatggttgtttacttaagtatttgtctgtatctgacaactacattgttaactccaagcaggcaggcagagattttgtcttcttaatagctgtactctattttttttttttttttttgacatggagtcttacccggtcgcccagtgcagtggtaggatctcggctcacggcaacctccgcctcccgggttcaagcaattctcctgcctcagcctcctgagtagctgggattacaggtgcatgccatcacgcctggataatttttgtatttttagtagagatggggtttcgccatgttagccaggcttgtctcgaactcctgacctcaggtaatcagcccacctcggcctcccaaaatgctgggattacagatgtgagtcaccgtgcctggcctgtactctattatttagaacagtacttgcagggtagtagacacacacacaagcatgtttgttgagtggaggaactttaaatctattgttctttctacaacactatattgatgcctctttaggtattatgttatgatttgatcacaacctactccagtatctagataatgggttgttccaatcagtgacaaattcatacatttaaatctgttcttaaatcccaaaagccaaaatttccaaaaacagatggcttgagctgctaagcctttgtctttatgttgttcttaagatttattttggatccaccaccatagattatggttttaagtcaaccttgtctggctacttattttttgcaaaacattagaaactcagtcaagtctttcattcaggtcctccagaatatccttcactttaacttaagaattagtccaagtgcccatattgacattttgacagtgattctaggctttgtggtgttgttcagtgttttgtgttacaaatgtaggccacagaaaagaaataaagtgaatccatgcctctatttgtttacaaagatctctttgtttacaaagagatcttttcacctttgaaattctatcactatagccttaaaaacaacaggaatcaccctctggccaggtggttaggatttgaaatgtctttgtattcttttttaaattggagttcacgtaaatttggtgacatttcctactgtggctaagtctcttagtagaatcttttataagcatgcaagagtaagagcaagatttgttcatcccaatcaaaaccaaagtgagactcccttgttcccagggcaaactctctttgtccacagtttgcactttctccttctcctgtttttgtgccacctcttaaaaacccttgattgataacatgcttcgctggttaaagcacacctggtattctagtaactcctgaaacactaagtggctaccatgtatcattgctatgttaggccttcgtgtatagaagtttatcaaggttcttcttgctgatacccccttttccttcaaggctcttcctcatcagcccactcttcagtagcggtgctcctggggatttcatccactgcagcgacaactcctagcgaagattcccatctcgtatctccagccttatgcccttttcccagcattgctcactctgtcatctatttattgaacatgtggacagtccaggaacatctcaaacactgcaaatgcaaaaccaaactcgttgtcttctcaccacctctgccgtattcacgcagactcttttctccttctacagcttcccagttcacatcattaacaggacaactattggcccattttcccaaggtggaaacattgaattttttcctgggcctttttctgcctttccactaatgataaatagatccctaaatcacataaattctgccaaagaaatttacctctggtgttcttcctgtctgcactgccccttttttaaagagtgtaaattatcttacacttttgtgttttatgctgagatttgagaataaatagggagtgtgtatacatatccagctcatcatcttaacccactcctcctaattttatcttaggaatgacgcctcctgcagtgtagaacaatagaaatataacccaagccacgtatacgattttaaattttccagtagcaacattatagaaataaaaagaaagaaatgaaatgaactttaatgctatgtttaagccaatgcatccaaaatattaaaatttcaaactttaattggtatttacattattcttaagggctttaccttcctttttctttgtacaaagtcttcgaaatctagggctcaatggtcacatgtggccagtggctgtcacagcagatagcctaggtgttggacgtgagctgaaggggcttacactagagatcccatagaagatacacctacagccttggtgagggacaaggrcatatatcaaggtacttgcaatggaaacaaagaatcaatccataatcacactgaaaatatgaagcagagaaccagaaggcaaatgtaatccaattaagtataaaattgcactaaaaaaaaaaaaaaaaaaaacagcccaaagtacacagaagagaatggagcttcaaaggtaaaggataaaaacaaaccacagcccaggagagaagctcagagacaaactgtacaagaaagggacctggggcaaatgtgtcagtaattaggaggtggtcttggaagagcagggtagcctgggcacctcatcctcatgcacatttgagtccaggcagctgcacactttccttcagcctcacaaggcccagcaactgtgctctcaacaaaggaaaagctcttctgctggtttatatttatgagaagcagagtagaaccctgggggtgaggggggcaatgaaatggagcctttggagctggaactggcccagcttcaggtgaagcctccaagtgggtattctgaagtgaggactgtaacaagagaggccaagaaggctatgttccagttaargaaaaatcccctctggcacccccaaagcaaagcagtctcccccatcctgctctccccacaattatagaaggcagacagaagagatcaagatgcacatgaatagaaaacagcacttctcatttggattgaggaaattttcagtcttcaaccagtccttcaacatgagcatgaatagataactgagaatcaccaaactttgaaagaacaccaacacctacaagaagcatcaaatcaacaaactgaagaactaactcaccccaaggagaccttgtcaacagaaaaaaaagcaaagacaattttcagataagcataataaccaaagaaatgtaatcattttgtcctcaaatattcaakaaaataagaccaagccactctttttaaaactcctgggagatacacgctgtcagtccaaagcaaaatgcatacaactaaagaataaatgtcctggaaggattcctaaaaatatcatgaaaacaagcatagggatggaaagaatgggaagagtgatgtaggaatgatggatagagccaaacctcaaacgtctatcaaataggaatttcagaagaaaagaacaaaaaatggaagagggaaaatactgaccaaattaaaagaaaatttccctgaagtayacagcttggtaaatgttcagaatatttacatataaataaatatatgaatatataaaggttccaggctgcagggagaagtgaacacagattacttacaagggaatgaggagcaggtargatgagatgtttcatcgcaattcattctacacrccagcagtcattggatcaattctcccaagtgctcagggaaaatgaatactagtttgttaccagttcaaactcaaatttaatgtgaagaaacgatgagtgattggacaaagtttacccgatgacgtcctttctgaaagaataactagggaatttatttcagcaaatgaatccaaaaaagaaggactgcagatattaaaagtggtagcaaacaaaaattcttaccactgagacgtaactgcctgattgtgcatcatatatatttttttaatctcaagcaaaaattcccagatctttttgagaatcaatatcctaaggtaatatcttctactgycttgtaccaaagaaagakcaaagtgttgcccatgacctgttaatacacggcraagggatcctttactgtatgtgactcagagtccaagaacctggtcaatcatgttagcatcctgcatccagtcctccctgaaacctgagcaacccaagccactgtcctgtgccctgtgtcagaagacccctctgtggctttcctctgtccatgcccctcacagcagcatgatgagtctgcaggcccccaagcccatgcttccccttgccccacttgtgggccatgctccaggtayctgggatggtagaattcccagtcagttggccctgaggccccttccaaggcctgcaaagctgttctccaggtctgccctcccactgctgaccaggcatcagtgtgtgccctccttggatgaaggatggccaaggagtgaggttttgctgggaggagggagtgatggacaaaacctggacacactcgctggtgcccttgtgtatcctgctcatggtatggtgtggatccaggtgtgggaagagaaatgggtggggcagagggccaggacctttcatttgtattcccgtcctaagtcctgaaaatgtcagggactggcctgctctcatctttgacagagcaagaaagacggggaggagggagagaattcagtacagaaagaagtgggattgcaaaaaggcttcagaaaaaagccaaccagacatagcaattggaggaggaaaaggtgggagcttttgaagtgttggaggtttcctgcagtaagtaccagaaaacctagctacaaatggcccaaaggaggtgtgtacccactgtcactcataccgcaggagagaggcctcaggatgctcccttccttgctcagtgaactcctcagggctccggagcccttctgtcttccctctctgtgtctgaggttagtgtgcggcttggcctctgtggcctgctcccccagcggcccagggcgactcgtagttctgggtgatgcccccaggccacagtgtccagaagcaggaagagaacaagccagcctcgtgtctcttttccagagtaagaaaacctcctggactccccctaaccccaggtctcatttgtcagaaccaatcactggccagaagaagttcatttcccatgtaccaggattcactaatacaaggtcagccgtgacaccatgagggccagtcaactccaaggcccaggccacctggacactgcacagaatcgagcttcccacaactgcaagagggggcctggctggggagcaggcacctgcagggagcaaggctagaggcgccgaggactgaacctcacagtggttctcaaagtgtggtccccagactaacagcctcggcttcacctgggaactcactagaaatgcaaattcttcgccttcaccccggatgtctagaatcagaaactctggaggtacggcacagcaatttaggtttcaagtttttgtttctttatgttattatttttttagagatgggggtctccgctctgtcacccaggctggagtgcagtggcacaatcatagccgcagcctcaaactcctgggcttcccccatcaaccccctcttccccaacccccattagctgggactataggtacaggccaccatgcctggctaaagcaatttaagttgtaagaagccctccaggagaggcactctataaagtgtgggaaccgctggcttccccgacctccttctcttaggggtcagagtgcaatgaatcagcaaaggagacacaagaagagacctagcagacaataggaaaaggcacctaaggtggggaagcagcaaggagtcagcaacagcaaatgcaatgaaaaagccttgtgttttatttaaagagctgatcagggataggaaattgagaaatgaaacgtaaagtggttacaattcaagtgaagagttttcaagggagtgctgtgcatgtttcaaggcagagaaaaagaatccagtggaaagttaaagatactggagataatactcaggggaggattttcctgaggtctgtgaagggagagacgctagacctcactttccaatgtattatctactggtcatgtgcagctgttgagctcttgaaaagaagcttgtctgaattgaaatgtgctgtaagtgtaaaaggcacacttcattccaagccttagtgtaaaaagagacggtgtaaaataacccattaataattgtatattgattacatgttgaaataataatacatttagatgcatcgggttacataaaatatattagtaacattaatttcaccactttttttcttttttctttcttcagtgtaactactggaaaatttgcagttatgcttgtgactcccattgtgcttctttctttctttctttctttctttttttttgagacagagtctcgctctgtcacccaggctggagtgcagtggtatgaactcagctccccgcaacctccacctcccgggttcaagcgattctgcctcagcctcccaagcagctgggatcacagacacgcgacaccacgtccggctactttttgtatttttaggggagatatggtttcatcatgttggtcaggctggtctcggactcctgacctcaagtgatctgcccacctcggccttccaaagtgctgggattacagacatgcgccaccacgcccrgccccaattgtgtttctgattaagagctctggtctaaaccacaagaaagtctaataggtttgaagaaaaactgtgcaaaagagagtgtagacgtttcaggtaaacaaaaggacctaaagacaaggtcaggtacagctctttaaagattcctctcgctaaaattgagtcttaaaatattgagcagaaatatttctgcctctttcaaaaaaaaaactgaggcgattataaggatgtagaagttagcctactggctactaatttaatactgacaagaagagctgtgttcattgaatgagaatataatgtggtgctgaaatttcatctgtgcttgaaagaaatctttcaactaggttggacacaaacttttggtgggtagaagcagcaaagtgacccaacatcacactttgcttttttggtttcatgcttgaaaggggaaggttcgaggtctaagaataagataactagaagccttccttgagatattacaggcagtccacttcagaaatgcatcaaatgtcaaagcacaggacttgcttgggaaaaatctggcaccacagactaaagtcaaacgggaggacgatgctcacctggggctttaactactggctactcatcagctcctgagaagctgtcagtgagaagttcctcccaatgcctggaggcagtccaggtaagaggaataatgctgcaggaagcatcctgtttataactccagattctcaaataccagaaaacctgccmcaaagccttttttttttttttttgtaaagaggattaaactctctaaggccttctgtttctcaaactgtgaactctcttcattgcctttaatgaatctttcatttgttttcttggccaatcttgagtacttgacttagccagaagacttcttgttcatactgtcctcttttttttttttttttttgcttatcctaatttgcaatctctcttcacaatagtattgaagtcccagctgtcatatgagactgtccccaaagtcctgcttcttctacctccttatcatgcatacataacttccttattgtagttgtttttaaaagtatggactaaggccaagtgcactggctcacacctgtaatcccagcactttgggattacaggcatacataacccctgcttccatattatagttgctgtttttaaaagtatgtaataaggcccagagtgatggcttatgcctgtaatcccagcactttgagaggccgaggcgggcagatctgcccacttcgaaccacctgaggtcaggagttcgagaccagcctggccaacatagtgaaaccctgtctctactaaaaatacaaagattagctgggcatggtagtggacacctgtaatcccagctattcaggaggctgaggcatgagaatttcttgaacctgggaggcagaggttgcagtgagccgagatcacaccattgcactccagcctgggcaacaagagtgaaactccatctcaaaaaaaaaaaaaaaagtatggaatagggaagaatgtaaaaatgactccactgaacaaggtacctttatcaaatacacactttaggattcccatactgggctccatataatttaatatgcaagagagatgaatgactaagatagaaattccttcaatttctatcaactatgaatttgagtgatttgctacaatgacaatagcttttaatcatcaatgattttaaattatttagtaagtaaataataaagtaataaaataatcttgaagcagaaaatgtaattttttttcaagattaatttatagtaaatagaaagggattagtagtgtggatattaacaaatgtctaacgattttaaaaatatctaagatacatgtaaaatctatgtggttaatcagtcagttagaacgtgtcatcccctgaatgtaagtgtattaatttcctagtgctgctataacaaattaccacaagcttagtggcttaaaacaacataagtttgtcattccacagttccagaggtcagaaattcaaaagaggtttcactgggctgtcagttaaggtgtccacagggctgtgttcctttacaggctctaggggagggcttttcccttgccttttcccttacaggcttccaggggccaccagcattccttggctcctggctccttcttccatctccaaactcagcagcaaagcatcttcaaatcagtctctggctctgactctcttgttcttctctttctcttataagaactctgataattacattggcccacatggatcgtccaggataatctccacatctcgagattaacttaatcccctctgcaaagtccctgttgccatgtaaagtaaatattcacaggtcctggggattagaacatgaatgtcttgggggaccattattttgtctattgcagtttcaaatcctggaaaagagatgagtaaataagaaatgttggcagagtgtggtggytcatgcctgtaatcccggcactttgggaggctgaggcaagtggactacttgagcccaggagtttgagacaagcctgggcaacatagtaagaccccatctctacaaaaaaatacaaaaattagccaggtgtggttgtgtgcacctatagtcccagctattcaggaggctgaggtagaaggatcacttgagcccaggaggctgaggtggcagtgagctgagattgcatcactgcactccatccagcctgggtgacagagcgagaccctgtctaaaagaaaaggaaaaataggccgggcgtggtggttcacttctataatcccagcactttgggaggccaaggcgggtggatcacgaggtcaggagattgagaccatcctggctaacacggcgaaaacccatctctactaaaaatacaaaaagttagctgggcatggtggcgggtgactgtagtcccagctactggggaggctgaggcaggagaatggcgtgaacccgggaggcggagcttgcagtgagccagatcacgccactgcactccagcctgggcgacagagcgagactccgtctcaaaaaaaaaggaaaaaaaaatgttaaagggattctttcagggtgaaacatcttcctttcatcttcatttttaacagacattttcttcggtatagatttccagatttaaaaacggatcttctcactttcattgctcctgtgagcaatctactaccattttaatgtgttcctctatgaagaacaccttctttccctggctgcctttaagatttttatctttatcgctgcctttatacagtttgattgtgatgtgcctttgtgcaattttcctcatatttcacatgtttggagttcactgagcttcttagattggtagatatatagttttcatcaaatttcaaccattatttcttcttatgtccctttcagaaacttcagttgtatacatatattagtctgcttaacattatctcacagctcaccaatgtatttttgttcatttttgaggaattgttcttttttctatgtgttttattttggaaagtttctgtttctatgtcttcaggttcactaatcttttcttctgccatgtctaatctagcattaatgttacctagtgtatttattattgcacacatactagttttctctctagatgttcaattgggtgtcttttatatctttcatgtctctacctaacttttttttttttttgagayggagtttcactctttttgcccagggtggagtgcaatggcacgatctcggctcaccacaacctctacctcctgggttcaagtgattctcctgcctcagcctcccgagtagctggtattacaggcatgcaccaccacatccggctgatttttttgtatttttagtagaggcggggtttctccatgttggtcaggctagcctcgaactcctgacctcaggtgatctacccgcctcggcctcccaaagtgctgggattacaggcatgagccacggcgcccggcctgtctctacctaactttttgattgatgggcagacattgtgaattttaccttgtcaggtactggatatttttgtattcctataaatattcttatgttttgttctgatacagttaagtcccttggaaagagcttgatctttttgggtcttgcttttatgatttgttagacaagtccggagcatgcccaatataaggctagtaattccccacttactaaaacaagaggtctttgagcacactacccattgccccataaactctgagtttttccaggcagcctggtaggaataggcactcttcctatctctgcaaggacaccaagcactgttctctaatcttttctgatgttccttcccccccgcagcctggagtaatttcttcacatgcatttgccggttggatcctctgcggatccccaggcagctctcttctctttggtactctgtcctgagaattccagctgcctttatctccttgcactctcctccctgtcttctaaattcagagagtctgcgcgctgcaactttatgaagtaagcaggggcaatttgggggcttatcttatttgtttcccatctgtcagtgatcactgtcccttcattgtccgcatgtccagtgttttgcaaacagttatatcatatgttttgtctggtgtttttggttgtttcaggcgtgaggtaaatctgcccctcgtracactgtcttaggaagaagtatctcatccctttagtgatttatagaccctttkaaaagttcctaatcttgtatttatcatcatctgaaaaggctccttcacttgtttcttatagataattctgagactttccctttatttgaacacaatgctgtggcactggagagataagtcacataactttttgcttaaaaaataattaagtgtgactgacaccttcttgtgtgaaatagttttattattttacttactagtaaaaatattgtttaatgttcattgaagtacattcagtttcatccttcacacatcctattactcrtcttcaaatgtgtcaattaaaataagatctgttcacaccacttaacatcaaaaatcctgttttggcagcttagtatcagagcttctgaaatccctgtggggcctyttatttttgtccctcaagtggaatcccatgaacatagttctaatttattatgaaatgagaaatatttttaagataatatgyktttaggaagataactttaaaaaaatacttgatctcttaattcttgaagtctttatcttttccacatttgaccatttcctttattaaaataaaaatacctwcttactttgaatgataaacaattgtctataacttttatatattaagagaaaacccaaatatcaatatttacctaatattaaaagcaagtgatgaaatattccttataacagtaatgttagaagtgatttcccttcctcaggacaatccgatggtgatgatgataaagagctccaagcacaaggcctcagatggaacaactttatccaagccatggaatctctccggccattttttcccatcttactagtttagagatgccataaaagattagagtatgtttcagactgattgaaatatcagatgccataccatcatcctttaagcatcactattttaatggtgaaaatatttccatttaaaaacactatggaaatttgtcaaagaactaaaaatagaacaaccattcaattcagcaatccaaaaactactgggtatataaccaaagagaaagaaatcattatatcaaaaatatacttgcacttatatgtttatctcagcgctaatcacaatagcaaagatatggaatcaacctaagtgtccatcaacagattattggataaagaaaatgtagtgtacatatatatgatggaatactactcagccataaaaaagaatgaaatcatgtcttttacagcaacatggatggagctgggggccattatcctaagtgaaatatctcagaaacacaaagttaaataccacttgttctcacttacaaattagtgctaaacaaagggcacacatacacatatcgaatgaaataataaacactggagactataaaaggtggcagggtgggagggggactgagtgttgaaaattacctattgcatgcaatggtcactatttgggtgatgggtatgctgaaggcccagactccaccactatacaatatatgcatgtaagaaacctatgcttataccccctaaacttataggaatttaaaaatattttccctttggaaaatacagagcagaactctgggacayaccayttcaggagctaaagaataagttactcaaaaatctgaggtaaagcaatttctcaggacaattaacttttgaaaaatttaggctgctttctgttttgcatattcgatatacaactaataaacttagagatggctttcagtcttccaagggcagaacacagagtctagccctggtaggaacttaggaaaagaagcagatgaatccttcagtagttaagaggamaaatggccctggacatcaagaaggtggcatgtagccatccgtcctgggtgggtgaaagagattccaagtgcttatttacttattgtaaactctctcctgcctataattgttttccattgcttctgattctgtagcaataaagacaaytgttcagtaccctctaacatctttcatacacttayttcattcaatagacatctttctttatgcaagataatctcattgaagcttgaccaatgagtatatgttcagttaaatgattaacatttacccttttctctccacttaccatggttttgttcctaccctcagcatgctcttctgtgtcaccccttggctcaatagcaacactaggctaagtggggctgaggctacaggtttgtggccatgatcaaccagttcacccaagtgggaaatcaaccctttgccgtggtccgatgccaccctgttatctccattcaggcacctggttaatgcaaatcactagggggagtggtcaatagtgtgaagttaaaacagccttcgtcctcagtgggaatcctccccccaagagtatagggttggtcccaatgagccagagtaccattatatgacacatcctaataaagagctaaggagattaaagcgaacttccttgatattttcccatctggcattaaaagataaaagcagtaaaaaatcatccctcaggaggggaaatgcttttttcttccccaaactgtatgatctgagtcatgttaattaacttcagtcaaatgctcctacgcatagttttagaatccatcttataaaccgactaatcactagcaagaatgtaatataacattcctaactatctctctattatagaaatttctctacgtttttctaccatcctgtgttttccataaaatgtcttaataattctaataacctaaatcttcagtaaaactgatactcagttaataggttgtattagtccattttcacactgctataaagatactacccgagactgggtaatttataaacaaaaaaggtttaatcgactcacagttctgcatggctggagaagcctcaggaaacttacgatcatggcataaggggaagcaggtactctcttcacaaagcaacaagagagaaaaaaatgtgtgaagggggaagagctccttataaaaccatcagatctcttaagaacttgctcactatcatggagaacagcatgggggaaccgctcccatattccaatcacctcccaccaggtccctctcccaacacgtaggaattacaattcagattacaattcaagatgagatttagataaagacacagccaaaccatataataggccaactcaacttttcttctctgtaaaccagagtttcttgaaattacaaaaaaatttagtggatacatttgaaattaaattcagctgaagagctggaccaatcaataaayaaataaatcaaacaaaaggaaaaatgaagaaccagtacatcattttcaaattactttgacagctattgtccaaaagttttctatttatccatcaagagacacctttacactataattacacatcaaccatttaagaattagaagatatgaacttaaatatattagaagattccttccccagaagtattttgatgtatgtgtttgtatatgtgtgtaatgtgaggttagtactgaaaatgcagaaccactgcaaaaccactgtcacgttttaacttgctaattttgttctggttagaatgttaatgcttaaatcagctctagatcaattgcattagtcttacaccatggggcaaacatgtaggaactaaatgagttttcttccattgttgtctaggctctgctgaccccaaaacattgactttttaaataggaagtgcagaaaaggtaacttctgagctgaatgatgatttgccttcatgtgctgtttaagggacactttctcatctgttctctcaggtttggactctcctccagtcttgtcattccttgaccatagataactgtcagcccgtatagttcattcatatcaatacctatattttttctttaaattgctgacctatcaaaattctctttcagttttattgtaacactacaattagaatacacaataaaaaacagtcccttctaagggctggtaaaaaatcagataatctttgccaggtgagtctgcctcagactagggtaaatggaagcagcgttcagaaaagctgtggagcactcccagcagatatcagggctggttccagtgccatcaccacttctgaagcttgagaagttctgttctcaatgaatgttcatcattcattcattcattcattcactcatttgactggtttgcactgagtatttagcatgtgctattcacaaggaaaatagtcataagcaacattggaaacagtccttgccctcaggaggcttgctctgtcatgggaaagaaagatgctaatccaataatctagcaaagaagtacagacttcagtgtgatatgtgcttctgaggttaggcctggtactggcacactctgttgttccagaggggatttgactccatgaagaggtgctaactggctcaagatttgaaggatgagaggtgttaaccaggtaggagagaaaacatcattccagcaggaagtatatgtgtgtgaacatattccttactttgaaaccagcaaagatggttgcacaactctccacaaataatgaaatactggctctgcctctttttttggagtttctgtcataattaactcattttgtgggatttttaggggtactcaagctattattctttaagtggtaaatccaataggcaaagagcctagatcagattgttcttgaacatggagatgtttagttggtatgaaaaaatctcagtaatatagaactcacttctcactgtgccttcaaatctcagatattgttaaaaggctgcatctattctaatgtttttcctagcacctaccatctgtgttttgggatttatataaatgaatttgtgttccttaaagaaacaaaatatcatgtggactaaaaaaggtgtagacaggtggtcttcaataagatatatttttccagtgtgatttatgctatttggtgtaatcattactaacatctcacccatattataaatgatcttcttagaaaataacagatttttagaacaaaatataagcttgtgtttgtgtcaaatattttgcttatgtgatgttaaatacaattgcacattatattgggtcaactatatacaaccagtccagacataactcagagaggatgtcctgcatcgacaaagaggcgctctgctggtgaaatttcctatagtaaaataatggggatataacagccagggtcctgtgaggaaggcagaacccacatcacgtgatttaagagaaggaattgttaccaagatggtgggaagggctagaaaacagattagcagcaggaagcctacacaacctagacctgtggtgtgaagtcacagggaaaaggtacccagaacccagagccacagctgggtcctgagaccactgaagccccaggtccggagctacaaagagatggagccacttgaggcagagcagaagaaacaccctgacttctctcttgctcccaccaagcctcccactgaaggacaaacaagttactatctaattttttgaacctaactcaagccaattgtaagggaggctgggaaatacagtttgcagtgagccctttggtaagggcaagaaagagatcagagccaagagacagatgtatgacacagagccagcaaagtattgctgaatgatatcatgtatgaaggtccagggccctgtgttattggtgcctctttttcttaaacttttcttcataacaatattcttcctgaaagccttttttatgggaaacatattccttttttattatgaaagaattattgataatttctgtttaggtttataatgatgtagtttttcttagtccatatttttatttatttttttaaaattttttatttccacaggtttttggggaacaggtggtatttggttacatgagtaagttctttggggtgatttgtgagattttggtgcacccatcacccgagcagtatacactgaacccaatttgtcttcttttattcctcactcccttcccaccctttcccctgagtcccccaagtccattgtatcattcttatgcttcatagcctagcttccacttatgactgagagcattcctgagttacatcacttagaataatagtctgcagtcccatccaggttgctgcaaatgccattgattcattcctttttatgctgaaagtcatttttaactattccttactgaatgtgttgtttcttcctaatagactttcaccaacctaggcatgcgtgcttggctcttaccctgtacaagacaacacgctagatccacttatctgcagtgctggagagaggcaggcagtaggaaggagatcgtcacaggcatatgcagaggaagaattctgtgaaaccctaacagcaggtgacaaacctgccactttgcatgaattttcaatagtggaaaaaggaagggggatccagcatctagtgagctgagtaactggcagtgtgcttgactcactgtggcccctaccttctctggcatcattcacagcaagagaagctcttggcaagacaagagcaggacaagctcttggcaaattgatgaggttgccatcaactggatgtctttggcctggaaaagatcttcagcctctgccttccaaagcactagctgggtcttgcctggccttggttatctcccttcagttggtctcttctgtgttcctaacgaagccccagcagattggatgtatgggagtgtactttgcttcctgagcctaccattttggggatgtgcattcaattaccttttgctttgagctacaggcccaactcctcctcacttctttcacccacaactacctctatttcctgagatgcacccaccaacaccaccactatttggaacagagacaagatgtattacaaatcttaactcactcaaaaatcaggtagtaacttgtttgcctttgaggccctgatctcctggattcttctattaatataaaaggatctctgagatcatggcttgttgtagtagcactttccattttaacattatattctccaaccggtaagattagctagtaaggaaatgtgatatagggcaagttcttttctgcagggggagtgtgaccaaatgagctcacaaatggtagtgaaattggggtggggggagtccccttaaacctcaaagtgtggtaaagcatgtaaagtattttcaacgtcttacagaagtcactgagcatttcctttaacatacgtatgtgtatcttagtttagaacagagttggtctgactgagaactgggactaagtgagtggttgatgcccagagtgcagagtaatgaagaccagtgtctatgtgaaacaagagaaagatggattgtatcaaaacagcatgtagaggcagagattgaggggacagggagaggtagacatctaccattttggaagagataagccagacaagggctgagaacagcctagtgtcagcaccatgatcagacaagcctagtttgtggttaaggtaactaaagagataagaaacggaaagaacttggaagtatcggctcagtgctttgaacacataaagagagttctttctgtttcttggtaggaacaatcccctaaaaagatcttaggttgtaaaaaacactggtctatacccaacccaatgtgtgtaggctggaatgcagtggttgtgtgtagcctaggaaaaaacggtgggtttagggattgcagggagtggagcattgggaaagtcaagacgtctctctcctctctagctgccttcattactgttgaacacccattcaaagaataaaacaaggagctttatcccaataatcatgtaagtctcccccctaaaatatcaagaacttagtggaaaatcctacaaatgtatcttcaaattaaagcagtaagttctaaaagcatcacgtcaaggtttaaatgaaatgagatgaatgcaatttatcagtttttttctttcaatcaaaattcaaggtgaattttagcagtgactcagatcatttttggtatcttttattagcaataagtcagaacctttaattatgaataaccttggtgccacaaagaaaatgataggactcttccagaaaggttttcattagttagagaccaaattaattttaatacttgatagtttttttcacagagggaatactttgctttaaagagtgtttttgtttgtttctctgattgttttatatttagtaaattcccagaaaacccccatcactaatataatagtgtaaataattgaaccaagtaataaagcatacaaataattgatcaaatctattttgatttgccttggaaaatgacttaacttcttaatgtttgacttgaaaggtaagatgctaatttccttttaattgatatttgttgcttatgaaaaccataccattgacacattagttgagcccctggactgacctggtctaataattattatgacacgtggtgagcaaatgaaccaagctacagtccctatacttcatgtctgtccaccacattgtcagactggaccattcatggatcagaggaaatccacccagttgccctgccatccttagagacagcaatgaagagtaaggaggatttgatgttagatattcatcactttttattcttttaaagttatttgtgcaaccaaaggactcaaggtaaaaaaaaaaaataagggaataaagtacctatgtcataaaatctctaatcagacaaatgttgatattaagtatacctatgatagctttctaccaaaatcaaaaaccacttattaagcattattaaaattcaagctttaagaatcaatttctagaacatgaggttccaatggtattatccccagtcttggcttatctaataattttcatcgacagattctgaattatggtctaaaattatcagtggcatctattcccataactatatggtaatattttcattatatttaaaggaaaccccattatttgaaaccattgctttaaagagcatattaactctttttttttcttttattattatactttaagttttagggtacatgtgcacattgtgcaggttagttacatatgtatacatgtgccatgctggtgtgctgcacccactaactcatcatctagcattaggtatatctcccaagggagcatattaactcttaaaaatcccataagaagatgctgttatctttgttttacataaaagatattgagcaaatattttaaagaattcttggcctttcttttttccctttgaagatttaccttgacattcactttaacctgattttatctccacataactattagaaccaatcgtaccactcaatgatacttctaagccctacattctactccaaatgtaaccattttataagtgttttattrtatactcccaaaacaccaaatatggaacgatcaaagagtgatgtttacttgttgcttcaagcttgcttccatcttgtaagatgtttcatactttgcctagggattcctgttttcttcctaaagcaaactattaggcacagttggagatattctgataagtaatgttaatgaactcccataccaggcactatcctaaggattttatatgtgttaactctttaaatcctcacatcaacctgatgatggaaatattatcatcattcccattttagagagagggaaattggaagcacagagaagttagttaagagcatgtgggattcagacccagcttatctggccccagaacctggctttcaatggctatgctgagattctctgagattcttaccctagatgtaagaaaccataaagatttttgagaagaaaacaaagttaatataaaaggccacccaattgtgtatttaaggaaaccaaacttggctgttatgttagtaaaagagccacattcacacttttctccaaggataccatggctaggttccaatctcatcgttttttttgcggaaggcttggtgagtttctccatttttaggtatgtccttccatccacctcaaaggcccaagatagaagtacagcaaggaactctcaacaaagtagtgattctcaacttcttcttaccttcacaacattctaaaaggaataaatatactttccacagtaacaatgctgattacagcagtaattcttacccagggatgagcatggttcctagaagcggtatctgtcagtcttatggggcctcagccccagctcatactctaagcagaaagttggctgaggcagctgagagtcagtgttagaaataatctgtgggagcagtagccacagtcaccttgcactttttttttttaacagagtctctgtctatagcccaggctggagtgcagtggtgcaatctctcagctcactgcaacctccacctcccaggtccctgttcaagcaattctcctgccttagcctcctgagtagctaggattgcaggcacgcaccaccatgcccagctaatttttgtatttttagtagagatggggtttcaccatcttggccaggctggtcttgaactcctgactccatgatccactcgcctcagcttcccaaagtgctgggattataggcgtgagccagcgcatccagcccttgcactattttttactttcattttgaggagtactgagctagaaagataaagacattttcttcaatctcatctcgtcactacacacacagacacacacacgtcctatgggtacagaagtgatgaaatgtgcacgagagactggaatcatttcttagagctgccattaaaaagtaccacatactgagtggcttaaacaacagaaatttatttccttatgttctgaaggctggaagtccaagatcaaggcrttcacagggttgagttgttctgagacttctcttcttgacttgcaggtggctgtctttttcctctgtcctcacatggtcctccctgtgtgtctgtgtcctaatctcctcttcttctaaggaagccagtcatgttggattagggcccacccataggacctcatctgaacctaattgcctctttaaatgccctatctccaaatacagtacagtcacattccgagacactgggggttaggaattcaacttaggaatttggaaaggacacaaacccaaatagatggtctcatttagaaagaaaamatgaattataggctgttttattttaatttgggtttctttttcatgccagtttttctcaggtatgcttgatactctctgagttatctcccctttccaatgactgaccagttctaccgatttgcaaattcataaaaggagtaatctggtgttaggcccagaccatttcctagcagtgatgttcttttcctcatgccagaaaaaaaaaaaaaaaaaaaccctctctttcacagtagataatcctccatctttgcagtttatcaccttaaaaaccttgacatgaataagctctttgatgataccaaaataaaaatagtcttttataaataagtcagcaaagcctggcgatctgtgaaggcagacttccaaacatccaagcgaagtttgttgttcctttttccctttcttctttcaaaaacagttatttgtcaatttaacctccttgatccatggaaaatgacagaggcgtgcagattcagaaagggaagacaataagagcaggtgaagttgaagataggagattgatgccagggaactaaataaccagaaaagacatgtgaaatagagaaccgamtggagagcacaaagaaaatggtaaccaattttctctgaaagtgaaaggtaaagaaagctgaagatgaaactacctatttatttttaatagctgcatcaagagattgcttaggtggaaaaaaaaaaacaaaaatgttgctggttctgattatcatcctcaggctgaatccaycccacctggtgtcccagctccaraattctacccaaatcgttactcccgtacccaaaccctagacggtatatccatagcagaaaaaaaatgcatcttcatagtttgaacaaaacaaataatttttggaaacatttttcaattcaagaaacatttactgtttagtaagtgttaggtactgttcaaaatgaatttctgccctccaggaaagcaaaagcccagaacagattaaaggtttctggtcttaactccagctccaggctggcttggctcactgtgaaggggcagatgcactttatcctgttcagttttttccattctatttggacggatgggagaccaagttactgcagcccttcctaagacaaatttggttggcacaaattcagatgycatcgctttgttgatccttcctagaacttacttactagtctgaatacaatttcccaagatcatctcctctgtcaccaggacctggaaaacgtattctgaagctttcccctccgaggctggaggtcctgtaatacagaggtggaaagctccgactgtgcagtcagacgcctgccttccgacaccagcagttttagtttcaacaacttagacacatgattgaacctctctttcagcctgtttcctcattcataaattggaagatagcaacactcagagggctgttgtgggaacatactggaaacatgcatgtaaatccctaggcacagtgcctggcttatagtgaaggctcttcataaatactaacttctagaaaatgaggctcattagctcacttcaggtcacaaagttgggatgaaacaggaccactacctaaatccaaaacccatgatcttcactatacatgttgtctctctcctaagaaagacctggtgattgtctttgtctaattttcatcatcatctcaaatttcccctcagatgattaaagacctataattctttgggaggctgaggtgagaggatctgcttgagcccagatgttcaagactagcctgggcaatgtagtgaggccctgtctttacaaaaaatttaaaaaattagccaggcatgctggcatgagcctgcagtcccaactacttgggaggctgagttgggaggaccacatgcgcctgggaggtggaggctgcagtgaactgtgatcatgccattgcactccaccctgagtgacaaggcaagaccctgtctcaaaaataaggacttataattacaatataatgttatgtaccttttccagaaaaaaatgtttttatattacaaaaaatattaagttctgttattgctaatgaggtgatgactgttatcttggataaagaagatatttctctctctgaatcccaagggtcctccaggcttctgattttataattttcctctttgtcctttctggaattctacagattctgggaatcaacctctggcctattctattaatatttatcagccagttgttaagactccttctaactttgcccaaccttggttcctgtttccaacaytctcgtgaacatctcagttcaggcctcatggctacctggaaggggtcacacatcctgcagcctgaactgcagccaggcccctccttgtctcagtgggttctgtttccatcgtgagccccaaaccctactgcagtgttccctgtctgacaagtgcaaaccattggccaggcagagatcaccagcaaattctgaattcaatcaaaggtaagtgtttgtacctccagttaccggttctatttgcattcttggttttctgatttactagaatttaatcatgacagttttttccttactgtacatttaaagtagtatggcaaactagtagacatcatttccaacaagggaggaaaacgccattcccattttatattcgtggctctctttactgtgatggactaaggtgttcacttctcccaccgagctgctcaatagaccaacaggatctttcatatgccaatccctcaggacatgctgtctctctgtcactgtgggaaagttttaagtcctactaacaatgaggaaatgcaaaattatttcactcatttaagctatcagtttttgatgggtactattatagatctctcttaaaaggttgtaaagagaggaaagagaaaaggtttcaaagtaaggcaatgatttttcagaggtctacatgatatagaaaaggaagcattaatgaaaaccactgtggaatcctaggactcatttgtctgtttaaggatgcttctacggttatctgcagtgccaacatttgattttatatgctccagttttatacgacttgattttacctgaactaggtggttacttattttgacttaaattatggcttttaacactttttccaatagaagggaaagaggaggtaatgagaagcaatgaatcagtcccaagccagacagtccttttacttctcaacaactcttagtgaagtagttctgaaggaaagagtacagagcactgacttaaatagggtccatttaatctattattgcataacaaattacctcgacactgacaacttaaaacagtaataatcacttgttaccccacagggattctgtgactcaggaatttcgggagtagtttatttgggtgctccagcttagagtctctcatgaggttacagtaaagatgtgggcaggactcatctgtaaacttgactggggctagagcatttggttccaagatggtgcactcatgtggctggcaattgcatggtagctgtttgcaggaggccttagttcctcaccatgtagacgtctttacagagctgcttgagtttccttacaacatggctgctggcttccttcagagcaactgatccaagagaataaggaataagccaaaatgtctcttatgacccagccttggcagtcacacattgtcatttctgtaatatcccattgatttgcaggtcagccctattcagcatgagaaagaactaaacaggtgcatgaatagtaggaggcagtgattgttgaggacaatttaggaagctagggaccacacataccacaaaagtaaaatgattttataaattacatgtcctcacagagaaattggtcattaatggttggggtcaaagggattgttttctttgtgtttgagcctcagaagccaagatttaaatgcattccttgatgtggcacattaccaccatattttttattattattccttttatctcaatttctccttacattcctctcctcactacccctccactcccagcctccactaaacatcaactcaaaagagcatgaaatttatctttggatatgcagatatgtagatatgtatccctgtaagatactaagatacatgaggtttaatggtcatttctaaattacatgaacagaatggtgtcataggtatttttccaaaatgtatattctatgccacttgtttttttgtttgtttgttttttggtttttggggggttttttgtttgtttgkttttttggtgtttttttgttggtttttttttttttttttttgagacagaatctcactctgtcacccaggctggaatgcagtggtgcaatctcagctcactacaacctccaccttccaggttcaagtgatttgtgcctcagccttctgagtagctggggttacaggtgcccaccaccacacagggctaactttygtatttttaatagagacaggatttcaccatgttggccaggctggtctcgaactcctgacctcaagtgatccacccaccttggycaaagtgctgggattgcaggcatgagccaccacccacctaagccactggcccacatttttaatatttatccctgtttctgtttgctattaggttcatygctgcacaattttcaataatacacttctgccacctcttccctgtctattcccttactgttggtgaactagtcctcctccagtttcatcctctatcaagttatgcagtgatgaacatagtgtatacatagaactggggcacttgtcatcaccttcgctgtcccttttctagttcaagcccaatcacctccagcctggattattctgccacctgctttctttgtttccagtcttgtccactactgtgtattcccacccagcagccagcatgcctccagccacctcccattattcttagagcatctctgaagtccccaccatggcccatgggccccacgtggtctgcaccctgctgtcttgtgaacttcctcttgcaccacacttctccttgcttccaatgctccagctactcctgtctccttgcattcatttattcaagaatattaactgagcaaataccatctatctgacattctcctgggcacctggggtatagcagtgaatgaaatagacaaacaagtctccctcatagaagtaggattctaatgatctaaaaacccatcaagtacaacagaggctcgcgaccttgcacctgcacttccctcggccaagaatgccctttcccagatttctacatgcgtcgcacyctcatacatctaagtctcagcttgaacgtctcctcctcagagaggctttttctcatccccttacacttcttctccccaggcccttctttattttccctcatacctcctgttgtatctggtattatgtgttcatctgcagtcaaatctctaccactgagctgcaacccccatgcattcttctgtttcatgttcagctccctagtcagatgaaagcttcaaaaggacagggagtttttaatgttttccaatgactgggccaatagccccaaactattgcccttttttaacgtgtatgtttcggcttctagtgcctgtgttgctgccaaacttcagttgccttagttttcagcacacttgacttastaacaccattttcctcactgttgtttcaaattcactgtgagattagatgctagataaccacatttcataataactaatacttgctgagtacttttatcctaatgacagccctgtaagtatggcctattgatgtttccactgtacagctgaggaaactggggtgcagagggtctaaagagctcgcttacagtgactcaccttgcaaacatcatagccagattggaatgaacgcagtctgctccaaagccctcacgcttaatcgctattatatgtgtccacccccttctagaatcacgtgtgaaataaagataaattggctctgagtaggtgtctgatgggacttcctataaggaaacagcataagctttattacataaattttgtgataaactcagctactttgttcatatccgatttatcattgctaaattcgattacttctgatttagcactgcatctcagagaggtgaacatgttgggtagctaaactgtaagtgtgctggtttgatatggtttggctgtatccccacccaaatctcaccttgaattgtaatgattcccctgtatcaagggcggggtcacgtggagataattgaatcatgggggcaggttcccccatactgttctcatggtagtgaacaagtctcatgagatctgatggctttataaatgggagttcccctgcacaggctctctcttgcctaccaccttgtaagacgtaactttgctgctcattcaccttctgccatgattgtgaggcctccccacaatcacagtggaactgcgagtcaattaaacatctctcctttacaaattacccattctcaggtatgtctttattagcagcctgagaacagactaatacacgtttgttatcatgttatgcaagcaggaattgcattaaatgcaatgtagtagcttgaaagcacacatcgagtcatgaggtgtacagcaatctcctcccttcctgcgtacattatttcagaagctggcctctccagggcgtgcccatgtttcagcctccatgtagagcttattctttccctgcattacactttccacgtgctcctccattagttctctgcaaactggttttaaataagagccaaggagcatggcctacatgtcagagttgactagtttccaatgcccacacagaacaggtgtgtgtccctccctccacccaccctccttggatttcaacctcctgattagagcttctcagtgatggttcatcattcctgcttctttgttcttgggtaagctaacagttgccacattaccccatatatgcctccaaattgtgaatcattttgtggatattgaggtactggaggaacctttctagaatgctttttgagaacatttcactcatttattcattcaaacatcatatttaaatctttactactggccagaaattatgcaaaggtgatgaatcaatcaatagaactttatctcaaggtattcacaatctaatagacaggaatatgtcctggagactttaatacagtgttgttgggaaataatggctaaatgcatatggaattatggaggcacttgggggaagaagcacctattctggaacaagggggaagccatcsttttcaaatgctgcccctattaggaggaattggggaaatgaaaatgtaaaggtacaggaaaggaagaggctcagcaccaactggaaatgtcatggtctgtggggcaaagaagaattttatgtgtcacttgggggcaaattgtagagcaaggagtggagctgagagaggcccaggccaggtgatgaaggccttgatcactgggcttcagagctcactcttgacccagagaaaacagatggctttcagcagattcacatcagtatgagattgtgtcttagaaatactcttattgtctgtgcagacttgggcttgcaaagaaagagtagtaggaggctgatgtggcagataagtctctgggggggttcagcctgtacccctgtcacaggttaagactctgtaagatggcaatgtgaccccagcagaggctggaatgcccctcaagagagtactctgtattgtgggctggttaagtcttttcttggtgccatcaataaagtccttaaggaagccaacattgggggtttgactctcttgcagagtttgtataaataaaatatttcctttgctgtgataaaagacagtctcccaaatcctgaagggaaaatggcagagtggaaaaggcttagactttcgaatgagagctcgtttcaaacctgtattctcaacactagctctgttaccctaggccggttatcaacttctctgatcatgacagtccccatcttcaacattttgaagattcagttttactatgtaaacacagttccactgcactgttgatacatagacccctagctattatgtcatttgtattactgtcattatctttatcatcactttgcaagggaggaagaggcaaacaagaatagcagatggaccactgcacatgtcttcttggtgatcaggaaatgatgtcaaattgcatcagcagcccatcctgagacgtagtaacttgatacttctattagcagcaacacccaaaatacttgccttagaggcatacttgagtaactccttctccatccaatttgcctaccactgccagattacccttcctaaaatactgctaacctttcatttttctggtgtagactattcaatggtatcctattacctattgaattaaattccaacacttaattaatcttcaagtctttgtttgagctaatcgtagagtgtttttccatttatttctttctctctattttcctaaggagcggtgtatagtaaaaatctccaagcacccataaaatgaggatatttatacctgctttatccatgtcacaaggttatggtgaaggccaaatggctagtatctatggaagtgtgttatgtgttataaagcattgtgtacaagaggtaagggaactggcatttgcctatgccaggccagtatgtattcttttctaccatcattacagaaacttcattaggcggatgattttgttccagttccaaagatttaaaaaatctgaggcacaacaaggctaagtcactgctccaggctacacagcactgagaaatggaacaggggtttgaattcagaactgctttgtcctaaaacctgtgcttttgatccttcatcacactgcctcgtgcttcttttgaaaagacccctctcactccagccagacttgtgtagtcactgctccatgaacactttctgtctttgtgtctatacacatattatctccccttcacggcctacccaggaccagccctggctatgcctcgttggtcagtcatttccattcccttggcctctgtttggttctaaatcatgacatagacagcgtgtgtgatctttgatactgctgtctgccattactcttaattctgaaaatattgttttactgtgtgtatatgtatactcttatgtcaccaaaaggtctgtaagtgttttgaaggcatagaataccccttccctataatacgtattattctctctctctctctctgtctgccactcttcttatctccctgcctccctctctctctccatacatccctgcatcaatccatctataccaacatatagcagatgcccctagatatttaaacatttgttgagtgagtggaggaatgaatcggtcgatgattatgagtttgaattaactcatctttgcaagtctcctctggagagtttctcctttccagggagctgcctggcttgtctaacatgtacaggccttgaaagcattcttttcagaactagaacctttagggaaattcacatcactgcaatctacttttacagtgtcgtggctgtggtcactaattaaaatgaatgaagaaggctttaagggaaaaggctgtactttgtcactacatccttttagtaaatactgttccattttttagtgattaggcaaattcactaaataaaattactcttacctagaagatttacccagagagactgccctccttgcatggctgctgcctactgagtgtggcagaggctcaaatccatcatttaatgtttaatggcctccaatgacctcgagtgaccccagactcggcacctcattgatgccctttgacagtatgactataggagactggggatactgtggaggaagatagggtctctttaaacactatcattttgactaatctaccaacttttttatggctactggaaaacattgtatcagactctctccttttagccaacctcttcctctatccctgcattctgtctgaaccacagacagatacaaaatctaacggagtatgagaaagggggcattcacaccatgtctttagtttctccccaaggtgggactggatgcaagggtgattaaggccagtggccaaccaccaggagggctaggctttcaggaaaggaacaatagacagccagaaagctgctgtgttatttttctgctctcagatgcaaacctagagaggaagaatggaggggaaacctcccaagaagagacaagagtcctttcattaatcaataagctttgaatccatcaaacttgatttctaaattggctgtgaaattaccaaagaggttatgaaaaagaccctttgaacyccttagcagaaatggggtcttgagaacaaatggagttcacatatgagaaaatagagaacattccatttctgcaacctgaaccgtgatgatcaattctcagcccactgcatgtatttgctgatcattttattcacatccattttcccaccgcactataagctacagaaaggcagaagccatctgaattcccctcttattttagctttatctcctagtaacagggccaagatggtgactcaggaagagcacagcctctgaagttagaagtcctaagtctatagaatattagttgattaaatgcatgaattcccaagtgcaatgcatcacccagtgatccactatcttgaaccaactgcaactcccaaggtcaaaagtttccccatggaatctgtagagattttcatgttgctctaagtggggaactcgtttggacagcaagctgaacccctaacttctgtcacctccccgagtccagtccccagtctatcctttgggtggtccttcagtaggaatcaggcatggcccagcttttcctacctggcttccatgctgcatctaggagcatattatctaagctgaatctgattctttttctttcttgaattttttttctaatgacttgtgcaccaattgatttaagtaagtgttttatgtttctggccagttagtgcctagcaccaagtggtcaaatggacatggaatgagtatttagggctgggaaagtgattgtttttgcactgatcctgttcatgttttttatctatgagatagattgacagagaccaggccggactcctccaaatgtagccctgtccttgctgcccttgtcacatttcatactttctccccattgtcagccacaccccctttggccacgtgggaagcacaggaggtagatttggcttctgctggtgggcagggcctaggctcccccscaagggtatttctgcaatgttccatcttagaggctgaaatcacagcttcattctggcacagtccttgtgggggttgttcccatctgccactgagcttagaagatgcacatgaggcactttttgttgatgttattggccggctgtctagagggaaaaattgctcaagggaactttttgactcctgcaatctgtgggaggtgggatgtcatgaattctttggcctgggctatatgtgtgtactcacctaccaacctcaagctgccaggacaaccttcatctgcccaggggccctttaaaaagggcccttcccaaatggatattgacatgctttggatttaaccatgtgggcgactttagaagcagccttattaggatgcttaagtatattttagacaccctcacgcaacctttctacttctgagaccaggcctgtcggtgtctggtgtctgccacagcagccctcattatgggagatgtgcaggtaagaaagcaggaacaagagagtgagaaaccaagggtgcacagcagaggatgtgaaagctggagcactgtagatycatcaaccttgcaatctctggatgaggagatgagtcaccatcaaggccaaggtggttttggaagtcaaatgtgaactcccaaattccttactgggtgctatatttataggccacacttgcaaaaagtaatcttctttaactggtattaatcattactacaattaccttacatttaaaaaaaattctctgtgcaaaggtggcgctaaagggccattcaggtttacaagaaggaggatgttgaaagcaatatgtccttagatgcttttggccaggacaagtgacctacttgacctactccaaattcactgctttccaaaggccagacgagctgcatttgaattaccttgtgcataattaatgaattaattaattacaaatgtagactctcatgtcctaccttatcctattgagacaaagggaaacagggcccaggaatctagatttaacaaatgccctaatccatgccaaagcatatccagatttaaaaaccaccatctgaccattttccaccccctgcccttctgctgcagtcccagagaggaagcaggtgattcctcatccccaggcacagacccggtgaacagggcagaactgagtgaagagctccttccccagcttccaccagcctaatgggccagagccaaagcagatggaaagactgcttttgcctatttcaaccccaattcccaagccaaagctcaagtcttacctctccaagcaaggaaaggcaatgacagccagtgagatgccggcgagaagctgaagggagcccaggcagcagcatatatgtggcaagtccagacttggtagagtgagccggtggaggcaggagcagttcgtgggactggcccagccttaagcttggcacagtgactacacccagaagccatgccgggagcttaccgtcttcctggaggagaggaaggggtaggcagtagagaaaatggtggagacgggtagttaggccccagcccagatgccaacataggagccattttaaaccagcttttgcgtaaccatggcaacagggtagacagtttccaaaaccacaagagaaatgtctctgcctcacgatattttgagggctagtgggtcgttgctgtttttcctcaatcataatcctgtgcagttttcaagaggttcttgggtaagtgtccaagagctctctggaccactgtgatcccatattttagtgtcactggaaagtggcatcagtgtccctcagcatgtcggccctcaaggttctgtccctttgggatccgtagaagagcaggcacagagcaatgcccatggagcacctggaacctaattctgaggtccccagcacagtcacaggccgtggcgtccagggtagcgactgagtacatgtaccttcaggctgggacccggcacccttcctattgcaggacacgctcagatccgcacaatctcaggggcagcctacacaggcccccactcaagatgttaaatgctaaaaatgaactaatgtagacttctaaaacagactgctccaaaaactccctcaagaaataggagtgatgatttcacaagagggtattttaaaacacaaaccacctgggaaaatatttgccacgaagaagatagcagtgagcatagcacagtaccacacccatggcaactactcagcaacttgtacttagggttgttttcatgaaaactgagtttcatataagtcaatagaaaaataggaaaagaatgtgttcacagcagacagttcacaaaagaacttcctatggcccacacagcacataaaatattatcctcattagaaataaaaaagtatgcattaaaataataaaacaccatttccccacacattgaattggcaaagtttgctttttgttctgtttaagataatacctggtgttattagcccagcagacacttacttatacactgcctggtgacactgtaagctttgcaaactagcaccatgtatctgcagagtgatctggcagttcatggtacaagactgcaagcttcagaaatgtttgtatagactttggtgcagtcattccatttctagggaattcatcctaataaaagaaatagagcatgtacaaatatttatctacagaatgttcctcacactattttttgagaaaaaatttagacgaacagcagttttgctcatgggtagatgaccaaaatccacagcatagaatttaaagttcagctgggagaaataaatttggttgtattactgtttctcctgctaaaatgcacatatcataggaatagaacatgtttatgggcttcatctgcccccagagagaaatctatagagccctttctgtacacacacccacaaactctgcacaatggccccagagtaacgcatagtaaggcttcctgttgcctgctgaaggttataatcagacaaaaggtggtttagaagagcacttccaagtattggcatctgtgtttgcacttagaaaatcacaaagatagctttgacttttgaaccaaaacccatggtggggcttctctctttgctacagagacagtgacctaactctgtttctggagtggtcagaattgtggaatctgctttgtcaattcatttcctttcaaattcatttgcaaatttatggggataatgtgctacaccttgatagctttagaccgtgagctcttggcttagagtgtgattagattaggcaaacaaccttactttactcttaagtttcttctatctaaaaatgaaattacagaaaaaggtgactgtattagtctattctcacattgatataaagacctacctgagactgtgtaatttataaagaaaaagaggtttagctggctcacagttctccatggctgggagaccttaggaaacttacaatgatagtagaaggcggaggggaagcaggtatgtcttcacatggccagagcaggaggaagacagagcaaagggttcctttgaaacaatcagatctcgtgagaactcaatcacgagacagcactggtggggatggtgctaaaacattagaaaccacctcgataagccaatcacctcccaccaggtcctacctctaacgctcgagatcacagttcaacatgagatttgggaagggacacagagccaaaccatatcagcgacaaaggaaaattttgcatagaaatcrtaaggcatatgaattcggcatagtggatgaggatctgtactctggggccagaccacctgtgtttagcccaggttccatgacttaccagctttcttactttgaataagttactttacttctctgtggctcaatttctgcctctataaatyggggggtgattgaacctactttaaggtgttgtcaagattaaatggactaatgtatttgaagcacttggaaccatgcctggcacataataaggtctctatatgacggagctattcttattatcatcatcactattaaattattagtatattttcttctctcttcacttgtgctaaaaaccatcaataaattaaaccacttaattccaatcccctttcttgcatctttagaaatattttgaaggcacataatgaactttcagcataattactgaggtgagaaatatgtctctatgttcaaatgctcttccargaaaagacttgagagcatcaacatggcaacaactcaagagccaatgggttttgttccataaaccagatacctagcaggttaaatatgaaaaactacaagtgtgttgttgtagtcagatgagttcaacaaatgtcttgagcattagatgctgctctggatacaaatgcagatagatacaagtgcagacagaataccataagaagcagagaaaagaaatagcagtgtgtgtggatggcgagcggaggaatgtgagctactaaattacataaagcatagagaaaccacaaatggtggggtgagccatttagggggcaaaaattccccagcaggtaagtcttcaaggtcttttggttaacatgactggtatgcatatcagatcatctcagctttgtaaaaactgttgcaatagggaggaactattgatgtacaagccaacagaaatctaaatcactcgacatttttaaaaaacattcatgctccttgggaacctatggattatattgggaaaaaattcatgctgcttaatgacataatgtaaaatgtacaacttttactccttaataataaattcacrtgttggtatttccatcagtttaccatagtgagacttcatgtttaaagactctatgaatataaaggaataattcaaacatgacttctttactctactagcagatataggtttctgttttcagcatcaaaactctaaattatatgtatagctgaaggcctaacattcaaaacttctctgctgatacgataaaaatttatttagcctaagaaaattgcagccagttactctgctcatatgtcatgatggcacctttatgattttgatattgacacaacagccatatattatatttaacaggaatatattattcattcttttaacaagtatttattttgccaagcattgatgctgataaaaataattatacttgctcatttgactctggactgtatcataatttagacgtctttctctcgatctttcagtaaaagcacttaggcgagatgacaatcacatgttcctcagtcaagctgatgtctttccaaaagttgtaagatgtaaatatactgttactcacccactttcacccactagttttagcatccattgaattactgttgcctgaatcaattactaccagcctgtgtgatcttctaatgatggaatcattactattctacattcatttgttgagatccattcattgagtaaggaagagctctctttttctctcatttatttatttagtatgggctgtgtaatcttattttattaaattattattcattgtactgcttaaatttttttaatttgctgccccagatttggtgacagggagcaccttcaagcaaactcctatgtcattttgatatgtccccatcattttttgagcttttcttactttctgacataacatgttacaggctcacctcatgttgccccagccccagccctggaagaaaccatttttccaaaatgcccaggctctttttagtcaagaatggtgttacaactcaactcctgggtgctataggtgctcattgctactaacatgtcattgctgccaagtctcaagagacagatctaggaaatatgtgaatatgtacgtatatacatacatgcagacacatctctctctccgtatatatatatttatacctatagatatatagagagctctatgtagatatctatctggagatgtgtctgcatgtatctatctatatatgtgtatatatatatacacacatatgtatagagagagatgtgtctgcatgtatgtatatatgtgcatatggtcaaatggcatatatatttatatacatataaatactacatacataggcacatatatacatacatgcatgtgtgtgtgtgtgtgtgtgtgtgwatatatatatatatatatgtcatttgcttacactagtgagtctccacagggggcagttttgcccccagggacatttggcactatctggagatgtttttggctgtcacagctgggaaggggactgctgctcacatcttgtgcataaaagataaaaaccagggatactgctaaatatcctacaagacacaggacagcctccacaactgagaattttctgacccaaatgtcaataatgctgaagtagttgggaagacctggcttatacaatgacctctaatttcaatctgacaccacactgttcactccagcatgtccttctctggcaatgagaaacatagcctcctttaacacataggcaatcctagaatgcactgaaagtatgtttccgaattgctgtcccatacctcaacaggaaaacaaacctatttcctaaaactcagtgtgataagtatgattccraattgctgtcccatacctcaacaggaaaacaaacctatttcctaaaactcagtgtgataaaatgggatttttgtgttttgtttggcttgggtttcagtttggtttttctcttctttctggctttctttggccattagcctgaggatagtcaaacactgttcaaaagttacttaaattatttgggttgttttgagttctttcctgaatgtagttaatgaatgagaacaacttgagctttattgggttttttttcttctctgcacctgtggctttgaaaacagactatgtcttactgagatctgtgtgcccggaagtatgaaggtctttaaacatattagctctattgacctgtgtgattttctggataaactttcatatcaaaggaggttattttcctaatttttttatacacattttcattttcctgaaaatatgaggttatgacaatcccagagcacaccagagtgataacaggaagggccagggcaccccaaggctgagcctgaaggtgactggggagggttaaaaatcagtagtctaagtggaggtaagtaggaacttcttagcatgggtagactactatcaggggccatggtagagggtaatgcaaaatacaactgycctatttgcagatgacatgttctttgggatcttgaaattaaaaaaaaaaaaaaatcccacaaatctgttattagataaaaatgcagctgctgggcgcagtggctcacacctataatcccagcactttgggaggctgaggtgggcggctcacctgatgtcaggagtttgagaccagcccggccaacatggtgaaaccccatctctactaaaaatacaaaaattagctaggcgtggtgtggcacgcctgtagtcctagctactcaggaggctgaggcaggagaatcgcttgaactcaggcggcggaggttgcggtaagccaagatcacgccactgcactccagcccgggcaatggagcaagactctgtctccaaaaaaaaatgcaacaaaaactgacttttataaagtaatgctactgggtcactttactcatggatgatgtattttgaacttccatctacaactcaagaacagatgttagatgtcaccataaagtacaagcaaaaggtgggcaaaacaaacaaacaaaaacccaaaacacaatacctttgacacccactggcagaagtaaaactaaagagtagaaattgcaagattccaatttcagttccttggaaaaagtaactatattataattagtactgcctggaaacagatttggctgcatcagaaggtcaagtatgtgtcatcaccatcaatgtggggaaaagggctgggtagcaccttatggggatacggctgaaaaaattcacactttcaggggaggaaatgaacaagttcamctccaagggttttttgtagggtttctttttcccccaraacttgagatttgtgtatgctaatggcattgacttagtaaactgctttgtggagaaaatgttggcatcttgaaagagaaggaaaacataaacagaaaatctagggagcttcatgagagaatagggtggcagtgggggaggaagtggagggtgtggacctagggcaccacacctgggagagtgtagtggaactggttttgttttctgaactgttcaaccaaaagctttttayatttccccatggttttccaggcaactgattgaggagggtatatgcaagatgataaatgggcttttcacttctttccactggggcagcagtgattctatggcgatgtagctaatatgacgtgagagagtcggttgctttctagcctctgccaggctcactatttctgtaatagtgacactccatgaaatagttatttctgtgacatcactgacacttttaaacaacagatagaggaaagatgtgaaggttccatgtctctacatgtggctgaactctcaaatgtggttagagaatcatgttttctccagtgcatttgagctgaacagtaagcaggattgcttggtgagtcgtcattagatagtgactcaacaccagcaccatctcctttaagatactggttttgtctctaacttagatgccacgactttgatgtaattttatgattctcctttctaaaagtgaatcagcaatatgataaaaatttattcaaaaatgtgttaataccaaaacaacaggattactgttttagtacagaggaatgtaagggactttggttatacttccagatagcaagagtgacacacgatagaaattggtatcaccaaagattaaggaatcatctttggaatttaaaaaatggaaactaaagtgatgtttttttaaactcaaagttgggaaaacttttataaacacgatgtaaaccagattttgaagtaaaatatttataaatttggctacataaaaacaacaaacaagttaaaaaagacattaaactggaaaaatatctgtaaaacttgactgacaaagcaataatttcccataaagccaatgaatttttacaaataaaaattttaatttaatgaaaaagagcagaagttataaacaaaaagtttacagaagaaatacaaaaacggcaaataaacatgtgaaaagttgttcagtcttatttataataatgtgaaaattaaaacaagacatcattttttaaaaatcaaataagatactgatttcatccaaaagatatttaagagtttattatacccaggactggtaagactggagaagaccctgttcttctccaatgaacactattcaatgaacagtatgaacactgttagtgggagcaaaattagtgctttttttttttttttttttttttttgagacaggttctctctctgtcgcccaggctggaatgcagtggtacagtcttggctcactgcaacctccgcctcctgggttcaagtgatcctctcacttcagcctcccgagtagctgggaccacaggcgtgcgccaccacgcccagctaatttttatatttttggtagagatgaggtttttaccatgttggctgggctggtctcagactcctgacctcaagagatcctccccgctcagcctcccaaagtgctgggatcacaggaacgaaccacgacactcggcctagtgcatgctttttgaaaataaatttgacagtatttattaaatctgaagctacctaaatccttttacccagaagtaactccatttgtagtaatttacttcatggaaatggatatatatgaaaataactgagagatgacttcaaatagcacaaagctagaaacaaaaaacattcctccataaagggccagttaaataaatcctgatcaagccagaaggtaaaataatatgcagctattaaaaggaattattttgaacctctttttgatgatttgcaatatgtccaagatcatgtagtattaagtgaagaaaacaagttgtagattattttgtgcatgacacaaaagaaaaaccgttaacaatggggaatggaatccaaagattgtagctttatttttcctttatccctagagagtaatacatgagcatttcatcttaaacacgcacaaatgacaatgctattactgaggaattcttctccaggggtaaagacttcatatccctagtgcctggcttaatgccgggcacctctccttttcattcattgtcaagatcctaaaaataattgtcaaacctgtttttcctcacttattttcttttaatttattatttatttaactaaaacgaagcttttttggacccttaactgcagcaaaactgctcagataaaggaactcagcaatctcccaattgtcaaattaaatgttcttttttggtcttgatctcacatttcctatttgtggcatttgctactgatgaccacttgcctcattttaacctgctgccttcccgattccctgtctcctgcaggagcccttctgcctcttgctttaaatgttggcatcccctcaggtctgaggcggcaactgtcctgctctcatgctataattttccaaatctagatctctcaatagagcactcttcctgaactccagaacctcatatctaactgtgtgctggtcgtctcctgctgggtctcacagccacctgacgttcatcaagtttaaagctgatattagcacagttaattccaattacttgttgcaaattaactgttttgatactgagcttgcttacctccatagcagagctcagaaactagatgaggaaatagttggctctatgacctatttaaatccttacaacatgtgcttctgtgcttatgttctcttctgaccctaaaaatggcttacctgagtttatctaatttattctgacatttacacatgactttccagtttgcaatgtgctttgacaaatatcttttgattgtctagctatggtctccatttaacctcctgcattttttattttttttactagaaactcatccagttaatacattctctagttcttatatatagaattggatagagccagacttcaaacctgtcttctgagtctacattccatgttctttccaccacaccatgctttctaactagtgtagatactgcaggcactatttaagtttctctggtggtgattttaccatcatgctctgggaaacaactttgcacacatacccatttattttttttctcaaataaataaactcttacaggactttaaagttgtcttctcattttataattgcagaaaatggggttcagaatattgaatcgccttgcccaagattgcccaggtagaaaatgaccaagctagaacaaaaacccaggttagagttcctggtttaattttctttccttgcatttgtgatttataaaagaatgcttcccaggctcatgctgtctacttctattgagctatagaatcattccaagttacattactatgttggaaaaataaataatccctttggccatgttgtgattataaatgtagcagaactgcagttttataaacatacaagttggatttttgatggcgagagctgttgttgaaaaggcaaaagttacctaataatcctttctagcagttaccagcattgaacatttcagttttgccagagaaacataaaaactcataaaattcctaacatgaatcagactttagctctcaatgtttagtgaaactattgaaaatgggaagcaattaacaagaagtaattctttctggaaaataagatgtgcgtattgatcgctgtcaggtcaacaagaccttttacattagtagacattgcttcctgggtaccttgaagtgtatccttgggtggagcggagtgggagagagagagtttcgccctaactgaacgccaagtgcaaggcaatgcaatgcaatgagatgcaatgcaaacatatttacctcctagctattggggaaaaattaaggggtgagaaatgtgaagatagacgtactgaatatactctggaaaaaaagtggggcataaactgaacatgcccggtggcagcagaggggaggtaggaaacctgaagatgctccactataattttagtaagtctaatggtaacctggtatataacacatcacgaaaacagatcaggaaaatacccagtgctttttttttttttttttttttttggacagagtctccctcagtcgctgaaggcagaagtatagtgccgcaatctctgcaacccccggctcactgcaacctctgcttcccaggttcaagcgattctcgtgcctcagcctcctgagtagctaggactacaggcatgcaccaccacgcctggctaatttttgtatttttagtagagacggggtttcaccgtgttggccaggctggtctcgaactcctgacctcaagtgatctgcccgcctcggcctcccaaagtgctaggattacaggcatgagccactgtgtccggacccagtgaatttttaaaatgcttttttacattcaaggtgtttgatgtggaaaggaagatttcatttctcaggtctataacatcctgcagaaaatccatctgggagatgactgtagtctcccaggcagttgtatctaactgcgcctctgtttcacagtgctatgtgttcactctttcttatctttgtccctttcttagcttacaggctgagagcacagatttgaagttcagccatggctttgtcacttactagctgctgtgtggccttggaccacatttactgagcttccatttactttttcataaaatgctagtgataatattgtagaactgctatcaagattaagtgaaataacatagatgaagcactttacttagcacagtgcctggcttgtgataacatgcaatcacttgtagctattacaacttatcaccttaatacctagcacatttcaggcagttcctgtttatagcatgactcaagaattctaccttgaccactggatttttccaccactgccatattagcttgttaaagtagtactatggctctgggacctccttgggcaraaatcatccgtagctccctcttaccaatccaataaatccaaaatgtaaagtcattcactagcctcaacctaactttcagttttatctcccagttaaactcaccaggaatctatacgctttgtttgtgatgcattctgcatttttagtgaactaaaggactgctacccttgcacttgaaaattttgaaatgtcagtagatggtatcaagttcccttgcctgctaagggttacaaatttgcccataggtaccttcaaacaaaggtaaggattcgaagtgtgtgaatttcaagtgtttctcaagtgcctacaaaggagattaaaattacccaaaatgcctatgaaactaagcgccagaaaaaggtcaaagccatttgaccaatctttcttgttgatcaacttacctatatccaggcgtcttcttgacatggtattaatgttattttgacaaaattctcattggactgtgcatgtcacaaagcatccaaattcttttttctgtcacttttccgatagactgtgtgtatctcttgagaagcctgtgtagatccgtgctggtaggctgccctgtgtacaggttcctaagctacgcatctctagtgcttgcaacatctttcatgagctttgtctttcttccaacttcagcttcacaatatttcttccatctgcccccttctttccagtctctgcctccagccaccctagttcaagacctcatcactaagatctatggtctatcgtcacattcaacttcttggttgccctccttccactttctcttcctgcccacgatccccaggaagggtagtctttgctcagaatgccagtccctggaacaacccataacacaggtagaaaccattctttcagagaaaacttagggggaaaatctccagaaacatatttaatggcttttccagggacctctagttcctgaatccaaagttctgtgattcacttccctgaatggcatttttttccccctttgatgtctgtgtttggttcattgtttgttggtttctatctcttctcacctaacttttatatgttaaaaacagcctggaaaacgtctagcacagtatttttatttcacagaagaaactgagactcaaaggttaaatgacttatttggcatatactcattcaaaattagaattattctgtgtgctggcttctaccgtgttcagtttacgtacttgaaatcttagtctggatggcttcattttcatagcaacagacacgatattggaataacaacagcaaagcatatttggtccactagcccagtaataacaggtatggtgtatttcacagctcagcttgaatagagagatgattgcaagaaccaaagaaatgcaaatatgcaagcaatcttgattcttcagaatgttatcctagcacttccttctatataagatcctctagttcattgtcagatttaaggaaacttgtaaaactgattcctttctttttagtacaactgctgatgattatgaaggagggagagccaaggagtggggtacagcggctccttgaacctggtttccttttctttatctcctttctacagtcttcaccaccaccactaccctttcatatccacaatatataaagaaaaacgtgcttattttagttttttttctgaaatttttccttttcccctaggtactgactctcccatatacacaattttcacaatataagcaaatttaaaatgatcattatcgctctagcagagtatttactacatagccttacatatctataatgctgcattaaaaaatcacccaacgtatgcctcacaattgtcagagccagtcttctcttacttatactgaaatttacttgatagcaaatgatggttgaatagagcagctctttggtgtttactcagtacatgcctagtgacttcacaaaccctcacatttataaattctagtgtagatcattactctataaaatgatgtcaaatattatataacatatacagtaatattgtagctgactcctccagaaatgagaacacataggtaacaacaaactgactgagaaatggatattggcctccttggactttagccatcactcttagactcacgtccagtgctttccctttgtaacccatgggtgcgagagctggaatgctgctgactgccgtctgcagggtcctcagcccctaatgcaaatccctgccttctataacaaacaccgcatttgctttctgggaaatttagtaaagatgcttctcaacttatgacgggtttatttcccaataaacctattgtaaattgaaaatatcattaagtcaaaaatgcatttagtacagctaacttaccaaacaccgtagcttagccttcacctaacctacttaaatgtgctcagaccatttacattagcccacagctgagcaaaatgatctaacacaaagcctattttgtaatgaagtgctgactagctcatgtaatctgctgagtattgtaccaaaagtgaaaaacagaataattgtatgggtactcaaggtacagtttttattaaatgtgtattgcttttgcaccatcgtaaagtcaaaaaaatcctacaccaaaccatcataaatcaggaactgtctgtatagtgtatgtgcaacatggaacatcctgatgcattctctatgctgtttcttcctaccctttccaccctctcctccatgcacatccctgctacaacgatcagctcattccccacacccttctacaaacatcagctcctagattaggtaggaggcggtgaagcctaatggttgcaagcacagactctgaggtctgtgtctcattggtgaagatattacattgtgcatgttcttagaagctaaagggaagagttccagggtagcagttcagtaaatgctgttgtttataatgatactgatgatcatgatattatagcatgtgagtgmatgttcaagctccataccaactgagcaatgggtcaggattttcttccctcaaagtcatataggttatgactatgagagctttaggtagatctgagaggagtggaaccgagttgtgactgttgtacagtttttcatagtccccatttgaaagctgttcttatctgaggccagcagacctttccctgtggaaagtgttatctaccaagcattggtgcagattgggattgcacgtgctgtcctgcccactcttgacagatggcagggagcccaagccgtccatatgctgctctgttctccgagaagacacgggcacaaaaacagatttggctggtgcaactgtgaccgtgggtgtctctgaagcagcgtccctgtccttgggctattcagcaccagacaaggttccagcagttgaatatagtctgtggtggacagcagagagcaaatccagccctcagatgttgagagrgaagccttatggatgtccttggggatattaatttgtttacttgagcaagggtgacyataattcagtgtcaatctgcttctacactgtccttttctgctgatgggcatcttgctatagtagagtagggaattttctctgttttcattgacttttactttatagaaattccacaaaaaattaaaaatagaactaccatctatctaaggtctaagacttgtcaggacttactattctttcctaaaagcagtaagatgtcttcagatgaccacagaggaagactacaggaaaagaaaaaaaaaataaataaggtttcaaaataagttttcagagagatgacattctcccaaaaaggaaaacttgaaattttgcatccaaatgtaactgatatttcagaaatagcttgttctatgccagtatgctgttttccttgttttaacttttcttcttccttgtgatcattatttttaagatgcaaagatttaattsatcttaaaaccctccaagtgcacaaaagaattcccaggaacagatcaatcatatcttatgtttggaattaggttctaaatgccctttttaagttgcaattagcagcttccatctttgttcctttttaatctcctcaattaccttgctaagtcataactgggcccctccttccrtgagctgcactgcagtgaactgccactttaccaagtcayccactattttaagtctgcatgaggttcacttcacagggactttgactaaagctcagctagtgtgcttttggcattctcttatttttatacataattgtcacagctgagcttattaaactcrgcttatgataaaactaktaaaattcttattaaaagaagccatagtttccagagcaaggaaacaaatcacccagtttaaaaatgggcaaaggacctgaatagacatgcctcaaaagaagacatacaaatggcaaacaggcatataaaaaatgatcaacatcactagtcatcagggaaatgcaaactaaaaccacaatgagataccacctcacacctgttacaatggctattaacagctgaatgtggtggctcatgtttataatcccagcagtttaggaggctgagacaggcagatggcttgagcccaggggcccaaaaccagcctgggcaacatggcgaaaccctgtctctacaaaaayacaaaaattagccaggtgtcatggcatgcacctgtagttccagctccttggaaggcaggaggatcgcttgagtccaggaggtggaggttgctgtgagccaaaactgcaccattgcactccagcctgggtgacagagaccctgtctcaaaaaataataataacatggctattatcaaaagaatgaaagatagcaaatactggcaagggtgtagagaaaagggaacccttgtacactattggtgggaacataaaatagtacagctgctatggaaaatcatataggagttcctcaaaaaattaaaaacaaaactaccatcgaatccagtaatccarcttccaaaggatatatccaacttccaagatatatattcaaaggaaatgaaatcagtagttgaagggagagctgcaccccgtgttcactgcaggrttattcacaagatggaatcaatctaagtgtccatcaacaatgaatggataaagaaaatgtggtttatgtattaaaaattgaacactattcagtcttaaaaaagaaagaaatcctggcacttgcaacaacatggatgcatctggaaaacattatgctaataaagaaagcccagcacagaaaggcaaatactgcacgacctcacttagatgtggactccaaaagactggagctcgtagaagcagagagtaaaatggtaattaccagagcctgggggaaagggaaggatggggagttcagaaagtatacaaagtttcagttagacaggataaataagttctgcaacctactgtacagcatgatgactatagttaacctatgctccactgtacttgaaatttgctaagagaatagatattaaatattccccccacccataaataaaataaaataaaattacctatggtggggaaaaagaaagccatagtgacaattggaagagcttttcattaaggcagcattggtgagtagctgtgaaagtaaaatgtaatcagtttccagttcaaattagtaacaggtttcccatttgtcatttagttcagtattattcttttggtttctgtttggaaaaatatatatcaaccttgtaatgtttcatgtaatgttccttgtaacatccatgcaatgtttctaagctagcaagacatgccgtagtagattagggagaagacatcattttcagccatagtatattcatacatagaaagataactaaagagtgaaacttagttttaaggagcaatattaatgagaacctaaaactatcagatattttgcttccgtcagctgagatttgatctattctgaaattttaagtccaaaagaatctatatttcaatccagccatagaaaagtaattgttctctctgatcttgtattagcatagaaagtagaaaaagtaaatatatgcttcttaaggaaaattcagaaattttttatattccatgtagagtgataaacagaggctatgtttaatagaaatatttaccattttacctgtagttccataacagcttcctgcaaataattcagaatatctctttctggctgagcatggtggttcacgtctgtaatcctataacacttttagaggccaaggtgggagcattgcttgatcccaggagttcaagaccacttgaacaaagtgagaccccctcaaaacaaaaaaatttaaaaattagccaggtgtgatggtgcatacctgcagtcccagctactcaggaggctgaggcaggaggatcactagaacccagaaggtcgaggctgcattgactccagcctgggtaacagagtgagaccctgtctcaaaaacaaaacaaaacaaaaaacaaagtatctcttcccactaaggaatcctaaggaagaagtaaagactatagaaccacaactggtacaaacctgagatcatctagttcagtggtttattttttttcttcagctgtggaaaacattttttcaaacaaaaacttacaccaaagggctgatctataaatagcttatggttctggatggagcaggaaacacagagttcccccagcttggcttcccaccacacccaaccctacacagtcaccaaaggactttttcaaatcacaatattagccccacctcagactcttttagaaccaaggaaacaaagacatggaaagaaaatttgacttggtcaaattcacctacccagccacagagctgaggcctcagcaagtcaggacgcttgtggacacaccagcctcccacagttccatatgtttccatcagaggcacgcccctatcacctccctggtttggcatttctccagagcacttgtgacctgccagatatttattttatgtatttrtatatttaaatatatgtttattcttctaacatgttcgttctgtttattttctgtttcttccactagactgtaagctccctgagggaagggctttgtatttggtttgttccctgagctatctccagtgcctagactagttcccatctcataataggctcataataagtaatagtacctgggagaataaacctcgcacactaggcctcatattaggtcagtctccccgactagattgtgagaccctaaaagaaaagagcgagtttccttcatttgcatttcccccacagaacttaacacagtaggtgctctgacaacagttattgatgtgaattgacattgtctcacctaaaacaacaaaacatatgaggtaaagcattagagttgttgggagcacaagaaatcttattttggtttattaaagtttagatatccataaagaacagattaatatgtaacaaactttatttccaaaatataaatgagtcaagaagaataaatcctttgttgtttcttggggcattaaataccatacatcagcagtttcaaaacttcagcacatatcagcctgaagcgcttactaaaacacaatttttgattcgacaggacttgaatctgagaatttgcattctaacaagctcccaagtgatgctgctgctgtgggcccagggacccactttgataaccaactgccattgagtgacttttcactgctgtatgctaatttgacattaagtaaatattcaacctctggcacatgctgagcctatagcagctaagtagatgtatcaattcacatctttggcagcccagctgcaataagagaggaaggagaagtgctatgattcagtaaaaggaatcaagtcttgttyatttcagttcctgctaaatagttcacaaaagagccatcaatcagctcattagaaaactgacttggattgcttttctgtaggattgaaaatttatgtaatgcccttgctgggtgattcaattagctagagcataccatgtcaccacacaccccacaatgagatatattctagtcactgaacaacttgaaaatgagcaaacaacttcctagttattccaaatgttctaatccatctactgacagagtctagggaatacatttctcctgataatcatataaaatgaaagttccaattatgaggggaaaagaagaaactttctttaaataaagatccaatcttgatttatttgcatgactaatacctctattcccttcccttaccctcagaaaaagggtttatttaattcatttgagataatttatgcaaaatcaattcattcaacaaattttattgattacagttgataagccaactactgtgcaaaaagtaatcaaatatgtataagatccagacttcatcctaaagaactgcacaaaaactgcaccctaaacatggctcgaagtaggtgcccagtcaacgcttttgtcctcagggagaacacaagtttacctgataggcatttaccatctaaaactttctaacaggaatttgctctgtttgtactcatctaaggctttctcaactcgcagctggagaaattaaactctagagtgtttaaatgtcttatcctccagcagttcgtgggccaaaaccaggattagaactatgactccttctaattcccagcaagcaatgatccttacaggttttatagaaatcttgtcccacctccacccagccttctctgttggtggctcattttttttagacactgttgatgtcatcagaaagattcctattctaattttctgcaatatttttatatatttagaaaatgaggtatcccttcccaaccctttatttttgtccaagaaaggaggtgagtcactccattgaagcttgctacaaatacagctccataatcaacttcccccggacaccgcaaaggcaggcactagcagatggcaatgattccgaatcgccaattttgcccttttgccaagcagccattttcagttttcattgttctggagttcactaagaagatggaaaaacttcacttcacctgaggtcacctacccaaatgtttctgttttgtcctagctaaatggctattgaatttgaatttggcctataggaagcagcaggctttaatggatgaaaattttggtctcagactacttgttcatttgtttccttaaatccagacatcactctccatgctttgtcttaaatcatcaaatttctctctcttaatttcctctcattctgcagtggataatagtagtaatacagaaattgccatcaaatgtattaccttctcactacttggaaaatggagatgtagggagacagctatcctcagtttagtaagataaaactccaaatcactgcttttgtgactctctttagcatttgaataataatgtgataatccacatgctcattggaaagaggatattttcattattccttaatattagccagggatactagatagccgacagcaggtattcattttcgtagtccaactattaacttgtaaaagtttttaatcatgaaaaaaatggcaaatgatgacttcctgttcctatgcttctcggaaggacactctcaggaacttctcattgaacccataagaaatgacactagatcaagaaagctgcagttttttctgtgtgattcctgaacttaaattgacttaaaaataggttgtggggagtgtattttttctcaaaaactcaaaattgcttaaacatattatctaggcaagagaaaattatgtaggtaataatctaatatggagttttccagaattctaggtaaatagaaaggtgaagttcattgaaagtgtcttttaagatgggcagtcaacaacaaccaaccagtggtgtgcaatacactggaaagacaccaaaaatagagcatgtatatgatccctgctgttcaaagaattttccgtctattgactgttgcactatttatttgaagaatcaagagaaagagaaagagagaaagagtttttattttaaccactatctcagtgaaataaaagtaattatcatcactaattaataaaaaaatcaaaagcaagaaaagaaccctaatcaataatatcaacaaattagtatccagtgttcttgggtgttagtactagacagtcggtcccttttggaacacagcttgagacttacaaattgcagttaatggttcacaatatgaccagtggcattaatgtgatacaaaagtgcaggttaactttattgtcaaagactgaaaccttaactttaatcactttgtttttgggatcttgagtcttgaataagggaacttaggtgcttaaaaacctgtaggccatgaccctaagcaatctttcttacctatggtagaaagtctcacttaggaaagatcttcagcaattggtttcaactgtttaggacagaaactacttttaccaccttttgcctcctatcactaaaggctgtcatggcaacaaacactcaggtaatttttggtataaaattatcactgttccttagattttccaatgtagagaaaagttcatttctaacttgtgattctaaatatcaccaccatatttttatagagtatgctttgtttctactgatttcagcaacccaggctaggattttcaaaacacaaactataccttgtgaccagaacagtagagaagaagatgaatgaggggtcctattactgtgctgtaagcattttacagactgaaatatgcaagcctttgcctcttcatatttattagtctagattttaggaacatgttacccctggcatgatacttcaaacacatttttgtaggtttattacttttcacgtagtttactaaaaatgtattataatcagtgcaaaattggatgttacctgctaatcttatcatgtttaaggatgttttcttatggagaaaaagtatatttgtgagttagcctaaatggtttatttcactcttcttaagagtggcagataaacttataagcaagcataaatagtgtatctattaaaaacacacatggcctcctatgacagtggccaccaacctgaactgcacatcagaatcatcaagagaacattctgaaaatacaaatgaccaggccaaaccccaggcttttaggaatgggggccagaaatcagtaatttttcaagagtactgatgaggatcttgaatcacagctcgccaaatttaagagcaaaattctatagttatgcactatttttgagatatttaatctattaaactatgagtgcatacttttaatcctatatggcaactacctctaagtaatatatcatgagattatttatacctcttaaatatgccacattcataatcatgcatatatccctctcccccattacactgtctctttgtatattgtgtttttctcattttgcccatgagccaagtgaacagggaattctgtcctactctgttcagtacaatgcctagaacattggcactgaatgactgttaaaaataacagcaggaactgcacattgctttcctatgccaaaaattttttcagtgcaggtatagcaggttgaaaatttacagtcacagattatatgtgcaggggcataactttttattggtttctacaactaagttagacctagctcttaaggctccaattacagtcaacacatagaactcagaattgtgctgccatgaagcctgtctcttttagataaatatttgatgaaactgaatattcttccatcctgctgggaggctcactgagcatcctgaatgggttacgtcctcacagcctggcctcgctggcctctgatctgtggctcatccctcctggtcgttggcacctgctgagaggtagcctggccttcgagtcttctatatgatcaactgttgatgacacctgtggtctcttccacagcctttgatcttgaagtgggtgtacctgtgtcctccatgcccacccacatgcctcttcctgcatgtttacaactgctggggaatcttcacctcttccttcctcctctagccaagaagtgaggggctctctgaggtcactcatcctccacatcagctccagcctgaatcaagcctacactggaggtttctattacaggcttgctgtcttccccagcttggaatttaggcawgagatctgggatagtttccttacatattttatctgggtatttctattgccacaccaggtattgaccctaggagttggtaggatgagatatgaaccttctggtagcaccagtcattatttatacgttgttttataaactgaggttcaagaaataatttagtgttcatggccagcatttttaagtgaaacagaagaggatataggctaggaaagatcaaatagagtagaatatattactgtagtgctttggttttcctaatactgtatcaggaagtaaactgcagtcacccgatttgggggggtattggtcccaggacccccgccctgcccccactgacgctaacatccatggatgctcatgtccccaatataaaatcgtatagtattataatatttacatataattgcatatgcatatcctcccatatactttaaatcatctctagattacttttaatacttaatacaacataaattgttgctatactgaattgcattttatttgtattactattacggtattgttgtttttttaaaatacaaacgtatattcattcgctaatgttttcttgaagaaacaaggtggttgtcgtttttaaaggaatctattgattggagttccaagttctctttcttgcgtaaaccacactcatggtgtgttatctataaattccaatgtcagtttatttaaatgtagacatgcaaagtaatttgagtccagaatctttctaaattttcaccatttttccaattatttacattggtctcacccacagctactttggcagcaaccttaacagctcatgtctatccaacctttacacagcttaccattttatttttagaaaaatgactcttgttttctgcactcatatttcagcactttttgtaacatttaaattacgtaattataatttcaaattacactaacataaatagatttgaggaaacgtctagaaaagctctagaatagcttattggtgtgagagttcctgtacttcaggcagcctgactgtgttttcagggggaataaagagtgtcccttaagctggtgagtggattaggtggaattttgtgaaaggacttcaactatactgagagaaaaaaataacagactcaagataagataaagcaaaatgcaagctataataatttctgaaaagcattcccatagcatgacaacagcatttttctgatgggcaaaggacaaagcagaagtgaagacattctggtttctagaccctggttaattagtaaccttggataaatcagctaaacttccgagatgtagttcagttcttttctactataaagatggactaagtttacatcaatttcaaaagcctgttatccacacttacccaagattcttgggagtaaactacggattaggtgaaaggagagtgaatcacactccgtttcctaatctataaaaggagggacttgggattggtctgcaattcctcaggtatgttttgcagaacagtcatagcagtcatttcaagcaatggctagaggtactcttcaaaagggttcaaggaccagactgttttgcaaaatgctgtggtaaaaccattcaaaagctttctttgcaaaacttcgaacccttttgtagagtaaggcatgctgtacctctaagtgaggattatgataaccagcttcccccaaacacattgtgccaaacctcttctcacagaatatctctcaggactagagatccacataacacactttggggatcttctgacatggctatttttatggtccttttctagttcgaaattcactgcttagctggggcctatcgcattgtctcattaaaacttttaacaaacaattgattcgaaatttccagaggggcaatgggaataacttttaaaaggcaaaaccttgaactaaggaagaaagagggagagttaccatagccttctttagatgtttccttgttaccaagtaatgaatacccctcaagttggtaattataaacaaatttttgtacggaaatggtattgataagggtgacttcccaattctctttatactttttttggttcttccctttattcaggtacatttcttttcttttttttttttttttttttttttttttgagatggagtctcactctgttgcccaggctggagtgcagtggcgtgatctcggttcactgcaagctccaactcccgggttcacgccattctcctgcctcagcctcccgagtagctgggactacaggcatctgccaccatgccaagctaattttttgtatttttagtagagatggggtttcactgtgttagccaggaaggtctcaatctcctgacctcgtgatccgcccaactcagcctcccaaagtgctgggattacaggcatgagccaccatgcccggcctattcaggtacatttcaactatcctggtttatttttctaatgtcagggtaagaactagatagagaaaatggaatagatattaaaataataataataataataatgaataatagggccaaggtttctatttagaaaccctacaaagccatgcatattcagtagtccagaaaatgtatctactatgccaaatgagtggggtacatgcttttattacttttatattttatgtacaagatgtaagtgagcaagatccaaagtaagtcttgaaagacggagtgatcttaaggtttcttaaggagtgaaaagcattttcaaacattatcaattaacatttgtatcaattatattcctttataaaaataaaatatttaatcttaacagccttgctttaattatgagggctgtgtgtccctcaaacactgattcattaagtggttaaactataggaaatcaggagcattttctcctggtttgaatagattctttaatcatcactaaaaacccaccaaatggtaagtccaagaatgccgatgatcaatgctgttacagttcaactccatagacttaggctctgggacgggactaggtgaaacccacgggttacattttgtcttggcttaaccccaggcttaaggactcccataagaataaacccaacttctaaaattctatttccctgaagggttatgtcattctgaagccaagccagcattgccatagtgtttgcagacttccttagtgccacctaccacatcgccactattgaccacagagccatcaaaactcgtctagacctgatcttgcactgcttggcccttggtgggctgtggagcagtgctacatgccctatttggcccttgttctgggtaatctcctgaaaaaggagatcagtctaacatgctatcattcacagccattggttacttaggggatttatccccacttaatgtaaatgctcctgagagtgcatcttctcaattctgttgatggtgtaaaaggaacagaaggaaattctcactagactagggtcaggaaggaaaatttttccttaagcccagagttttaggcttgattaatgatgtttccttacgaaagtaacccatctctctaggagatcatgcaaaagagactcactcaggccagtattcagccccaggatagtgtctctttgttttttgcagaatagttctagaaacactaatgttactaacattgctgcctttgccatttcaatattgctatttttccaatgaggcatctggtrtgaaacaaaacaacaaattaaatgttagagtcagctattgtaggaggatcttctaaaatgtttttcatggtactatcacttccccctgaaaggaatggtcaacctaacaaactcacagacatcttagatttctccattcttcctataaaacatccaacaaatattagacccagtggagtgaaatacrtgctgtaaatatggctcttattgtttgtggttgtgtctarggttaagagaattttatagtgtgattcatctgaggtttaaaagatctgctgcaaaagaaccctaggaccattttccccatgcatatttgcagcatgaatactgtgctagtcatacgtaaatccatgggtgtccatacattatgcttgtaatgttatctcaattttcctgcttctaaaatggagggatttggacttaattacaaataatggtttttgaaaaatatttttaaaaatacgattgcatatcctttattaaaaggaggtaggtttctgtgatctaattgagtcaattaccacgttcatgttcccagtgagcttcactttctactgggtttgctgttcatttcttcagctcaggtagcatctgtaagcaggtcattgatttttccatatttccttccctcagtacatccccaaatatctccattcatttatttaattcagtcagtaacaagattagagatagaaagatgtatgagaactggttcttgccttccaagagcgtgcaattgaaaagagagtacagggcgctaaaggaatatcttaaacacagtgtacacatggtgaatgtttcctcacaggcaaagtgcttctgggtctcagaagagaggcagatcactctcagctggaattaagagagctgatcactctcagcgaaggtttcatggaggcaggatttgaatgagtcttaaaaggtctgtaggattctgagggcttcccactgagaggaaggctcaaggccaggaagactctccctagtgtccagtctagaaatcacaaatatatgcatagtttatatatgagaacttgggctgatacacatggaaagatagattggagccagcttctggaggactttgaatgtctgactaaaactaaaatgtcttttagttttagtctttaaagctaaactaaaagaaacatggcacatttatgagtaggtcatgctaatgcacggtgggggccgagcagaaagcagatacagtactatagctcagaatatgagacaagtacagtaatacaaatttgaggccaagccagatctattgtgaaacttatagaaattgaaagaagagagaagatggaagagagattcatttatccatcaaatgagcatttattgagcacctactgtatgccagtgttttctaaacactcatcctttatatagcatcatcatgattttggccaggtccatttctactgatgttgtattttaacttaatagttttccacaaatagacttagttttatttgaatacatttgttaaaagcaactcgatattacttccatttgccttgccatttgggataaaattaaccttaaaaaaagaacaaggaaaacaaagcaagttactcatttccaggtagatactgtgcccactgaagcctgcttaagagggaggaaaaacaaatgttaaggggtgttcaaaatacacaatcaattttttctgctctgcctgaactaaaaggattaaaagagaatggaaatggaaataactttctcactgtgaaattcaatgctggtattgaggttcygtgctctaggcagctactgtgctgggaagtgggaaggcagacatgcacttcactttattctctgagagcttggtggagcggaaagacaagcccacaaatgaatgttgcaaagtgtgagaagaaaaatctcagagtaccacggacaccttaggggtctgttggccaactgagaggttgaggcattcctattagacttctccttcagctcattttcacttgggaattatatcctaattctagggtttaatttaattgccactccatatgtatggattgcttccctctcattgctcagaactaatgtaataacccatttggttttctgaaaaacacaattaaggagggggagatttcttagactaagcagaaatgttaaagtaaagtgaaaataccccatgtaggtggtaaaatattgccacccatgaggatgtaggggactgtgggtcaggtgtcagatccttctccctcaccatatctatgtgctgacataggtgagcaatcacatgtctcacagccagcagcatggtggccaacatccctagggaaccagctccagggttccttcatgtggttcagcttttatagtattgggagattataaagcttgttattgacaagcagtggacggggtgtaaagcagaaagtgtattgtccttacgggtaaccgtggtcaccccacagtgggagaagagaggatgagaaggaaggaaatgagtgtaggagacaattgcagagccttactagatttggacagagctcagtgtgaaaagtgaatgagagatggtgggcagaggagcagttaaattttgaaggatgagtaggagctgtgtaggcagggaagggcattgcttaagtggaggacgtaagcaccatcctcaaagtcgtaaagaacagggagccagggtgggtaaggaaaacttcaagtcgtttggtggttgcagcccaggtttgagggagcagcagaagggagtagggatgagggtggagggcgttcacagcaagatcacgaggggctgtcaagctgcgcaagggtcctagtcgtcattttgaagggaatagagaccgttttgtgcagggaagggacatgatcagatttggaagttagaaagatcatcctggaggacggaaaataacgaggtcgagggggagatgggagaggcgaggtggcttggacagaatatcttttaaaccatttctaaatatctttctccttgtcctttttgttatcagtacccgaaaccaaataaggaatatccaaaggcgggattctgttacatcaaactcccacattgaagaaaatagctttctgaggccaaattctttttttcctctaaccaacccaatctaatctaacacaatcatgtgtgattcctcctgcatcccaagggcataatgttcctcttttacaagtcttggagtatccatttatttatgagatacaaaaatgagcccacaagctgataggctttcttccactccttttgttttattcattcagggtttactgagcgctcactctgtgcctggcattggggtagttgctgagcaaacaagtctgactgttaaagaattctcgttaggagggaagacagaataatgtgcaaataactactcagtagtgaagcaaatgtttaaaaggtgctaaagtgttatttccaaaggacctggtgcccagaaatacagacatctgtgctggaaagtggagagatagttgggggtcctgaggagggagctgatgagaaacaacaatgtcggtatcagggcagacagaattgtcatcagttacctcaaacttccagtaactcacaggagagacacgctgtgttgccaatatcagattccctttccacatcccctgttcaattattttataagctttggggtacagagtacatttcttcggtacagtcctccattacttatgggtccagtcttacagcttatctacctgccactggattccaatcctttttgcagagttcatatttgtacttataaacatttgtctccacaatttatttcttcaggattttttgtttgtttgtttttggttttgttttttgttttttgtttttgcatatatgccatgatgcagagccattcccagggtctaaacaaaaatcaaccttgataaaaagtttaagttacctaattctaacaggacacaggatgttgatcatgtttttaaaaaggtgaagtagcagccagctatacgccaaggatcttagcaggaaaacttgcaatttatagcgctgatttttcctaccaagcttccccagaggagaaaaacagagggagagggagaaaaagaacartacatttctaarctcacactggcggaaagtgggatagtaagagaagatggcttccttctggttaaagatgctatggtagaaggaaactagacagaaattcaaagcaatgggaaggacattttctgaaattggaccaaacctggatacagagtgtaaggagaataagaaagcaatagcagcccgaattttgaatctcattccctaagtaaacatccaaaaggtttcctcaaatatgaagttaatgattttcctgcaagcaacatccttttaacattcttgctgttgcccaaagccacttctctgacttacacaggtaccactcattctggccacaggcactcttgccagcgccagttgatcatactcagatctggtctgctggaatataggctgcttgtttatttgtctgggagatgaaacttataaccatacttcagtggagttttttcctgacacagatttgggtaaaggaagcaaaccccttcagcagtcagaggaaaagctgccatgggcggaggttgctagacaaacacctgtcaatgcagactgcccataggatgccacccagtgaagtgttcattgtgggctcatttccccctccttatttctttcacttgacttgcaggtctttgctcataagtgtagtgtaggatgcctccctgaatgaagtgaattgcctcccaccctgtgccaacataagcagatggtgagaagtggccatacggaaattgaaagctgcaggttaagctgagaggtgtgagcattttgtatggagaagttcatcatttcctccaaattgctagaatcctttactttactttactttactttaaatggcctatctaaagtgtagatgatgtatgtagtcagcctatgtacatgtctctggaatatatatggcttccatggtttcaattattgtcttattggagaataataataataatakatgaataactttatttctagttcatgttggaaagcgtgatttttctctggtgtcttcttattatgcttatgttaaggtatattcaagttaaaggacattgcctaactgcacatcagtgatagcaaagcaacagatttgctgcaccacacaaggtcagcttgccacccccatccccagctgtgctgtatgcaatttatgcagccatatgctgcaaccttggtaacatcccatcactgtgttgagtgacaaaaggtaacatttgtcattgacagtgtagtggtgcctaaactgtgagctctggagtctgacttcctggattaactacaagtaaattatttaactttcccatacctyattttcctcctctgggaaatgaagataataagagtacctgcttcatagggctgctgtgataattaagtgggataatacatataagatgcctaggacagggtttaccacagagacatatccatttttctaatattttctggaacatattgctggtcaagcatctcaaatacaaaaatccaaaatcaaaaatgctgtagaatccaaagctttttgagcaccaacatgaaactcaaagaaaattctcattggagcattttggattttggcatttcagatttgggatgctcaaccagtaaataaagtaaattgcraatgttccaaaacatgaaaaaaatcagaaattcggccgggcgcagtggctcacgcctgtaatcccagcactttgggaggccaaggcgggcggatcacgaggtcaggagatcgagaccatcctggctaacamggtgaaaccccgtctctactaaaaatacaaaaaattagccgggcgcggtggcgggcgcctgtagtcccagctactcgggaggctgaggcaggagaatggcgtgaacccgggaagcggagcttgcagtgagccgagattgcgccactgcagtccgcagtccggcctgggcgacagagcgagactccgtctcaaaaaaaaaaaaaaaaaaaaaaaaaaatcagaaattcgaaacacttctgggtcccaggcattttggataaggggtactcaacctgtaatgagtgcaaattttactatacttcctctttgataaataagccaatgtttttgtaaaactttcagtgcctccaagtcagcaaagagtttataaaagattgcttacagaaggcagttaatatgtcatcacctaagacatgataccatcatcaacattttatacacaatatatttgtttattgtctgtctcccaacacaagaatataattgtcatgaagccatggacttttggaattgtgttcattactggacccctgttcctagaactgtacctgtcatttagtagatgttgaataaatatttgttgggaaaaaaaatacatgaatgttagctcttttactagcttttgtggataactgagaagttattttctgcattggctcccttctatatcaaggttaaaattattcacattgtatctacaggtacttggtagtggagagaaaagctgtgagtagctacggcctgagnnnnnnnnnnnnnnnnnnnnaaaagcttgtgagtagctacggcccttgagcttagcagcattcctcggccaacatttttggctttgtaggggcagaaatgtgtgatatctttcctcacctatcataacggtcactcctataacaaaagacaggttaacaagagaaaagcataatgaaggtaatcaaagttttatgtaacatgggactcctcagaaatgaagatccaaagacccagggaaaactttttttattcttcggtttgatgaagaatggacagcggtgtagaaatgtgatggactaaagggtgtgatctaatgctgatagactgagcagggaacccagcaaggcctgaatgttcaaattcttcttaacctctttgtgtaaccctcctgaatatggggcagggcccctctggaatgagggtcttcaagggagaagggggaaggcagagagtgacctttctaggtttcacggcttcccttggaggagaggggttctagtttctgtgacacaccttgggaaagaggaattatggttgccatgactcacttcawgggagaaagacaggtaggagacaggaggctgggagaaggtcaaagagacatagcttctgagacatttccgatgtccttcagtccacagtactcagcacaccaaggtgccatactttggggtaccatgttctgagtcttgacagcttgtacaaagctgctgagttatgaacatgatctcagggccactgatccatacctgatggtatgcattcccagaggrcagcttkctggttagcttcttaaacatcaaatgtttaagctggatgagtcttcttgtattaaaaygagacaatatgatgaaatatggtagtattatcctttttgtatattcatcttttcttttagcagctaaatctttcttcaaaagaatgtctaaaagacggtggagatgcattgattgacggtggtctctgctgtgatgttcctggcagcctagcgtctcttggtgcttagcaggaaagytattgaggagcaggaatagcatgtgctttaagtcttacagacctcagttgaagtcctagcttagctgcctactagttgtgccctgtgggcaagttatttaacttycatgaacctcagtttcttcatctgtgaaaagggaagaaaccatgtcacacttgcaagcatgagaaggagcatatatcaagttttcagcacatacatgtaataagcccattaataaagcaaagcttgtattttttctagattcaaaaatactagttagataattctgtagcttaccgagtggcgttgttgctcactacagaaagagaaaaaatcttccctcctggcaagagtggattagcagcctggttctacccaaaatgtccttgtcttcagtgacataccgagaatttggcrtggacttttcaacaacagtttcttcaatcrttgccattgtagttcaggagcctctaactgtggaggaggttgaagaaggacaaatgagccccaggacagatgcggcctgtgtgctgcggatgaaacagcaaagcaggctttagcagtcttcattaactgctggtccaatacttccccatcagcacagtggctctgctctgtacggtgctggcaccaacaatgcgttattcccagtacaaaaatagtcattttacttataaattgtcacacttttcccatgaaaatatcttgtttaccgagcaggaaaattcccattcatgtatttatttggctaacatttatcgaatgcatctatgcrttgggacatccagctgattctgatgcaaactcgagtttgagaaccattgtcacagtcaatggatgatatcaagtgagggaaaaagcatattgacatattttacataatacagaggtatctggatgtagatttgctacctctactacaatttgtttccacgagagattaaagtggtttatgagatgatgatgatgatgatgatgatgkgtgtgtgtgtgtgtgtgtgtgtgtgtgtgtgtgtgtgtgtaataaacatccaagggaaatacaatgatagtaggataaaaatggaaaagtactaaaaccatcatgattttgccatagcttttcctgataaccttcctggtattcaagctggtggagcacgcactgctcgaagtggaaacatactcatcttacaagagtaatagcacctgcacgattaaaggcagctgttaagcacacagttttgttaatactgacacctgagaggaatttaccacatggcactgcactctttgctgagacaggcaacatctcgacagtaaaaaccatagcaagtataaatgcctatttcgtatagttcccttacataagctagtggcttaacatctaagagcagttgaaagggacaaacaaggaggtcaactctgtagctctcagacaatctggccaacatctgaatagtatcatcaaagatcatatcagaggtagaaatggaaggccttgaaaaagtaagaggagtactcacttcagcaacacatatgctaaactgggaatgacacagagaagattagcatggcccctgcacaaggatgacatgcaaattcatgaagcattccatatttttaatccgaaaattcatacagaatcaaaaaagagcctaaactgccaaagcaatactaagcaaaaagaacaaagctacaggcatcatattacccgacttcaaattatactacaaggctatagtaaccaaaatagcaagatactagcataaaaatagatcaatggaacaaaaaacaaaacccagaaacaactgatctttgacaaagtaaacaaaaacatacactggggaaaggataccctattccataaatggtgctaagaaaattggatagtcatgtgcagaatgaaaactagacccctatttctcactgtatacaaaaattaactcaagatggcttaaaggcttacatgttagacctgagagaataaaaattctagaagaaaatctaagaaaaacttctggatgttggcctaggcaaagaattcatgactaagacctcaaagacataaatgcaacaaaaacaaaaaataaacaaatgggatttcaattaaattaaaaagcttctgtacagcaaaagaaatactcagaccacttacagaatgggaggaaatatttgcaaattatgcaactgacaaaggactaataaccagaatatacaaggaactcaagcaactcaacaatttcagaaaccaaataaccccattaaagagtgagcaaaggacatgaacagatatttttcaaaagaagacatataagtagccaataaacatatgaaagaatgctcaacatcactaatcatcagaaaaatgcaaattaaaaccacaaggagataccatcttacaccagtcaaaatggctatcattaaaaaatmaaaaaataacagacgttggcaaggatatggagaaatgagaaaatgtctatacacttttggtgggaatgtaaattagtataacctctatgaaaaacatatggagagttctcaaagtactaaaagtagaactaccatttgatccagcaatcccactactgggtgtctacctaaagaaaaagatacctgcactcatgtttattgcagcactattcagaattgcaaagtcatggagtcaacctgtgttcaccaatagatgattgaattgttcttattattattattattattattattattattattattattttgagattgagttttgctcttgtcgcccaggctggagtgcagtggtgcaatctcggctcactgcaacctccacctcccaggttcaagcgattctcctacctcagcctcctgagtagctggaattacaagcacccatcaccaggcccagctaatttttgtattttyttagtagaaaggggatttcaccatgttggccaggctggtctcgaactcctgacctcaggtgatccacccgcctcagcctcccaaagcgctggaattacaggcatgagccaccacacccggccaatgattgcatttttaaatgtggtatatatacaccatggcatactgcttagccataaaaatgagtgaagccatgtcttttgcagcaacatagatggatctggaggccattatcttaagtgaaataactcagaaaaagaaagttaaataccacatgttctcccttaggagataaataatgtgtacacgtggacataaagaatggaataatagacattggagactcagaagcatgggagggtggtgagggatgagaaattacttaataggtacaatgtacactttttgggggatggctacactaaaagcccagcctttacttctacacaatgtaacaaaactgcacttgtatcccctaaacctataaaaaattatatatataaatatatatatttatatatatttataattctttatatatataaaaagccagaggagaaagtggttagatttgaacaaaatatggaacaggaattgcacactgtcctaaaaaccttgtctttgaagaatgtgctgctctgagccagctacacctcctaaattgagatgttttcacactccttaactcttgcatcttccagacttcttttttccaaaggctttcacttggtgcattatatatgcgacatgtaccatacaatctagcacttgattagattctgacttgtattgtttgctgattgttcacgtttatgtgatttattttctcaactagatcgtaaattagatgaagcctatcatctccatgattcctttagtcagggaatattttaagaaggaggctatatttgtacctactcttcaagaagggataagaatttgtatagagaatggaagtgagtattttagagagcatgaaacacagagycaatggggaatgtggcrtgtggggaagaatacaaggagcccagtgtcactggagctgagctgtgtggggtatggggtggggagacagggctgtctggcagatggacgccgggtcagggagcctcccaccttgagtcacattcaaaggcttagattatattgaaaaagtgtagagggtctgagaagaatttaaagtgaaagaatggcataatcaggtaacaaagatcatattacaaataatactcttagcagtatgaaagactgtgtgtgtgtgtgtgtgtgtgtgtgtgtgtgtgtgtgtgtgtgtgtgttttagaggtgataagaacagtcattatggcctagtgattaagaacatgctgtgttcaaaatttagtaacaatggctggatacggtggctcatgcaggtgatcccagcaccttgggaggttgaaataggagaactgcttgaggccaggagctcgagaccagcctgggcagcatagtgagaccccccatctctacaaaaaaatgaaaaaaattgtccaggcatggtggcacattcctgtagtcctagctgtgcaggaggattccttaagcccacgagttccaggttacagtgagctataatcctgggcatcagagtgagatcttctctctaaaaaaaaatttaaaaattactaaatatattatctcagacaagttatttcctctttaaaagtctgttttcttatccagagactagtccgtaccatattgggttgtttgagattaaaatgagatcatgcatttaaagtggacaacacgtgcctggtatatagttatgattcctagaggcagagaccattccatttttattcacttgatatttattggttactactttgttttcccaaccaagtctagatgagaaataaggagtagacttgagggcttagggcagctggaacagaaccaggagacccatgatactattcctaatcagctttgggagtagagccaagagtggacaccgggaatttgccatggcaccagtcccatccccagcgacactcagcagcctctgtgtggaaagacagaaggacagtagcatcagtccttgatgtatattgtccacagtgagtgaggtagaaggatcatagagcaagggacctgagggggctaacaaaaaaagtttgacctgctgtctctcctaggctggcaagggaggaagtgaagaccactagggatggatggaatgggagaagagggcagagctgaggaaacagtgtatggaataaactgtcatgagaaccatcagagggcaggaaaagtgggagcaagagaacaagaaaacttatgagacaggaagttgaaggtgtaatgttaagaatcttcaattcttgctacagtgcccagtgcactgcatgtaataatagctattcaataaatagttgttgaattaaagtcatatgtattgatttgatttgacttcatgctcagtacagtcaaagactatttggctgataacttacaggccaacactcttatctgccaaaacttaatccagaaataagctggcgcagtggtgcacatctgtaattccagcactttgggaggctgagatgagaggattgcttgcgcccaggagttcaagtctgcagtgagccatgattatgccaatgcactccaccttgggtgatacagcaagaccctgtccctaaaaaaataaaatgtaatacaaacaaaaatactttaatccagaaacaatgaatgccatcatacttccttctctatcacagcaaaaaatatttcagaaagttgactggatgtggatttgtttgtttaaaatttaagactgggggtagaattctaaaagacaataaaaaccagttccaaaatgaaaaaagttaaaagggtcagattgctagatgtgtgaagagtcagaataaggcactttaaaaatgatgggaagacagaagcagaaggaaggggcagtgtttgaggaattacaaatctaattcccattaacagcaactattgcagaggtcagggcaggccaaactcactgaaggaaaaatactctgtaaggtttcaaaaacagccgattgcagagattgtccttctcacttcttacatggtatctgaccacccctctctcatgcaggcactgatgatagttttcaaaaagtgaatgtataatctgaattagcatgcataatgtatccaagccaataaatacttaaatgggtataaagctgtatgaggataacttagccaattctgttggggccacttcagagactgactcacattggccccacttggatgtagaccacagtggtggaggttctgtatgcttgcagttacccactgggcaggagggtcccctttacttggatgagtaagcttttgtgggcctgccttggttctgctgcagatgaccacagagtctcaccctctgggcagggagccaggcctgactagacctacaaggccattaggcagcttctgtctgtttctttcgctggggttccatggactctggactggctcctctcttccctccacacacactccctctgtagggcccatggctaacgctgccccacagttcaatagcatcaactctggcttccagtggggccgacatgggcccttcctttacttgaccttgaagcttaccagagtccagtgattctaggaacatccccacctagatttcccaaagtgagcatctcattagctcagtgaaggctctgcatggatgcccctgagtccagtcttccataagctcagaaaatgtggtgatcaccttcaacagtcctggccacagggtcaccaggagatgctgtgagtagggaagaaattcccaaaagcaggtgtcagctgaacagctaccacaaaagggcttaatgtctgcacttttggggtctcagcactaaggaaagtagatttgtacagcaaacttggtaagaagagcaacagcttttaaagaaagagactttataagagaaaatttgattcaggtaaatatatatatatatatgcatgtatgtatatataaaatctggctgtgaaacaagttgtatagaatatgccagaacatgttcacaagactactcagctagtcatgagcaatctagacaaaaataacttggtttcatcagaggctatttccactgctccttttcaagttgtattgtcatattgttttgattgtcattgtttttgtgtttttccatcttccatcacggctgtctttaggtaccattaaacaggtttattctgtcatcatttcttctttctcctagattcatcagtagtttgcaagtttttcccaactttttttggagtaaacgctgatgggtttttctcttctctgtgaatattctacccccatcaattgtacccscataagacaggctgtccccctgctgcagcacctcctgaagggcactgtccatggctggttaaggtaaccacattctcctagctggctcccaagggaattcatctgtccatttagccgagataaccaaccctctcctgaaaatccagataagaacaattccataggaagcatatctccgaggtcccatagagtcagcacaggcatatttgaactctgtcagtccaaaataagattaggagattttatcgtttactgcctggattatcttcacataaaaatcactcctaaatcctatgacattttgctcaaccaccaatatcaataatgacctattaatcatttttcaaagaacactaccttccacctttttattctcaaaaactgttatgaaaccactttttaaaagctttgtatggagatgcaggtgattgtaattgtgctgcctactgtgaccaaattggagaagatttcagttgagtcgttggtttttttttttttaacaataccatatcttttgaaaaggaaatgcctccgaaggcatttatttgtaggagcagactgattgacagaggtattcacagacgaaatcaaactgcagatgattaggacagcaattaatgttaatgaaaagccaaaatacattctgcatctataaaatggctcagcattgtactttgagtaatataattggtatatttcagaatgtgcttattcaaaggtgttctaatagtacttgtataattttaagcacacaacgcatgaaaatcttcaagtaaggaagcctggaaaagtgaaagaacatgacattgagttatcatcttcaggtacaatttcaaaaggtcagaaaatatccaaacagtgggcatttggacaatgttaactcacattctcacctctgttaagttttctgtttacttctttttttttttttttttttttttttttgagatggagtctcactctgttgtccaggctgcagtgcagtggcgcgatctcggctcactgcaagctccgcctcccgggttcacgccattctcctgcctcagcctcccaagtagctgggactacaggcgcccgccaccacgcctggctaattttttgtatttttagtagagacggggtttgaccatgttagccaggatggtctcgatcacctgacctcatgatccgcccacctcggcctcccaaagtgctgggatcacaggcatgagccactgcccccggccgttttctgtttacttttacgcaaaagtgccatggtttcattttttagtagtaagaaccattttcttattttaaaaagtaataatttaaaatcatcagcctgttgggcattcatcattctcaatctctgtagaattgggatttattataagtaaacgggaaaattaattttgttctgtctaaaaaaaaatgtcatgtatgtgttcagactgtggttggagcatgcatgtgtgagcaaggaggtctgaatcaggagacactgccgtagctggccaggacattgtcctcctctcttggtatactccttcttttcttccagtcttctctcataaactgctcttgcaagaaatcattgcttctttgagatctttttgsccctccccactcccacatgtattctctaactacagctagagaaatctttagcacaagtgtgaccatgccactgtcttgtttaaattcctctaatggattaccaccacctgcaaatacagtgctgcatcctgacatagcttcaccaagggtctcatgattttgccctgactacctgtctcacttaggaacaggtgcaggtgcaaggttcagtacacaaaattacagaaagcaaaataaccgcgagctattttgtctcctctctccacacagactccctctgcagagcccttggctaaagttgtcacgtggttcaatagcaagggactctggcttcctatggggccagcgcaggcccttcctttacttgataagataaggaaacaagataaaggtctatttttctctcgactaaacaaaatgcagaggtgcacatccagggcggatatggcactccgctgtaggtcagaacctttatcttttgtttctctaatcctcaaactgtaacttccacctcatgggaaagatcactattcacccagcccccacagctgcgttccagccagagaaggggtaaagaagcgtatgcccctcactttagagatgttttccagaaatcacacatgccgtttcaagttatgttccattggccagcatagtcacccaggcacatctagggagaatggaaaatgtagtcattgttcagggctgcttgtacttttcaacaagaaaatcttttctttctctttagtggtatgttataacctggcatggacaagcttcyggcaggtggagggatgccaaaaagttgacttgagagatagagagttagaaggatgatcatttagaggctgggaagggtagttgagaggtgttgctaaggtgggagagtgaggatgattaatgggtacaaaaaaaatagatgcaagtccgaatgaatgataagatctagtatttgatagcacaatagggtgactatagtcaataataatctaatcgcacttttaaaaataactataagagtataattgcattgtttgtaacaaaaaggataaatatttgacgtgatggatattccatttaccttgatgtgattattaaacattatatgcctgtatcaaaatatctcatgtaccccagaaatatatacatgactaggtacccacaaaaattcaaaaaagaaatttttaggacagcttgaccctgaaaagattcatggagatttcctcttcctgatgtctcctcaaacaagaacacagtgcccctgttctcctgggcagggtccaccactttctttctaaagtaagtcgcaattgcctgcctgtccatcctcatgggrtaagacagaggagggccttcagtatgctcttatttctgcatgtaaagaaaaatcaagaaaagcagctctaaataaagacatgcacaaaaatcaaaatggaataaggacttgccagctttgcaagactatttcccctttgtcagcatcttctaatatgtggtgtgtttgtgttttccttgggtctaataaattacctaccttgaaaatttcctttacagtgctggattattcttgttttggtcatcatctggacagtgataattctgctccaggtgttggaactctggaaaaactgtgcatctcacactctgagcttgtctcatggctgcaaacagagtcaacaaattatccaagcaaaaaaatcaggagacatggtacaatggtaaaattgaacttagaaggacaataaaacagaatgttgaagtcacagcgaacaagaagaaattagagctaatcactggtagtcacagaaaccctcatgaagacatgctgaccacagtccccatccttgctcaaagaacaaggcctgaaaggcaatttccctctctatttccagcarttgttatcattacttaaaatctaattgagaggctagcatcctcttttttcaagaatgcatagaagaatgagaattgttatttatctcttttcatgtttttttgtggctaggtcatgaagtgcatacattgaatccctagtggccaaaaggcttatgacatggctctcacaatatatcataagccctctgaccactagggattcactgtaggcatttggtcgtctttgcagcagcaggcaaggaagctttctaatgatgctcttggtcacaccacaggtggcagcaagtggtacccatggatacaacttataaacattaattaggagaggggggaaaaaagaagtgacagagataaatgtgctggaaagggagtttaagagtaaggcaagaggaaaaygaagaatgagagaaggaagagcaggacctccatagtaggtgccaccagcaattgtctacccattgccaatggccttaggattttagatcatttgcccttgctcaccaagaagtcacagaatgtgttttcttttataatcacaaattgacctattttcattttaaaatgacaagacgatagaagagagtgtaagatttgttacagaaagggccatggtattaagttgtttatttggccttgaccagaaagatagatttagcatttagaaatgtttattgccattttttatgaccttcttttcccacatcatagagaaaaaagatcaagatctcaatatctcttttacaaatacaagtaaggaaggaggaatgttagcttatttattctggatgcaatttgttaccctccaagaaaatagaggtgcttgtcctgtgctgaaaatagcccagttaaattttagtaaaaaacacactgtgtatgattaatttacagaaattatcattggttacatcatttaacttaaatcatcattagtggccttaaacagctcttcgtttgctctgcttgtcctcaggtaacgtcatcttgcatggaatgttgctcacatattaaagataattaaatactgaatacctgattaaaataatcttgtatattttggagtaaacatgtataattcatgttttcagctcttgccagtttcacattttatttagcagaaaatatctacccaagattcaaactgcttgagaaggaaagttcgaaacattattccacatcattttatatattgagattctactatatgtgatcataaaagttagtatgtgtctataatcctaatagaatcttgtttttgctttttataagtctgtatttgaaaggcaaaaatgtcctcagtggaacctgatttgtagagagagactttcttatgcaatggatttttgcatctaagttagtttgtgccacagttttgctaaaaacacatacttaaccctcttacattcttccttgccacagcctacttttaggaccataacttcatacaaagcaatcccaaggttttctgtttcattagtctgtcaccagtggacacgttttttacctatcrgttcttccttatccacaggtatcataagtcctgaattccttttttgtcccttcaagagtcagtttctctctctcttccaggcggattgccctctgtctaagcatcctgtagtcagcaggttaggcaaactccccagactttacttccagacaggtagaacggcagaaggtacgatattgcccagtgagttgcagagttagaagtcaaaggtatataggtcagaaggagtgttcaccagtctgcttcctgccttgctctgaagactggtctttggaatggtcaccctgatggaatggtccccccaactattgggcatctttccttggccttgcccagcctggcctttgccacacagtcatgttttcattaaacagatgctacttgaatcacactatgaaccactttgggaaattttgcattaatgcattaagtaattgagtaaatattctactaacttaattcccactatccactaggatagcactttgccaaatactaggtgggtgaaacatagtccctacccttaaggacgtcacaatttagtagactaacaaattttgagtgactgtactgattaaaacctttcatcattattcctgaatggtcaatccagaaactgggagacaggaggaagaaaggagcttcacaaagcatggatagagattgccaacattgtcatgagcgctcccagatgcagtatgtctcatggaatagacaagacctggcctctcaaaaatcttttttcatgaggtccagtgtgggtgttttatatgtttgtttgtttttgtttgtttgtttgtttgttttgagatggaatcttgctctgtcacccaggttggagtgcagtggcacgatctcggcttgccgcaacctccgcctcctggattcaagcaattctcctgcctcagcctcccaagtagctgatattacaggctcccgccaccatgcccagctaatttttgtatttttagtagagacgaggtttcaccatgttggctagactggtcttgaactcctgacttcaggtgattcgcctgcctcggccccccaaagtgctaggattacaggcgtgagccaccgcacccagcactatatgttttgtttcttaattaaaccacatatctatctctctaggaatatctgaaatgacattagtgatattttagagagtcatgttggctttccaagatgactctttatatggcaatttttgtattgtaggaagtcttgaaagaaaatcaggctgtcagaaggaacttggtcaggcactgactctaacactgttttggagtccagagaaaatactctgccctgatggaatagcagcctctgttagttactaaarctccggaagatccgagcttggaaatggactgagataccctacatgggatatgaatgagtgacttttccctgaggctgagctattaggtctggggtccttcactcatgtcctcaagaacttttcaagggccatcctttggtcattttgccatcggctattaactttttttttttttttttgagacagggtctcattctgtcacccaggctgaagtatagcggtgcattcacaactcattgcarcctcaacctcctgggctcaagcaatcctctccccacttgagtagctgggactacaggcatgcaccaccactcccagctaatttttttttttttaaagactgggtcccactatgtttcccagcttgtctcaaactcctgggttcaagcgattctccaaccttggcctcccaaagtgctgggattacaggcgtcagccaccacgcctggtcttgtgcgtaaatactcaaccagaaaccttaaactaggaagaagagatatatgatcctcaaattagcctagtcaagcttaacttgttctctgtttgtttagagaaagctcttgaccctcaattgacagaaatacctgggcagattttctctacatttatgatttatttgccatatctttactttttcccactctgagtaacctggggggattgtttgtgtggtgaagttgttcctacagaattcaaaaaggaaaacatgcaacagaagacagagatatcctaaagatacgaggtgccattggcttctattattcatcttagtgtttgtttgtttgttctgagacagacggagtcttgctctgttgcccaggctggagtgcagtggcacgatctcggctcactgcaagctccgcctcccgggtttatgccattctcctgcctcagcctcccgagtagctgggactacaggcgcctgccaccatgcctggctaattttttgtatttttagaagagacggggtttcaccgtgttagccaggatggtctcgatctcctgacctcgtgatccacctgcctcggcctcccaaagtgctgggattacaggagtgagccaccgcgcccggctcatcttgttttttaactcacattttcattcacacttatggagtgctattactgtgtgcttacatggctggatcgacactaggtcggggtacataatgagactaatagactgggaggcaaggaacataagccggaagagagatcctgaagcaagcaactctgtaggttctggggagtgagtttcagatgtggtggaaacacaagagaggaactaattctctctgctaggagagccagcagaggtttcctagaggaactgagcccctctccagttctatctttaacaaytaacatgtagagactagcctgaccaacatggtgaaacctcataaatacaaaaattagccagccatggtggcaggcacctgtaatcccagctactctgaaggctggggcaggggaatcacttgaacccgggagagagaggttgcagtgagccgagatcgtgccattgcactgcagcctgggcaacagagcaaaaactccatctcacaaaaaaaagaaaaagaaaagaaaaagaaaaaaaagaataagacccaagaagcaagagaacgatacatccagttattggggtcatagagggaaggagagttattgtttcaaataatttaaaaacaatttggtttttttttaaatatagttttcttttcctagttttctttttcyttttttttttttttttttttttctgagatggagtctggctctgtcccccaggctggagtgcagtggtgccatctctgctcactgcaagctccgcctcccaggttcaagcaattctcctgcctcagcctcccgaatagctgggattacaggmacccaccaccacgcccagctaatttttgtatttttagtagagacagggtttcaccatgttggccaggctggtctcaaactcctgacctcaggtgatccgccctccttggccccccaaagtgctgggattacaggcgtgagccaccgcgcccggcctcnnnnnnnnnnnnnnnnnnnnnnnnnnnnnnnnnnnnnnnnnnnnnnnnnnnnnnnnnnnnnnnnnnnnnnnnnnnnnnnnnnnnnnnnnnnnnnnnnnnnnnnnnnnnnnnnnnnnnnnnnnnnnnnnnnnnnnnnnnnnnnnnnnnnnnnnnnnnnnnnnnnnnnnnnatcaataccaggcctgcagggttgctcacgcctgtaatcccagccacttaagggaggccaaagtgggaggacagcttgagcccaggagttcgagaccaagcctgggcaatatagtgagacctcctctctacaaaaaattagccaagcgtggtggggcctgcctgtagtcctagctactcgggaggctggtgtggaaggatggcttgagcccaggatgtggaggctgcaggaagcagagatggcgcctgtgcactctagcctgggcaacagagcaagaccctgtaaagtgcaatacctaatttccaagagaaatgttaacgactttgcccttttcttcattcccccagatccctgcccaagacgggtctggagcctgacttccgggtgtccatgaccctggcggctgcttccggtccgccatgaaaggrctatcaggcagccgcagccatcaccacggggtcacctgcgactcggcctgtgactcgctgtcgcaccactccgaccgcaagccctacctgctgagcccagtggagcaccaccccgcagaccacccatactacacccagcggaactccttccaggctgagtgcgtgggccccttcagcgacccgctggccagcagcaccttcccccgcaggcactacacctcgcagcaagagctgaaggacgagtgtgccctggtgccccgcaccctggccaccaaggcgaaccgcatccccgccaacctgctggaccagttcgagcggcagctgccactcagccgcgatggctatcacaccctgcagtacaagcgcacggccgtggagcaccgcagcgacagccccggccgcatccgccacctggtgcactcggtccagaagctcttcaccaagtcgcactccctggaggggccgtccaagggcagcgtcaacgggggcaaggccagccctgacgaggcgcaggcggcgcgctatggcaaacgcagcaagagcaaggagcggcgcgcggagcccaaggcccggcccagcacctccccgggctggtggagctcggacgacaacctggatggtgacatgtgcatctaccacgccccctcgggcgtgatgaccatgggcaggtgccccgaccgctcggcctcacagtacttcctggaggcctacaacaccatcagcgagcaggcggtgaaggcctcccggagcaacaacgacgtcaagtgctccacctgcgccaacctgccggtcagcctggacaccccgctgctgaagaagagcgcctggtcctccacgctcaccgtgagccgggcccgggaggtttaccagaaggcctcrgtgaacatggaccaggccatggtgaagtccgagtcgtgtcagcaagaacgctcctgccagtacctgcaggtaccatttctgtcaatgatggaggcttagaagtagtacctggcatgcttgtgtgggcatttctcctggttctagtcttggcactactctgaattgtctattaagataggaacctgtgcaaattattcggcatctctgtgccgaattgctcctgtagggaaaatgaaaagaaacaaatgctaccgacctcaccgggttatcttaagacactagatatccaagtgctttgaaaagcacgcctatggaaaggcaaccagttattatgggcttcctcttttgtctgagggatcataggatgggaaagagaggaaagggaagtctacagagaattttaaaagaagtccacctttctttaattcaaaaatacgtgacgatcgtttgaattttggaaagagtttcattagatctattcagggttttgtggggtggttttcattgtgaaatcctgcctgaagctatgttagaatactgcgatggtcatcatcataaccatcagtaactacaccccgacctgagcttccacatcgagggcacagcaaatcaggaagacgccctgtgccctgaggaggtggggagctagccagtttggggacctgacaagcacagctgcagacacccaggacaacagagaggaggaggaaaaggaggaaggattagagaagtaaaatacaattagtgtcagcatgtaaatcccacacacttacagagccacggtaggctgctcttcccctgccactgtctccttgtgttttcctccagttcactgaaaccagatgttacctggataaaaatataggagagagatgtttttcttccctacctccttgctgtagtattgtaatttttcccaaggcacatttttccataagaactctcatcttttcctttttcagagtgtcttttcttctctgttctctcctggtagcctcatcttaaaaaaaaaaaaaaaattactgagctataaaagtataacatacccactcccattttacactcccaccttaagaagaaatgcaaagaaaaattcttcctttgaggagttcatcttttttgctccctttgaactcctcctgacaagtctggctcccttgggaatgcctccatcaatccctgagaagaccccaagctggcaatccctggacaagggcagtgccagagcctgttcttggagttcagaagaagccaccagcacatggacagttttcatacacgacacacaattatgtggtcagtacttcccactgaagctggtgttgcctaatttcctgtaaggttgctacatgttaataagttatcaagaactataacaatttcagagctcaaagaatcatttaatccacttagcatatgaaaaagtagacacaaagaaaggtaaatacttagtgggttaaaccgttagcatgtggcagaggtgggactagaacccagtctcttaacttagagaaatggccattaatgaaagttgcaaccgaaagctctagaaactctttaagaacataaagcttcacccaccactgaaagtaaagtatttcgataaggatatctgtcttacaaaaagtaaggagtaaagagataaaagccctagagtaccacacattttgtctgcgaaggttctatgaccagtggcaaaaacaaaacaaactgaaaggaaacaaaaacaaaaacaaaaacacctgtacttaagtaagtaatgatgagattagatgagaagtatcagagtaaaggatgctgtgtatggatctagcataagcctttgttagtaatgaaatgttttcgttatatctgcctatatgcctacattcttccttccttaggttcatttttctttcttttttatacctttttggagttgcgatctcaggtagtggtgaaaagtggaaagataaggaaagtgatattaattgaaaatctactatataccagatgctatagcaaatgtgttcccatttcttatttcatttaatctttgtgataatcccaagattactgaatgtaataatattctatttttataagagaagaaactgacacttagaaatatcaagtcatttaaagccccacaatctggaggttgtacaactgagatttaggctcaagtmtgtttgatgccaaaaccaagctctttctaatatgccctagcacagacctgaaatcaagggcatcaaaaatggtgagcaagaagaaaataaaaatctttaaaataagcatattattattaaagtttttcagtaaaatgagaatgaaatcttaaaggcttaagtatgggatttagtagtagcattattggatctcctactataaagatttggaaattctattttcaaactatttgccttctttaagtcatttttgtaatgaaacgtttgaggcttacagaaaggtataaagaaaaaaaataaaacacccatgtatacatcacccgtcatacagaactaaaacattcattacaatggatcacagacacactcatattaatccctttacttcccttcttccccagagtaatagctcatctgtctttgacaccaaagcacctttgttttcaattctgaaattattgaaaggttgaaaacagtttaacatattctgtcctacattgggaaataattaaccaagctagttcaaccttttaaactaaactccaagttartccttattaatagatattgaatgtattaagcttctatttatgcaagactttcaaactaggggaaaaaatctatatttcaatgttgggaggtagtatgttagtaagagaattaaatgtaaaacagtgtagacctcccaacccctgtgctgaggctgaagagatgctgtaaagaaagggaagaaagagccatatattcatatggggtcagaggagaatagaaaatacctcctgagaactgggcttctggctcccttcttgcttctaggaaatgaaaagaggatctgccaccccgtgcaagctctgctgaggaagatagggttagcccgtgccagctagctccaagggaataatttcatctataggctcattcttagaagtaaatttgggaaaacagagagggaaagagggtttctttggagttctttttttttttttttcagctctattgccttaattgccaactaatattgaagctggatttacaaatggatttaacttcaatattagagacttagtaggcaaagcactattcttctagttcccggagcgttctagtccttatttgctgctaactagtaacatgacctggaaacatgctttcagctctctggacctccttcctctgctagaaaatgaggcgcttrgtccaaaagatgtatgatctcagtatgcattttcaaactcgtaaattacatgtgtcagagtactaattagaactattttcaagaattggaagtcccaggactctcatttcagagatgcctactgtatgtttttcagatgttgtctaatttgctctttaaaattctagagatatttcacagttgaagaagctaagatttcgtaaattaggttaagtaacctgcccaaggacacacagctagtatgtggcaacacgttgggtcaaaactgatttgtctgctttcaaagtctgtattcatttactatgcccaatctctacctcctccaaatacaaagcagaggaaggaagcagtgtatatcaaatatctattatgtgccagaaactgtgtatgtctcattaagtactcaaaacaactttgtagagtattatttactttagttttatagacaacaaaacaggcacaaatgcttaaatcatttgcccaggaacacataaacagtaagtgggggagctagcacttgatcccaaatctacccaactccgtaatatgcttcagtaatggaaatgagtgcrtattttttattttattacttgatttattttgtggtaaatgtatgtgtgcatttgacctcatatgcatgtgagaagttaagagggcatggatatgaaattagactaacaatgaaacaactgattatgtccctaatttgattcaagactaacaaagatgaaattagtaatcaccaataataaagtctaaatactagcaaagctctgcttctctctttgcggaattatcacttagaattcgcttaatttaggccattgccatgattctrtagaaaatgagaagtctataagtatttagcctctgcctgacattgacttaggaatcaaatactgtagcttgaaatcgttgcaagtcccagttaatacggtcaattgtattatgagtgataagtgctcactcacaagctgtctgcagttaataaaaaaagggactccttttttttccaatattgttatttttaaatgtcaagaatcagatgtctgctgtttagaactattgtaccgctgccagtgactgtctgtattagggttgggagcaggaacatggatttgaagacattaaaactgtttaattctcagttgagatgtggttggctcttatacatttggaataaagcatttatggcacatctcagggtaagtgcttaatagttaaataaataaaataggaagaggttcagagatagaataaaaggtggtttttgttgttgttttgtttttgcttttaaaaagcagaattcttggttctgtttatgcctctttatgtaaatgttgtatgttgagtgactgacatataaagccattcagaagagcaagattttagatttccaactgttaacctaaaagaaaaatcccttcaaacagtgtattttgcattcattcagccgtagaaacaggaaaagggaaacaaaacgctctctccgcggtagaagtggagagagagagacagagggagcgagagagagagcaagacagaccgagaaggaaagcactcccagagatgaaattttaggaaagcaaaatgatcgacctttttaaggctgagtgggtttcttcagtttgtgtgcaagtttcaagaaatggaaggactgaccaggtttgggtataactcttttattactttgtatttggtaatagtgtggtgttgatttggatggtttttgtggtagggaaaggaaggggtagtatttgtgattttatttctcctctaaataatggctagaaagactggaagagctgacaaattaatgtgtgcacagatagtaaaaaagcagatggagacatcagatatctacaaatctgtgtctccacaagggctttataaaatctttaattgacacatgatctccttagatctgctaggtgctcttagaggatattatatggctggtgattgaaatatgatcggttgttttccaggaccaggattctgaatagttactgttgctttgcaaaattaacatttatgatgattgctctttttgggggtgggggtctgcttaaataaggtaccacacaagatcactgaggaagcattcataagcatgaatccaggatcttttaaatacaggtaaaattatttttttcaataattggttcaagattatttccatctttgcccagtgggagttttctttccctggctgagttttcctccctcttgtgttagaacaattttaagtctcccaattcagttaaaactactttacatgcaatttatgaaagtgctgaacagttctgctaatgactttggctactgggatgtttctttgctgcctttttctgaaatcccatccaccacaktcattgatgattttctttatttttaatttaaattgccctaataatccagcaagtgaatgtcaaggttcctgaatggatttcctattgggtttgcacaatcttctccctgtttttcactgatcttggtagagatgcccctcttcattcataaaaagatgagattgctcctgcctggtgctaactttggatgtggaatcagtgatcagcagcagaattctgttaattctctctctctgattctcttttattctcactattgtcaggtccaattaataaagggaaaaaaaaattgacaaaacattgtgagaaagcagcagtccagaaagactcagtggtagtaaagggaagatcaaaaatatataggaaagccttcttggaagttattaaagaaactttattattcttggccttcagtttcactgttttctaaagacattttcggcaacaccaaagtgcttggttagccacagtcagaggtttctgcctgtaacacacactttctgatctcacagaattccaatctactaattaaaggcatagcattagttagcaaagagtgaaagagaaaaactagccttggatctctcagtggccagtagatttcgtttcccctttttccattctcctcagaagacagtttgcttgattgcaaattaaagacagtaaatcaaggtaatcattcaccattctttaagagaactattcacccacagtctctagcccacatgagatcatggcattacacaattttacacagtgatttgtgaatggtagaacacattgctcttttgtgtcaggttttttaggaactgctaaaaaatatatgcagtattgccaggctgactttaatttgtaattagattatgttttccaccactttgggtttaggttcaaagacaacaatctgtcttagtgggttatcacacagggagaatttttttttcacattattttggtaaattcatatttaagtgtttttccaaattcttaaattaaaaccacaataggtaattgcattaattttttttcagtgactgatttacttatattcaacccagtcctctatgtttataaactaaaaggtaatgatataaagaatcaattaattactgttacacagagataaaggagaaaatattgtgtaaagaaaggcataacatttactcttactgttacttttgaccaaattcttgtttttaatttttttttttttttttttttgtcttggagagcactcacgtgattaaagaaagacctcttctgattccctgatcttttaaatgtaggaatatttaggactctcattaaaaactttttgtttcatttgctaaagtctagcaatatgcctgctttttttccatttctaagatatatttatacaatgaattttctggatatgtgggtccttttgtgtatattaggtcactgttctctgtcaactggagtttctactaattgtttcacagaattaggaaacttcccacaaaaatcaggcttgtgatatcacagaactgtctatgaagcagaattatgtgagcctgcggttactgcatgccaggtgcatgtgtgcaggtttatatatacaccttctatctgcataggtatccctgcaacaatacttctaaaatatgcatttatacacatgctgtttttgatctctgattcatgaactcagatccattttaagagtgccatttcacaaagtccatggaagaggtatgactatgaagtggagaaacagatttttcatagacgttggaaaattcattactgtgcttttccagtgattatattgaacttcaccttggaccattcgtgtagactagttagggatgtcctgcttctctggtgtaagaataaagaggttttagtccccttaataagggagaatccaacaattgtaaaataaatgacttttgctctccttaatttttttaaccacaatttaatatacgcttgcaagattgtctaactcctccctgatttaattctccgagactctaaaatcataagatacataattaaaggaccaggcagagttgggtttttttccccttaaaatgacaattttagaatagtagaacctcctgatcagaaggtcatctggtgtagcttcccattcacactaatctccctgcaatgcggacattgtatcttcctatctatttttcatctaataatctccttgtaaaagaaggctttgaaattatttagtccaatttagttttttgaaaagagaaaaatcctaaggaaatacctcgatgaaatcagtcatcttgccagtggaacctggcactcgcaggctcactgcctggctaccagtgctgttctcttcccattatgttgtacatattctattatccattctcataacatccttttaaggcaatggggccaaggcacagggaagcaaagggagaagcgacattatctgaaagttagagttgaagcaagtttgtgactcaacagtctcagaagaggcaaagattaactaaataatgcctgcaattatttattttaacttccaaagaaaagaaattggtgtgttcctcctttaatggatgagttttccctggatcatggtaaaccacgtagcaaaggaggatgcatagagcagaacacattaggatatgtgatctttagggaatttgctcagagccctggttagattttgargacagcatgcatccttccagcatcttccactcctttgaaatcagcatccctcatcttacttctccaggataaaaattaacatagctgttaccatatttgcaaaggccaaactttatttgatagatagatagatagatagatagatagatagatagatagatagatgtatttatgtataaaatatgtatggtgtgacaggtaggaattacgtattggaacaatgggaccatgggaccaaatatattaaatgggagcaactgcagcaaatctgagaggaatagtgtgcaggatacatacgctaaaagctacaagctaatctcttagttattgccccctacatgtaaaagtaagtgattggaaaggatttatctctaaaattggaaatgctacatgaaatattgtaaagtggaatcaatacgggtacatatgggcacaataatatcacatgtatgcctgtagagaatcatatatatgtatggccacttgctctatcattgaatatttagaggtaaagcttccttaattttatgtgcacaagaatcaccttgagagtgtctataaaatgaggatctctggcatccacccaagagattccgatttcatagatatgggatgattctgacagtgatcaatcccagaactgcattttaagtaacccagttctagggaactgtaaggcttaatttctcattgtatttactgaagggggcagtagagcctaatagatgaaaatatgggattcaggcgctctgactgcaagctttattgatgctggcttgctacatgactttgggctctacttagcacttctatttctacatctgtaaaatgggcatgatgatatgactgtgtttgcttcaggtcttagaaacaaatttaacttcaaatttgagaaataaatgaaaaatacagtgtgaaaatattccaagtttgtagatcctcaaacattaacaagctttagctctttcccatgtttcatgtaccataccactttttcctttgtatttcacttcatctagtttttattaagctggcattgggattarcatgtctgattctgtggtaaagaaaagccctttccaatatgggatgacagtaggtcttaatcacagtgtrggtgtaaaatttcactgtcttgtgtgccgactaaacgcagaaagctttcgtctgaagtcgagagtatcacagtcaatctttttttcttttcttttttgaaagacagtgtttccctttgwcacccaggctggagtccagtggtgtgatcatggcttactgtagccttgacctcctgggctcaagcgaccctcccacctcacccttcagcgyagctgggactacagactcaggtcaccgtgccagactaattttttatgtagagacggggtttcgctatgttgcctaggatggtgttaaacttttggcctcaagggatcttcccacctcggcctcccgaagtgctgagattacagttgtgagccactgcaccagcctggattaatcttttgatagctcagcctcagtggatcaggttttcccatggcttgatattggctgatggaatataattctggcttcttcaagctttagtgtattcatacagggaaaaaaaaaaaaaacgcaatacacacttgcttttgttttcatacgttaagtctgtcaagctcctgctgccttattccagacagctctggtaagtcaacaggacaagcttaattagtaataacagtcataggaggtgtctacaagggaactctatccaccatcatcacctctttaattggcttaggagaaccaggttctctgtggagtgtttcctccgtggtgcttttccaccattgatagaagatgaccaaatgtccttggccatcactcttctttgctcgtgcccaaagtcsctaagccaggtatatcattcttctaatgttgtagaaattgaaaagagcaagtaaacactgaagccagatctctctcatgacctcttctccacagaaccatcggaagttcaaacttcttctgtgagccctgtgactttgggcagtctaaattctacctcgcctgcttctccaatgtcatcaaaacaatgaaaacaaaaccattcagaattcacaggaagggtttaatacatttaatgaaattatatctcttaattatgaaaacttgaccaaataggcttgccatttttggttataaaagtggaaattagtgatgatagagatcatcctatggacactataagactctgtaggccatcccaggacctgcagtttacactctgaatgccacctgccagtctaagctcctctgtggacgtccatctggctagcatccccttaggcagtaaataagtagggagagaggcctttctacaggacttttccttttaaagtcctttaaaggaaccctacctgtaatccttagaaattttatgtctttgtcttctctccttaactagcaaaagtttcaaaggcttatctgtaactcaaggggtgtcagttcatttgtttgcaaatgaaacctgagctttctgaaaatgactcccctgcaaaatcattcccccataacactcctccagccttctagtcgattttagatcgtttcctgttctcccacctcttggaagtattccatggcacgctgagcagacacttttagtcaaaaacgcctataaatagctgattttccctgcttactgccttctctctaaggctttcacaaaggaggtgaaacgaatccactagaaacaagagctttctgtgaggggtgtgtggtgaggcttatgaaaaatcaaatccacaggccgaaaattatcgtgtaggtagctttgccatatttgagttacgcaatcactgcatggaaaaagaaacattttatttcatgccagaagatctcatgaactgaacaagccatcaagtgtgtctcatctgaactttcatgcttctttaaaaacatgtactttgactttcacactgctataaaaacaaaaaataaaaaaaaacaagttttatttattagattctatttgtaaatctagataaccaattcctgtagcctttccatcatgggaaatttgaaatgattttccccatccccatttctcctcccaacagcccttctcttttgcctacgaggccccacccatggtccacatcacagagcccccagagtggggcatgacactcctggaacactgtgcccatgctaggcaggaccttaatttcttcgttcactgatcttactgacacaagccttagaaacccataccagtggttaatttcatcccctcctccttccttccccaccccgtgaacyctctttagcaagagagctgagctcagcaatactttcccctccccagtactcccttctctcacttcttttccctttccttttgtgcagctattttattacataayttggaagggaatcctagtccaagattgtcagtttacaatgagacaactgagatctggagaggctaagcggcatttccatggccctcggttgtggagagaggcggggaaaagcagtggcactcaaaagtcttcctgagctcctcttattttcaagttatcttgatgttacccacactgttactcacagtgttaataacactgattctggctgggcgcagtggttcacacctgtaatcccagcactttgggaggccaaggcgggcggatcacgaggtcaggagttcaagaccagcatggccaacatagtgaaaccccgtctctactaaagatacaaaaaaattagccgggtgtggtggcatgtgcctgtagttcccaggtccttgggaagctgaggcaggagaattgcttgaacccgcgaagcagaggttacagtgatccaaggtagcaccactgcactccatcctgggtgacacagcaagactttgtctcaaaaaatatatataaataaaataaaaaataacactaattccacacttgatggatattcaagacatttccttccagtcccagcccctgccctttccactctggtggctggatctaatttgctgtggcctacgccctgtctattgctaaagtttctagaaagagcatctcattatgcctttctttattaattttccaagaacacacaccatcaatagaagcaggtgtctggaacaactcaaagtatcacttagcccagtgcattttgtactttttaaccaccaaagtctgtgttcaaataaagcaaaacatgtaaaacaatttaaaacagcactactcacatggacgcaagaacaggaggtttcaaatctaaattctctccccaagccaccccaccccaccctgtacctgggctgtctataatttgaaaactactgcccattccttccctattaatcaatctaagctgtctaagaaagagtttaatgatccaggagggaaacttctgtatctgttcttaataagcccactcttaataaatgagatcaatcggaaaactctgataagttccccccaaaaaattgggatctgtattctgagcttggaaagttatccgtccccagtgtggtaagttgtattagcagcagcagcagcagtccagactgcagccctggtgccctgcccttcattaaaaagacagcaattgatcctgggactccaggagttcctgattgactcagactacaaaatcacttttgggctttaagctctgatagacaaattcttatgttaccttcataccttttctccagctgtgacccaaaaaaagaggaattgacttttttaggaacacacaggccccttgactcccaggctagtgctctttccacagcaccatactgaacatcttttcatctccatcccatgctggatccacttttatgtgaccatgactaagaataagatgaagatggggtaaagggaacaagaaggagagtaagaagaactttaacttactaagaaggttctatggacttgtgtttaccatacattgttcttcttacattgtctttatttctggaagtttctggggtagccgttctgacccctgttttatatgaaaaggagggtattaaatttgctcaagattattctcctagtaagtgacaaaactgagatttaaactctggcctgtctgattccacaatctgtttgctttccaccataacatgatgcctctgctttgcaaatatttcctttggtcttctcttgaaggatttttaaatgagaatttcttttaataacaattaaaaatgaataattatggtttaaaaaacaggttctacttctatgattaggtgtaaaactaaatctagtttggaaagtagtcatgtttgaaaacaagtaatatatgaggttgatttgcaaagtgagatatataaaaaggttgtaataggacattatttcatgtcagtggaaatgtatatctcaacctatgaaagaacctttactcaaggctccttgtgtttatttgcttgtctgtttcaacaagaaacaatactactgaccccatgagactgccagcctaattgtagttataacattgttaataacactgtaaggttcttacggacaaatatgcactgtctgcccatttaatattctttgcttaatttaattttggaatgtctgcttctgaaatgattaggaagtaaactaggagtcttcaaacccaattaaattaaacccaaacccaaaatccagacttacagagataagtcagtgtgattttatattttgtctgtccttactttttgggagaccagatggttatctctcagcctactgtgaaccagaattctgcttggtacatgagcctcatatatcccagagtgttaactaagtgtttgggagatttacccattttactatttgttaaattactagtccaggtttgaargaaaagatatgtttctctaaagatctacccttagaatgttgcgtaattacccatcaaagtaaaattgaattagtgagtcatatactatccaaggtggaacagttacatgtgccaccttagaggtggctgcaggtatccagtgcataaacggtgctgttagagaatatcagtagagtttatattaaatccttataacagacaacaatgcagaatagtaagacttcggaagtctatcagaataaaggtgccattctcagtgatgaacttagaagtcaaagtcaatgtagtcttcataatccttcttcttagctggttttgggtatttcctcatgtacatgtatcacactgcagatagttcagtgttctatagcaaactcttgcttaattctctcccctctttgtttaagcccagatgaagttaatttaaaataagggttagtcctaatatggcatgtttaaaagcctccacttccttttggttcaatgttttataacatatcaccatgcataagaatgaaatattaattattcacttaacagggacttctaaggaactgagaagtgaaataattccctaaaattaaaccatgccaatttgatctcwtgtatgtttttgaaggtgttattagatgaatagatgaatagaactaagcgttgcatttcttcgcttcaacccatcttgattctacctgttgtaacatgtattcccctcacattttctgtccacaagcatataatgaaaaattctgttaaatgattttataatactgtcattctccctgagtcttttattcaaccaagatttctttagcacttgtttgacccagactgaactctgggggcagtggccagataaaagcaggagggaaaagaccagatgggtagctgaccactcagctggtagaaataagcaagtggagaacagaatttattcctagttgacaagataatacaggattttattttctamggtacccaagttgcccaaagatggaagatatggtctagcctggaggccaggccaaaggaatttaacctctgggcagcatttctcaggggaaccaatggtatgaggataggaaaagagcagggagctgcttcctagaggggcctgggaggttgcaggctccygagcccagccaccaggcagctggctgcagaggtggtggggctgagcgggccctggggaagaaacctagcaagcagcactgcactgttgtgaggaaaataccctcagattcacrtcgcatccatgcactcagcatcagtaccagtcagcaagatggaatggcatggacgctgtggatagcagtagcaacactgtgcacccrgagaatttagatgcctctggggccaccctcagagacctaaatgcttccaggtgtgagaagagcagagmtagctagttaggagataaccccagggaataatgaacgggtttattaccaaaacttaactttatctccagattataacacctgaggatgtagctattagattgggatgatttttctaacaaaggcatcagatcccaagtaaaaggaagagtttcttgttattaaaaatgtgctatgagaaactggatgaacacatgaggcataaagcaaaggacatttccctatttggtgaaatgagggcaaatgagccctagggttccttttaaatcaggtagtctagttctctgctgtcccacgtggtagccactagccacatgtggatctgtaaatttcaatgaattaaagtttgaaaaaaataaaaatccagtttctcagtcaccgtagctacgtttctagtggtcagtaaccatgtttcctgttgtttattaatccctcaatcaacatttccgtcatcacagaaagttgtattggacagcattgctctaattgttttttactctcttgacttctagtagattggggctttgccataaaaaggtaataccctgtggtgatgtcccagtgattagaggtgtccaaattgcctggtagttttctgtgtgcccaaagcggggcagggaggcccagtgagggcgagggccrccctgcttgaatgcctgtcctccatgccctcacagtgtggcattaaataaatcattccaccattaaaacttctttttcttcatttgcaaaaatacttacctcgtagagttgttttgaggagtcaattatgtaacatacctagctttcaataagtacaactcacttccccttagaaacatgaggactaacatgggcctggggttttggtgggattcttasccaccttttattagtcactcrtgacstgctggccattgtgctgggcacgtcatgtgcattatctccctggatcttcccacccacctggcgctgtcccctccacgtgcctgtcggctcctctgcgttttgtacctccctcaccattagccaagtaggcagcaccttacgtgatatctccattctcacgctgagytttgggcggtagttgctgaagctctcttttggacagtaatcctcatctgtgattctcttcctcatttaagaaacatgtctgcaaaacttttcttctcctcacatttacttgtaaattacaatgttttgacacctctaggagcaatatctgggtgcagatggatatggcagttggcaatgcatcatcatatctgctacagccagtcccttggctggtgccgttcagacagggcccctcatcctctgacaggttcagtttacgtgttacccaaaagactcctgtctaccccacattgcttatgcctttggccaaagggaaagggctttccagaaaggcccttggagtgtccattatggcctatccagggtactggtttaattgaaccctgtttgctgagacaagtgagtctcaaacctttccaatgcacattgaaaaatgaacatgattgatgtacaagtgtcarcgtctggcttcatttgtttactcaccagacttccaaagctgcatttttcgtattgctctctgaaaccaggcactctttcgccatctttgaggcctggaaagagagagatcacttcagcccaacaaatcagaacaatgccattggtggcaggcccattggaaaagcttattgaggcaggattccctaatgtggactgtcagaggaagataatgtttaggattggaacatcagcagggttgtcactagtcaggctggggcagcacagaagcagaactgctgagattgcacatttgactgacttctgaaataatcctatctcaaaaagacctttggatggggtagagggcagggtgggggcactgggcagaaagtcaagcgcagaagggcagggcatctcatccacctaattcaggtgttctctatctgaggctgtgtgacctgtaggatgtgcaagattggactctacacaatcagcaaactcctgaaattatataaaagtcaggggagtgggtgagatgttcatcttgcttagaagaaaagttcttagcctttatcatgtgcccagaagaaataaggggtcactaacaagtttaaattatgacatttaaaaaattatatgctttttccttaaaagcataaaattgatggctttccttcttccttatgatgacagtttattaggaaagcctgtagaataatttgaggaatataaagtttttaaagaattattattgtggatgaatattagctgaagtgaacagatcctctattggaatttggagctcctataacaatgtaatccctgtcataggattttttgtaaaggagtttttcctgaataatcgattcaagtaacaaacaatgaagatcttctctatataagcgtcgaagttgataggaaatgggaattcaaagacttctaaaacagttcctactctgaaaaagtttatagtccagtggaacattaaataactaaatacatgggcaaagggagaagcataaaggtatctgaacaaagaatagggaagtttacagaaagaatttaaacctggattgtaagtaaggaaggatggaggataaggacgtttcctcatttgaaatatcatatctctgaagccttgaaagtatttctatgggagtataacgggagagatttctcttagcattttctcattatttgttaatctctcaatagttcagccctatatcccccatgcctgacaagtacctgaaaatcacttaattccatctgcaaagtccctttttccatgaaacgtcacaaattcaagggcatgacaccaggaggtggagatcatgggagccaaaattctgtctgccacaataattcaacagtcaacatagatggtaaattagtgaggcgttcaccttcattgacagccatgcagttcaagggccatgaasttcattctgggaagagtaaatatagctttgctaccagaaagctgtgttcaaatcctgtgttttagcagttatacaacattgagtgagatatttcatgtctrtctgccatggtctcctcctctgtaatgtggagataataaaaatacctatcatacagggttgtcaaaagaattaattgtgttaatacatgtggaaggtgcagaccaatgcttggaaatgggacattatatgatgcctcaataaatcctattattattatgcctgaaaaaacacagtgttagcagtgtgaactgaagcaagagagcagatttaagagacattgcaaaagttactgttagagattacagtttcacttatcagggttttgagcacatgaaacccttcagcatctgtattaacttcctatggctgcaataacaaaatgcccccaatttagtgccttaatacaatgcaaatttatttatttatttattttttgagacagagtctcgctctgtcgcccaggctggagtgcagtggcgcaatctcggctcactgcaagctccacctcccaggttcacgccattctcctgcctcagcctcccgagtagctgggactacagatgcccaccaccacgcctggctaattttttgcatttttagtagagacgggtttcaccatgttagccaggatggtctcgatctcctgacctcatgatctgcccacctcggcctcccaaagtgctgggattacaggcgtgagccaccgtgcctggcccacaacgcaaatttattatcgtacagttctgcaggttacaagtccacaatgggtctcaatgagctacaatcaaaacatcagtagggctatgttccttctggaggtttctagagaagacacccttttcttgccttttcaagcttctagaagccacctacattccttgactcctggccycttccttcatctccaaagccagcaattgcatcaccctgatctgtgtctgtggccacaactctcgctctgactttccttctacttatttgtgattatattgggcccacttgataatgcacgacaatctccccatctcaagaccagtaaattactcacatctgtgaagtcccttctgctatataaggtaacattcacaggttccatggattaagacatgggcgtctttggggagtccgtaatctgcctactacagaatctactatctaaaacataagctatttcttaaacttaataccatttttttaaacttggtgtgaaagatgtgtgaaattatatatctaktgcctatcagctaaatgagatcattgtatatatgcactggtccctggatatttcacgtatatggtgatgaaatgaaaataccatccatttctgtgttttttagattattttaaaagaatactcttctaaaatagttaggcagcatgtccattcaaatcactatttgaaatcagagcacttgtagatggtgtacttacttacatactctgcagtatacagtcattcactcttaaatattgttaatttttgagttgcaattaattttttagtccctgttaaaaattgtcacctgctctaacatctcacttaaaatatacttataacctcatgtatggaaaaagctctgaagcatgaaagtyctattgttcactcttcttgaaacataagcattcaatagcttcatccaccacttttcttcttacatttaaagtgttaactcttagtgtcatctaaaaggagtgttcctttcttgtgagatggtatgccctctaatgtttatcatgtgaaagctcatttagtaagctttttagagcagaagaatctcatgccagacaattttttagtttattagatctagattcccctttgcctatgagtaacatatttgctgcttcttatttgaaatttttatcagtctcttaactttatagtaaaacaccaattattcatgtcatttgaaatccccttccagtatctatacatgtaaatgcatacatcttgcacatttgcaatcaggtgttttatatatatatatgtgtgtgtgtgtgtgtgcatatatatatacgtgtatatatatgtatatatacacgtatatatatatatgtttcccttttgttgtatatgatataatttttaattcagacacttgtgagcactaagtatatttcagattaagggctctgttaaaggctgggaatacaaagttgaaaggacatgactcttgccctcaaagagctctcaccaacctgggaggagaggggaactgatggttaaagttttttaaataggaaaaaacatgttttaagtatagaatcacctggacttagtgattgaactactgaggtgtctggaaagagaaaagtaaaaatgatgaaaaatttatagtttgaaaaattgggtgcctgtcaatacttccaactgagataattaatgtaggagaaagaatacatttagatggagaagttggttttgttctcggcctgctgaatcttatatgcctgaagcctattcagttgaagatatcccgtaggcaaatgttcatttattcagatactatttgggaagttattatagtaaaccagataagaaatgattgtgtttggaataggattgaagcaataaagatggagagaagtaaacacacctttctactgtatcttgagagtatcaagttggtcaagaattgagtgggrtggatgaggaagagggaggaatgaaggcagctggatttatgattgtgcagttctggaagacatcagaactggagaaaggcactggggagttatcacataggaggctgagaggagtttgagagtgaatgaggtcacactggggcatgtgtaaagtcagaagatgagacatcacaagccaacttcctgggctacacagcaggaatcataggaaaagcactaagaaaggtcataaaaataggccagaaaagtgtgggagtaaagggagacgaagaggatttcaagaaacagggaaagtttaacaaagtcaactaccaaggagtggtccagtcagacaaggaatggaaagcttgatcgtgaacttggcaattgggaagtaactactgcacatgccaagagtttccttaaactggtagggtaaaaatcattttgtgtcattttgataaatgtttattattttcaataatactctatcatttaatgaaaatatgtattgttattatagtatgtaaatacaccatggctagaatattcatttctatttctattcattgtcatttgaatttttaaacagctttttaccattatgaataataccataaatgtcattttcaatgaaaggctaaaactcttttcctggttagaattcccaaatattatgcacatccttcaatttgaagaaagtaatgcaagtaattcttagcatcttaaaataatttaaatattctaattttaaataataatctacagaggttttcggctctttttgttattttcagatggagacatcacaaatgtctgggtcaatatctagcctagagtgcacacytacagagcaagcatcttcttcatactacatactgaagtcctctatggatgtagcattatactaaataatcagctgtatttctttatattataaataatttaatacatagagcaagcactttcttcatactatatactgaagtcctctatggatgtagcatgacactaaataatcagctgtgtttctttttttttttggagggggacggagtcttgctctgtcgcccaggctggagtgcggtggcggaatctcggctcactgcaagatctgcctcccaggttcacgccattatcctgcctcagcctcccgagtagctgggactacagctgcctgccaccacacccggctaattttttgtatttttagtagagacggggtttcactgtgttagccaggatggtctcgatctcctgacctcgtgatctgcccgcttcggcctcccaaagtgctgggattacaggcatgagccaccgcgtctggcctgtatttctttatattataaataatttaatacccattagtaataggtttcttctgtttcaagtgactaaggtaatttcccacctattagctatttctgttgacctcacttcaccagagttcctcaatctaagtttaattttagcaatcacaattctctcatctaattaacaaaaaaattgggccattgcctcagtgtcttgcattcaaccttattttgactggccattttctaataatgtctcacactcttttttaccccagtgcttataattgtagtttctgttccgttgagttcattctctttcccagctctctttgctctcgttaatgtttctttcacatttctttttcttttctttgtatttacttagtaacctattcaaatcccttactgttacaaactcttcaataatcatctagttgtttattcaggaaaaattcctggaagtagatgagccaggccaacagtcatgcaaaacactaaatattacacatagattgactccttgcacatattaccagtgatctctagaaaagtggcctggattcccaccccaatggcactttccattcttgacatgctttgtagacgattcttctgtattgtgaatccaaatccacttctctttgaatttgtcttggagccataaaataagaataaattttttggccaggcgtggtggctcacgcctgtaatcccagcactttgagaggccgaggcaggcggatcacgaggtcaggagttccagaccagcctggccaacatagtgaaccccgtctctactaaaaatacaaaaattagcctggtgtggtggcacgcgtctgtagtcccagctacttggcaggctgaggtgggagaattgcttgtaccggggaggtggaggttgcagtgagccgagaccatgccattacactccagcctggatgacagagtgagactccgtctcaaaataaataaattaattaattaattaattttttaaaatctacctcccttttgttgattgtaaaacaacaggaaatatacctaattactcctccacatggcattccttcaaatgtttaatgcaaaccattatttgccacttaagtcttcatttttccaccatcgatagaactaattccttcagctttttttttacttttattttaggtaaggggtacatgtgcaggtttattacataggcaaattgcctgccaaggggatttggtgtacagattattttgtcactcaggtaataagcgtaacacccgataggcagctttttgatcttcaccttcctccctccctccaccctcaagtaggccccagagtctgttgttcccttgtttgtgtccatatgtacttaatgtttggcttaagtgagaatatgcagtatttggctttctgttcctgtgttagttcacttagaataatggcctctagttccatccatgttgctgcaaaggatataagttcattcttttttatggctgcgtagtattccgtggtgtatatgtactgcattttctttatccagtctgtcgttcatgggcatttaggttgattccatgactttgctattgtgaatattgccttcagcaattctttaagaacaggactttgagcatctcatctgacaaattgtatctcatcccaagaaaagcatccctcttagcttatggtgtcatagcgtgaatattattatttcatttgggtccagacttcacagcattcagtggaactctttggccatgaacttctatcaaagtaccagcttgtctggtaatcatgtcaggctgcctcacactcaggtaaaatttctaggaccattttttcacacgaaatcatactgataggtttccccacactgtactgcacactcaggtggtttaacacaatgtagagtattacaattacatgtatctgtattaaatattattatatagatatgagtgtattctaggcaagggccactggttactgatgtgcagcttgtgcactacctaactctagggagctccacttacgttagtagtcatcttacagttattcgtttattactataattttccagaaaatggcagtagaatcttgaggaaagaacaacttgtttctaaatcgctcatctaaaagtgtcatttgaattaccaaaaagaatgttttcaaaacaataacaaaattggggaatgctaaatctgagatccaatattttaaatatttcccccaccaatgtatgtatgatattttaatactcataattgtatccaatatctcattgttgaagttggcaatttttaaaagttcagaatagggctagaaagaaagactctgcttctcgctagagactgtcctgttctttttcatgaaattatttagataccatttaggaaaagtcattcaaccagttatgaatctcctatccagtctacattttaaaattttatttaaaagcatattactttgttacaggtgttattagggggaggggttcataaacttaatatgcatttattgggtacattttgtaaaatacctaagaacataaagaagataatagaaatcccccagacataatcactgttagcaagtttgtgttgttgttgttctttggaaagactgataatattaataaacctctgagtaaagtcaccaaggagggaaaaaaagaaagcacaatataaacactaacagaaatgaaaaaagggccgtggatatatatgcagtagatattaaatctatcatatgagcaaaaacagaaacaaacttcatacgagtgcaggttgagtgtgcctaatttgaaaatctcaaatcctaaatgctccaaaatccaaaacattttgagagccaacatgacactcaaaggaaatgctcattggagcattttgaatttcagatttttggattggggttgctgaaccagtaagatggaaacacaaccaggcatcacttaatgacgggaataccttcagagaaacgcactgtaaggtaacttggttgttgtgtgaacatcatagagtttactgacacatcctagatagtagagcctcctacacccctcagctatgatatagcctattgctcctagatcacagaatcttaccgcctgttactgtgctgaatactgtaggcaattataacacaatgataagtatttgtgtgcctaaacatagaaaagatacaaatatggtattataatcttatggggctactgtcttacatccaatcattattgaccaaaatgtcgtttggcccatgaccgtgttctaaaatccgaaaaaatctgaaattcaaaacctttctggttccaagcatttcagataaggaatactcamcctgtaccttgaaaatgtaagtgttcagtttcctggaaaaataaagcattcaaaactcagtaaaaacagaaaccttgaatatatccataacaacttaagaaactgacatattaaaatttaaaattttagtttaaaatttactcagaaaaagaccagaccctattaatttttataaaacctgcaagaagaggtaatccctgtcgtataaaaattcttctagaaattagaacaacaacaacaacaaaaaataaatgcccaactagtttcaggatttaatatagacttaaaccagacaagggccatttaagaaagaaaaatttaaatgcaatttctttcatgaatctgacataaaaattcttaataaacttaaaaatacaattaaataattaaaaataatgtaaaataacatggccagatgacaattatttattaacaaaaagaaaggttaactttggaaaagatattcacataactctcagygcttaaagattaaaggataaaaagcacataggattgtctcaatatatgcagaaaaggtatttccaaatattcaacagccattaatgatctaacaaaaaaattattataacaaattgggaatagaaaaaaattcttaaagggtatatatatgtagccaacaggaacttcctgtcatgttggatcatttaaacactggccacaggttcttttgccgacatttctctgttgattcatgttagtctatagcacctcctttaggatcttcccctagaaaacatgaggaaacagtgttacccaaatcctggcaggctcaaagctgcctttttccttgagtcttgatactgaaggggagcgttattagagagaaaatctttgactcctgccttctaacttggtatcttatggatcctgctccactctttgctgaggttagatatttctgtggataaatctgatgtcaacttcattttctcttccttaactgatttttatctttttccttgactgccttaaggattcttttcaaaaatttttctgggatgtgtctttgggttgatcattctagacgactttgcactgatacaatggatatctttttcataagtagatttaaggcttttttattttagaaaagttttattgaattatattttaaagtaattattctattccattgttttggctttcttcttctgagatcacagctatgcatatgatggctctcctttgccatattcgatacatgtccttttctctctaatccttctttatcttttttgcctctgtataatttacttgcattttcactttttatcttttatgtcccttcctttaccttcctttccttcaattccgccagttcccatttgacatcctccagcagtgtaccagtaacctcctgttttcttctcatttcttccctgagttcttacaactctgctttgtgatcttcttttatagctataactgcttcattaattattggtttaattaataacaatgttgggttatgcttttaatcttttttgtgacaacatatatttcagttgagttttcattatttacaagaaattcctgactggtcttcttcatgtttcttttatttttttacttttaaacttttattttaggttcaggatattgtgcaggtttgttatataggtaaattcatgtcataggccatatttcttatcatatctgtatgtgtattacttgtatattactcctatttgaatgagttgaattttcctaggaaatcaaaagaatgttcctgtagagggaatgatgggcagtagttttccaagcatcaaaggcttcctttgctgctgctacaattgtttcttcataatatgatccatctatatagtcacacatcatctgactcagaaccaaacctagttctgttcttcctcaattacttcatggatcacttcacaggctgcctgtcacatgggaacacaaatgatgccgtcactttcagtaacacttttagaattttcctggccctaatgagatttgccatttaccctccacctgctgcgtaaatttcagtcttttctgcagcactttcctcttggattaaggcccttacttttggggagtggatattcaacagagatttctgagttctgctatatctagaaccccttcatacctcccacttacctaccacagtattaagacttttctccttggctttctgcctgactctgactttggagtctgtggattttctgctggttttgctgaaaatgtaatttgtgggtgtttcttttcattttgttgtattgttgttttgttgtttggaatagattccaggagaagtgagaaaattcagctcctgtgaaaaccagtcctgttaccatttagaaatctttttctcctgttttttttctataaagatgattttttataagaaatctcagtgtgtgtgtttacctatcaaccaagttaatcttcaaaaataaaaaataaaaataaagcacagtcagcttagcatactacttctttgtaaatgtgggttgcttctttaagcactcacggaccttccatttaacagcctgttctaggatgatgctgaggtataaagtcaagcctatcatgctactatatacagaacatatttctttaaagcttcaaaagtcttgtctatcttcagtgttttgccaccaccgtttcttttaacaatctttaagaatgcccaggttgattttgggggccctaccaaaagttctttgtgttataatttgtcaagcacaaaaattcgagcttaatatttttaggtgtgtcctctttttaaaaagaaaaatgtcttcattgggaaaattaaatcattcatctaatggatcttataatattttaaatcgacatcccacatgctaattttttttttgagatggagtcttgctctgtcacccagactagagtgcagtgacacaatctcagctcactgcaacctctgcctcactaggttcaagtgattctcctgcctcagcctcccgagtagctgggattacaagcagccaccacaatgcctggctaatttttgtatttttagtagagatttttgtattttaatttttgtcttgttagtttcaccacgttggccaggctgctcttgaactcctgacttgaagtgatccgcccacctcagcctcccaaagtgctgggattacagacgtgagccactgcacctggcctcaacatcccacatgctaattttctaagcagaatgtatgtgtttgactaatattgaatcttcatgccttaatggcatcacagtgttattggccagagaaagatatagaaaggtcagatttataaacaagaccactagtactaacactctatataaaacacttggtttcaagtgttttgctaatcgcagttaatgctgtcattaccctctcagcacagcctagcaatttaagagctctgtcattcattcattcaaaaatatttattaaatgcctactatcactaggccccgagtagaggcaaaggataacaagatgatcagaaacatatatgattgctgctcttgcgctcccattgttcagtggtgagataaacattctcaaatcaatcacacaaatgaatgtcagtttactaccatggtaagggctgctgttgaactattctgggagctctgccctggttctctggcagtgaaatgtctgcaatcagggctgtccctttcttcattgggagaaatgatagcagaattcaactttccactggactagggccctatggagtctagggcatgcggaattggtatttcttagcactcccctatgcatctagtacctgagatcttctgtagtgtccttgatctcaaagtgtttatttcctgcctccctccatgcaatgcacccctcatactcatcctattagaagggtggctagcagagagtcagttctctccacagtgaatttaacaaagagactcaaccttaggtgagtctctttgaagatactaagagtgtagtgacccatgcaccttttgagccttctgctcataagtaaagttgatcccaaatgatcacttggctcaatacctacagaagagattagataatcgcatattgacttgagatgttcagcaaagcatgccctatgaagtaagactgggatgaggtctgaagaaaatctagacttaatcagacaatgagccaagggaatcatgcctccagtagagggaagagcgtttgcaaaggcagaaagaaacaaaagggtgagaaatgaatccagcacggctggatcaccaagatagtgctagataagtctggaaagatgcaggaccatgtcacagggccccagaggtcacgtttaacatttgaatctttatatccttgctagtgttggggggaggagcaaagaaagctaatatctactttgccctctgaaaacatccttttggatggagtggaaggagaaggacagtggaagaggagartcggttagaagacaaatgtaatatccaggtgcaagaaaatggttactgggactaggatggtgacagtgatattggggtaagtgggtggtttccggagattccaaatcaatatctcttggtgatatggcaggagagggaagtgtccaaaaagagtacccaggtttctgacctgcgtagaagacagttgttccattcactgaagtacagaactctacaggagcccagtacttttactgctggggtggagatgggggcgggagagtttggttttgaaggtgctatgtatgcagcactttgaagtatctaagtgaagttggcaggtacctgactctcacatgggagttctggaacaaaaatataaatgcatgagtcatctgcatagaagaggttttgctggagttcaaatttytytttaccatgcgtcttctcccttttaaaatttgaagatcatgtcctctgatagagaaaatagtagaaaaataaaagtgtgagagtttgatatttgtccttctcctccctcctccctactgctcctcctcctyttcctcctctttcattatcatctgttcacattgtaccatytggaacaagccttgggattttcctcattctattcattctaagccatctcttttaaaaagtcttttttgtgtttactgtccttggctttttttttttttttttttttttttgagacggggccttgctccatcatccaggctggagtgcaatggcacgatcatgactcactgcagcttcaaacacctgagctcaaaggatcctcccacctcagcttcctaatcagctgggactacttgcatgctaattttacctggttaatttttttattttctgtagagacagggtcccactctgttgcccagggwggtctcaaacatctcagcttcccaaaatgttgggattacagaagtgagacaccgtgcctggcccttgtctctttttaaaattcacaaacctcatttcattctgggctttagcccttttggggcactttgtgtaggcacttatcacttacctgtgttctttcttgattgtgaacccatctctcatgtttaaaacaggtttctttcattggaatacttcaaaaccctcattgtgcaattcttttggtttctttctaggcttcctttattctcgtctggatcatttggtaggatgttgctataattacgtttggtgatcctaccttcccctgaatcgcctgccctttcatgctcttgatcaaacacagctctccccctcatcttattctcctctgtcttcctcttcctccttcttttattcctccccttcatctttattctcttcttcctcttcttcctagtcctcctctttttcctggtgctcttactcttgcagatttggagatttgttttcttgctgaaaattagccatgataaaacaccggcacaggtggttcttgagatacgtctgcagccttctagtcttcaagagcatcccacatttggggtcatcctttctcttccccaacctctccctatctgccttgtgtagaatgtgttatataaaactcattcatataattataaacatatgacaacgttcttttggcaaattaataattttataacatctctttttttcagaaacaggatttattttcttaggccaatgctatcctgataccaaaacaagaaaaagatattacaagaaaagaartttactgacctagcttccttataaaatagacatgcaagccctttaacaaattgaatacatcaatatatttaaaagatcatatatcatgagcaagcaaatgttatcttagggatgtaaagttaatttaacattcacaaatcaatgtaatgcatcatgttaaaataaattttattgtgatattatttacccatttaaagtagacaatttaatgggtttaatgtgttcacaattgtgcaaccatcaccaagatctaagataaaaatattttcttcactccaataaggaatcctgtacctgttagcaatcacttcctggtccccctaccccaggtccagggcaaccactagtctacttttctgtccctatagattctgccttttctggacatttcatataaatagaatattgtaatatgtgatcttttgagactggcctctttcaattatcatactatttttaagatttatccatgttatagcaggtatcaatatttcatttcttttcattccaaataatgttttattgtatggatatactacacttttaatcctttcatcagttagtggatacaagggttgtttccactttttgactattgtgaataatggtgctgtgaacatttgtgtacaagtgtttgtgtggacatttgctttcatttctcctggtatatgcctaaaagcgtgattgctgggtcatatggtgacactatacttaacactttgaaacaaaccaatcatttaattataattttccttatcatttcttattaaatgcacctgtgcttttattaattcagtagaggaaagttttagggtttggttttgtatggtgacgaagaaaggaaaggtgtaagtctttgctctactgaaattgtattgtccttgtctattgataacctaaaagtgatcttgctgatgtggttgcagattgcactcagtaaagctggattttagtaaatgctgcccacttaaaacttataaagtgaaatacttggaagaggacgctgcaacagttcctttgccccatcccgaaatgagacacacacacacacacacacacacacacacacacaccacactttcaataagattttctgggatgtttctctatggaagtcaattttttaaaaaatgaaaagtgtttgccaagaggtttctacaacacgtttaattcttttgaagaaaatgaatgaattgttgagaagtattacttaatttttctctaaaagagaatttgatatctcaaggatggaaatctattgttattttactccttaaaatctctctgtttgttagctgactgaatgttctatccaatttgtgcatgtgcacacttcaacattgtaaaaggcatctgtctttccatcactagtcagacaatcaggcatgcttcttttagcaagctgcaaggatcgttccctgatggggacttccatttgacagaatatacgttaccccctatatgggctgcaaagtgatcaatagcccagaatttactgagataatgaaagatagcaatatgattttgctgggacagtgagcatgccagactctgtaagtacaactgctatgcaaaattgcacaggctgaaaaatctgcactaagtattcacttaagtgttattcttcagctatagggttttatttcattaagtatctttatatgaatgaaaatgtaaagttgcaaatcttgagttgtgagccatgaccaaccactctccccccacccccaagtcctgtgtttactgcctcactcaaccacttagaatcggcaaatcatagagagaagctaaatgctctcagctgcactataccaaatcaaagctgagatgaataatgaacttaattttccataaagacattctgtttggcattccagctaataaggtaagctaatagcaattctgggctatggaaaggaaaataaatcgtttctttgtgcttgatttctgtgctaatctatcatctttcttttaacatactggagttaatttcatgtttcatgatgtctgtgaactggggatgaacaattttataaagagtagccccaacatacccttttcctctgatttggttgcttatggtacttgcagggctaagggagaaatccagctttttaataagaatgaaatgtgtatattaatatttttatcatctatagtatggagtgaatttagttaaacagcagaatatttagatgcagcaaagacaggctaaattacttaagcactgattgttgaatatatttactatgatatagtgtaaattgatgttgaatttgctctaagctgcaaagaaaagcagaatacgtacatcatgttgatttctgaatcatttcatttctaagtacatgttattctagagaaggtagtaattttcaattgctaaaattattccacagcttcagtttaggtgagttttattttgtaaaattggatttttaaaataacagcgtgctggtaatgtgaatttttgttattacttttttgattcaccatggcggcaatgattttggttcatgtggaaaatgtacttgtccactaagtttatggaattagaaaccatcagctctctctgagacttctattgctaccttggttactctatctcaaaaacaagaagtgatgaggcacttactaggatggcttcacttttttgtgatatagctttttggtgtttaatacggggattttgattttcatcagatggtagcagaaattcctgaaactagcaaaggcttagcaagctggggaagaaattatcatatttttcttttctagcaaaatgacaaaaatggaaattataactaagatttatgttttcagacattcgggcttgctgccatgtcacctgaaaaatcagagactttaggttcacaaagtaggtgacctcaaaagatatttcagaaggtctattcaaaaacagccaaagcatgtgggaaatattggagaaatagaaaatgttcctcctattcctactgtctcatctttgtattctgtttttatgcacgggagacgagctgtgggcacaggtgtttttgtttcatggaagcctttaaacaccacaatcagacttttatagataaagaagaacatttatttcattccttgaaattgttcacatttcatatgtctttcctagaagtataaacaggatgctgagagcttgagcacaagtatttagctaccacatataacttacttccacccaaaatatcgtcgatggttcacctaaaatttttaggcatttctcttgaaatgcctgtaatttactaagtcatcaagaagtaggaatgtggaatggaatttcagtctatcacagttaatttttaacaacaataagacagacatatgttacctatttatacttaaatgtttgatttcatggctattctgtctttgtaaaactatattggaggctcaaacgtggtgcattgttttggatttgaaaggtgttcattttgttttcttcttttcttcctttctctctcacccctcatcgctccagagcatgctgggctgccccgtgcactgttatgcttatttaattctgctatttttctcatttcatgtctccccaatattactaattcagaacctatagattgatctatgttcaatttaaagctggcagaaacaaactaggaaacaaatttttgtaaccaccgcaatgttgtcttctatttcctgccatttgtacaataagaagatttttataccagcagagctttttatccgcaattgctacataaaaccaacttgagggtgaaaatgtgcaaggctctttggccagcatcagcttcatgatcttttgtctgtagtggtcaacccatgcatgctgggagataagatgcaaagttgttagcccttgaaggtatttttagcaatgccaaatgcaaggcatgtgttatttacaaactcacatattagctctgtgttagttaattaatagagaatatctagagaaagaagcacccccaccttccctatatacacacacacatcaaaggccacagagcaggtaccagctgaggacagtggtgactgaggcagcagcatcagtacagatggcccacagtcataagaagttcttggcaccattgcaaaaaggcctgacagaaggcagcaaacagatttgttcccaaatacacgtgaagctcatccttgtggacaatcagaattaactgggcgaggaacaaagatgagagagaactaaagtatcactggacttggttattactgttaatatgacctcatctattctcacaggttggggtacacaaagatatcgaggttacaaaaataaaggcatgacacaaaaacctatcatgtcaaaaactgcactcagtatcttcccaagagcctgctaccccatgtttcctacccctgtaaatggcaccactatctatgcttttttttaacgctgaaacatggggccaatcttgatacctctctctatctcaccctcgtgtctctcctctaaggcagactcataaaagttagttgaatgaatgaatgagtggaaaaaaaaaaaaacaccaaatcttatttctrtccacttctcgccattccttttgccacgatcccagttaaacctccatcatttctcagctagactattgtaaatatctcctagtggtcttcctgcctctagtttctcctaaatccagttcatcctgcacattatagcccaaatgatctttctaaaatacagataaaatcattaaatcttctgcttaaaaatccttcactggttcctctttacccttgggataaagtccaaacttttaaacatgacttagagagtatgatgtagctggggacctttttccttcacaatctcatttcctaacactccctctgtccactctgcatttcagccatactggtctgcttttctctttcttagcagtgccatgttctcttgcccaggacctttgcatgagctgcttcctcctttgtctcttctgcctgcctacaaccccctccacccctcaccccccacccctgccaaactcctctcttccctacttaacctcttcccaactttccagtctcatctaagataatgtttcctcctggaagccttctctgactggccaagtttaagtgaggtaycctctcccaatatgctctcatagcacccatcatttccttatcatgcttcttctatcttaggtaggattgcctgttttcttgtttgactcttccactagatcgtttcatgaaagaacatagctggtctcttattcatagttgtggcccgtgatccagcaccatgcctggcacagagtgaattctctctgaatgcactagtagctagctggactctttaacaagctgtattaccttttgtcttgctgaggttgcagaaaccagatgcaatgattttttatgctactcattcctgcaaagtactgtgctaaggtggttcatataatttccttaatcttcgtgttgttgttcccattttgtaaatgaaagaactgaggctcaagttgtcatgtatgatgctgatattaaggaatgggaccctcagtctgtttgactccagggaccagttctttctattttccacgtgatttactgcctccttagaataaaagaaaaagtttattcttaaaaatgtataaggatcattttttaaatccttaatttctcactgcctgccagtgttcatttgccttctgatctccaatagtcagccctgagtgtatttttcccttaaattaaactgaaagtacttccctttgtgctgtattctttattctcaagctttcttcttcaagccttatgtctacaggagttttcagcctttctcactttctctacagagaaagtagctgggccttacatttctgtttcatttccattgtccttttaaacaggcattattttcctggacctgctctgtgattactgtttccatagcactttgcctgaactcagttggcccttcatgttcttcaaccgtagcctgatgtcagactacttaggggggcttccactggtatttcactggggaagcaaactgctacttgttaccacttaaccagttaattagctatgctctttgtggaagaaatatctacaagtacagctagagaagagacatgtgcagtttctgggaaattttccattttgtgttgaccatgagagtttttaggttcctttaattcaaaccagaacacagacgcacacagtcagctggaaaatgtgagaggcaacagggtgttccgtgaatgagtgacagctttccagttgaacagacctagatttgaatgctctttctaccacttctctgtctatatgactttactaaattactaaagctttctgtgcctcaactgcttcatctgtaaaatggagataatgatggtgcctatcataaaataatgcctggcacagagtaagtactcgattaacaatggtgttagtgtgggtggtcgtagttagtggaatagaggctccagatggggccacactctaatctcaggaaactgaggatgttaccttatgtggaaaagatgactttgcagatgtgattacattaaggatcttaaggtgggagattgtcttggattatctgggtgggctctaaatgtaatcacaagtgttcttttaagaaggaagcagagggagactatgtggccgtggaagcggagagagatttgaagatgctttgctcttggttgtgaagatggagaaagggaccatgggacaaggggaaaaggcagggaaatggattctcccctcgagcctccagaggacgcccagctctgctatcttggtttcagctcagtgaaactattttggacttctggcctccacaactgtaagagattaaatatgagattttttaagccactgggtttatggtaatttgatgcaacagccaaaagaatatagtggtgatattttgggaaatgaaacatggctccaaatgagctgataaagaggaataagatgttaatataaaaaagatgatattacagggttaaatgtggagtagagaggccctctaaatattatatgtgtgcctaaatacgtggtcagaggaattgcaacgctggcgctagaggaagtctagaaagagagggttttgaaggagtaaagccatttgtggggctttagacataaagagaagtgaggtctccttgagaagggaggtgatgcctggtgattcagggtggggctgacagccagggtgtctgagcagatggcggaatgtcctgttcagaagagagtgatcagctcagaataaaggctggtttgaggaatttccctgggcaaccaggcatgaatcttagaaaagaggaggtgtgtcccagaaacaaaaggagctgttttctattgttctcagtgccatgttggtgatagaaagaggctgttcaagaaaatacattctgaaaaagacctcctgggtctttaaaacaagtacagactattagcacaagctgaataccttcaacagaatctgtttctagcagtaccctgagaggccctaggtccgaagtgaagcttgctgcttcccatgagtatatatagtgcctgtttatgtgctcatgtttctgttcccacttctgtactgccctcctctcttctctttgcccagttgccaaagtctttcccatcactcaagtcccaagacaagtataacctccttaaactagctcccatgctaccaatgcctacgtgtggattttctagtgattttcacactttgctgacaccaagtttgagggcttgttgctccctcccctccaataattctacctgtcccccaatagacagtagaccccctagagacaaatataagtctattgattttattgattcttgtggtttctactcgcacagtgcttggcacacaggaagcattcgataaatgtgaatgagtggattgatgaattaattcattaattgtaccctgtgggcatagttatcataagataaagagaataatgaagttcatgaatcccaggatcagtgtctaaagaaaataagcccttccaccttaacctctcaaaagcaagaaattataaaagcacgtaatagagctgcttcatgcatgaaatagacattaatttcattatcatctatttagtagttcaatatctaagataaaatttaggaacaagttttcttcactcccagatctaatttgccatctcttttatgacatgatttttttttaaccaaagcaggctatgaaaggagaataacaaaataccatgtgaaatgcatgctaatttattttcaagtacagtaaaaccagagtttggtttttgcctggtgtattgcacatttgaggaaaattttctaagattaacaattattttctttgaaaagataaatgtgtcatgtttaatgcaaaatttataaatggatgcaacaattatctttttattaaatagtaaaagtaatggtaaagcatcatgttcacatttgaaacataaatcatcttagatgaattaaatatatcactaatgagttatcaagtgattaaatgtctacagcatatatccacaacaagcagttcacaacctggctctaagagtttactcattgctgtaagcacaaaagagtgctgctctctatcaaatagagtgctttcaggggagagtgaaatccttcacttttaagcatgtagttttgaactttttgtgtatgcaagggacaatgccaggcactatcagagatacaaatatgtgtagcaaccatgcccagttacgatgctttaccactgctgagaatttctagtcatatttacacataaaccatacaacagaatatttcttaacaactgaaagaatctgattagcttgactaaacttgggaaagaacaattgacattttgatatttccttagctcaactggactagttacatttttactaacttcaaatactttatgatcaagccctgtgcatgtggtatgagggtaatcttagatgaaaacatcaggaaaactcaattctttcattcactaactgaagctcccctttttccacagacagttgactattattctaaaattgtctctgccttctatttctctcttctccccattgttgaattctgtggctccatcccaatctatactttttttaattactaagacattagatgccatccattagtaatatactggtttttaaaaaatggttcttttccaaactatcataaaatcaagagagagaaatgtgtacaatttgcatttatccttgtccctgacttttttttttttttttttttttttttttttttgacagaatctcactctgtcgcccaggctggagtgcagtggcttgatcttggctcactgcaacctccgtctcccaggttcaagcaattctcgtgccttagccccccaaatagctggctttacaggcacacaccaccacgcccagctaattttttttgtatttttagtagagacggggtttcaccatgttgcccaggctggtctcaaactcccgagctcaggcaatctaccaacctcggcctcccgaagtgctagaattacaggcatgagccactgcgcccagcctttgtccataacatttacaatctgggttactttgctttctcaaagtgaaattatcaattatgtctatctttttaaaaatttagtattgtttcaagttttgtttatgaaaagaaagagcctacatctatataaagtgtaggatttataatatccattgctgcataaattaatatatttacagctgagtctaaaaccatatacaaatagaactggaaggatctgaaagggggccatatgcctaatatcacatttctaaatgcttcctttttatagaaaataaactctaaattattgaggaaggaaagctaattcatcataatggaggtttaaacataaaaggaaaagaagaaagaaaataacatatgcttggatttcaaaatcctgttacatcatagcacccaaaattggaaggaagatagaamacacatcttgaaagcctatttcgcaggcttggctccacctcacaaaatccctgtgccattttcttaacaaacttctttacatgtagcagttggatctaatgagaggctaaatcttgcctttgtgttagaaattgatttatttttttccctcgttctgagttctcctgtagccagccccagaactcaagagcctgcttcattgttcatcatttgtatttatcacttttacagactgccacagggtgctcagaaatctaccacgctcttcaaaagaaaacacaaaatccctgctctttgcaggggaccagcccattaaaagcattggcagaatctaagaaaagaaagctgcagtcgtgataaaacaacgcatccggtaggagggccacttaggctacctctgagaggtggattctgaggggagatggaaaaatgtgtggctgagaacacttgctccctcttcacctcaccacccttgcgatgcctttaggtcagcggctacctcagagcaggagcaggtggcaagcccaacatggaacaagccaggtattcaagtcacatcctaggagggtcgaaaagtgcaattcctcctcagtggacaaatctcatccacctgcgacgtgtgtgacagtattcagggtgaggaaaacatttgacaaaggaagaaaaaaaatctaatcccattacctttgatgagtgctcagaggaaactcctataaaaactgaagattaaaatgttgcatagtgatggcatatacccatgccctcacacagacctcatttcctctttcatattacccgataaatgcacttttctcctaaagtgtatttttttaataaataaaatcagtaagatcctaagataggtgtactattctgagtaggaaagtgatgtgtttgctttcatttcctcctggtgtcatcatcctttgccatcagcaatgctaccaagattggaacactgatttgaatatttcatactttaattgactatcgttctcctgtatacctacccagtttgcaatttcaggtgacagtatattttcagcttaacttatgttaattcttatcttgaactctgtggaatcgtatgacagcaggtttagggctaatattaatcacttctcatttttggcaggttgctataattattaaataggtatataaggtcaagttaaatatagtcaacatcaactttatatttgttttataacaactgtgcctcccacatagcagacacacaataaataattgataaaagaatgatggygatggcggggaggyactacataattggaagggagaagggagagaaaaatcttcctatgctattattggaaactttccaaccatgtttatgtttccattaaattaattataatcatcaaataatgaaacttatgtgggatgccctcatatatgcaatgattgtgactggttacagaagagctatagcttttatgttagaaaggaggatattttctttttttttttttttttgagacggagccttgctctgttgccacactggagtgcaatgacgcgatcttggctcaccgcaacttccacttcccagattcaagcgattctcctgcctcagcctcccaagtagctggaactacagtcgcgcgccaccacgcccagctaattttttgtgtttttagtagagacagggtttcaccgtgttacccaggatggtcttgatctcctgacttcatgatctgccccctcagcctcccaaagtgctgggattacaggcgtgagccaccacgcctggccagaaaggaggatattttctatgaagcactcattctataaaaacttgccattcttatataatgtaaatggtaaatatggcattagtgttctgcttctttctccaaagggtatttttttaaagaacccacaaatgtcatctcatctatttttaagtatagggctgctggataaacagctaaatcatctaaacccaatgggaaaattcaaagtttaaataagctattttatctcattgaaaataagtggtacagactgacacaggccatatgggtttttgcatacagttacatgtaaattttcttaactttgaatataaaattctggttgaagctgaagaaatggaaaagcaaaatataatctgtaatgacgattctttgaagattctaatttctgattctgtggtccaagtttcatcaatttccagtcaaagcctgttccttaggttatcgtgtacataatggagttgtatctttaaggtgagataatgtaaagacaacacaaattctaaaatgcagatctccagtggtcgtacatttggggttctttcacagaattcattttttaataaaagttacatatgctaattgtgaaaaaaattcaaatagtacagattgatacagggttaaaagtaaaagctccctcccccaccgtgttccagtcttatttaaccaaaggcagccatcactgttaccattttaacattcgccttctgctattttctacatatagtcaaacatacaaatatgtatatgtgtacgtacacattcacctatgtacatatatttgattatatggagtgtccattcatttggcaaatgtttaatgctcatctactgtgtgccaagctcacttccagacaccgggaacacaggattgaatcaaatcaaaactctttctttaatgaagctactttgtactatattaacatcacatgttaaagaactagtatattagcaatacatattggggaacagtattcactaccatgcattttgcttttacaaccagtgctatgattaatcatctattacataaatctttttttttttttttttttttttttgagacagagtcttgctctatctcccaggctggagtgcagtggcgcgatctcggctcactgcaagctccgcctcctgggttcacgccagtctcctgcctcagcctcctgagtagctgggactacaggtgcccgccaccacacccggctaattttttgtatttttagtagagacggagtttcaccgtgttagccaggatagtctggatctcctgacctcatgatccacccgcctcggcctcccaaagtgctgggatcacaggtgtgaaccaccacgcccggcccataaatctctataccaatttatgagttggataaattgcagaaattatttgtgtatagtcagtctttaggtaaatgttttatttgtattatcaacttctttagaaatggattctgagtttttcattgctaatcaaattaatgcaacaatagaatttttacactgtggtacttaatcttttgtaaaccaacaccttcaagtatcttaataaaggtatcaaaattttatcattcagataaattattcaggtaaatttatcattcagacaaatcattgtatccttgtagattcatctatgagaatgctccaaaaggaaatcagttcagaagtcctagtttccctctattttcattgatcacacgtgctagaaatctctgatttaaatatttcatgatacccraatgcctcccaaacaaaataattatctttttgtttgtttctgtgtaacagaagagaaaaataaaagctgtttagtaaatcaaaacaaaacagtccagatgcggtggctcacacctgtaatcccagcactttgggaggctgaggcgggcagatcacttgagggtcaggagtttgagacaagcctgggcaacatggcaaaaccccatctctaccaaaaatacaaaaattaactgggcgtggtggcatgtgcctgtggttctagctactcaggaggctgaagtggaaggattgcttgagcctgaaagatcgaggctgcagtgagctgtgattgcaccactgcactccagcctgggggagaaagtgagaccctgtcaaaaaaaaacaaggaggarggaaggaaggaaggaaggaaggaaggaaggaaggaaggaaggaaggaaggaaggaatcttataattcatagaaaattaaagaaaaaagaaaattacaccaccaatgtaatagggcacaacaaaagctactgttatttatgagattctcctttagaaagctatttgagcttctcttacttctatgcctcatgtatttattacaactgaaagcaggtcaaaatttacatccaggagcagcctcaaatggaaggaggaaagttgacagacaagtgggtgtacaaaggagaaaggtgctctcactcctctgcctcagtgatgggggggrcacctaagctgcctcccgttttccacccctgcatcccccacaagggccttcttgcccctactttgtattttctgtttcagacttcttccagtaatattgagagcatatggctggtttgggcagaaactaggaagccacataaattatttttcctgacttagaattatgttccctcctgggaaaaaaaaaaaaagaaggttctctgtggccgttccaacacaaaacattttttttttctggatgtttatctaaatccactgcaaggaaaaataacatgattcctttgtcaaatgagatatcaaaaatgaggcttaattcaatgtttttctattgattcagaattttttagtctaaacgaataattactaactggagtaggtggctaagtgcctactcgtgcagctgtagtgggtcatttgaattgcagaaagccagcatcgttactaggaggaagcatgaatatctgaaccatctcacccagcaggtcagcttgactcatcaccaaaaaggtaaagaaagaaaatgacaaaagaaagcctttctcaaatgaaatatatctgcattattactgtccatgggtagttcacagtttttgtaataggaaaaacatcatcactgaatatgaagtgtgcttgtgcgttcatgtgtgtgtgacagagagaggatactaaagactgaattccagtcaatgtcrggagacagaaggaataatggagtgtgcatgcatgggttctggttatttctatatgcaaaggtaatcatttattatcttgacgaagcattcttctctcattacagtttttaccatcaaaaggttggcatgatctaggttcttggtgtaaaatacaagatgtgacccaaacctatttgtatagatccatgtcacttacatgtctctattaccacctctcatttgcactgataacttgaatgaaacatatcctggcacaggcttgacacaaaatatgaagtttccaaaggctgagtccctcctatacacagtagccattccttcatgtttgtcttctacatgttgatatagggagatcaaaacagtttcacagaatttgttgaaaggtattcatgaagagttcagtggtgagataaatagttgcagtgtgatgaactgggaaagtgcaatgggccaaaggagatctgaattctaacccagttctgccacttattagccatataagctgtaatttacattctggatgtcaatttctttgtttgtatgtgaagaagctgacatttcccaaaggatgatttgaatagatattaatgtgaagaaaaggagttgaatttgagaaactgagtactgtattcagaattctatattggcagacatcctagaatctttaagatgctcatatggatggaaactctttaagagaacaatacagtataaagcatctcccaaaccctcttggaaccacatttcacagaacatttctaaggactggtgatccaacaaacctgcatgttctgcacatgcatcacagaacttaaagtattaaaaaaaaaaggattggtgatccataaaatgtgctttggaatacacagggtgagatgacagtcttcagattctgtttgactcgtcctgccatgatctggtgatgggtctctctgggcctagtagagttcagttgaccctgctgggggttgtggccttgcttccccaaatatctccacagcaacatccaactgcagctccttggatgccaaaagagcctctcttctggatactggtcattcataccccctctacacacatgcaccagcaacttcgtgcacggagatgtgttcctccatgatccctgtttgcccacaaccattgcgaggtttcttccctgcccttggtagaggaaaatctgggatgaaaggtgtccatactttatttctcagttgaataaaataggtacaacctgagtgatgtaattagagatttcatgagcacttttactttacartatgttgttttcttttatactctgcttagaactagaattataggaatgaatattggtctctgccagacaaatgacatcatccctcctctcaagttgcttacagattggtgggtgagactgatctataaacaaatggttttaaaacaatgtgatcagtgttacattagtagtatgtgcaagttgctacagtaaatcttgatttttttaaggttagctctatatttgttttatcaaggccgggcattatggaattctttgtctttcagaatacaaagggcttaaataaaagatgagtctataaatttcctgtttatttatttatttttgagacagagtcttgccctggttcccaggctggagtgcaatggcaagatctcggctccctgcaacctccgcctcccgggttcaaggtattcttctgcccccagcctcccgagtagctgggattgcaggcatgtgccaccacaccyggctaattttttgtatctttaatagagatggggtttcaccatgttagccaggctggtcttgaactcctgacatcgtgatccgcccacctcagcctcccaaagtgctgggattacaggtgtgagccaccacgcctggccaatttcctgtttatttaccatggtgggatgtttcaggtractgtagattttcctgttcatttgtcaacaagaaataaaaattccatgaatgactcttttgcccttaaagaacattgtcaatgaaattgacatgccaggcaccttgctaggtgctggtacagagccagtaagagtctcactttgcttacatggcctttgtgggtctcctgaacaaccagtgaggagatggtctttacactcacgtctttgacccaaaccatagttcctcagaaaatgaacggagcatatgcagctcacagctgaagagaatctgaatatcaataagcactgcagcggccctgtctgcccatcaagtctccctcccactgcctcagaagctgcccacccgaattcctgtctatatggttagttctgtgcagccacctgctgagtttagagtacccagtgcccaatcaaaccctaatctaggtgttgcagtaaagtaattgtatacacgtggttaaaatctataatcagtagactttatgtaaagaagattaccctccataatgtggatgggcctcaaccaatcagttgaaaggccttatgaccaaaaattgaggttttattgacaagattctgtctcaagactgcagaatcaactccagcctgagtttccagcctgccagaccaccctgtggatttcagacttgctactcaccacagtcatctctaaaataaatctttttttttcctgttctcttctgagaaccctgactgatccacagtcccctatacacaggcctctagagattcccccaagtgtactaaccttccccaccctccaccccctcccacccccaagctcagagagtcttggatctattgcacaatccattaagggtcagctctatcatgaatgaaacaagctttaagggtttgcaccatgtgggaacttaaccgttatttaaacatgattactatatgaaaaagcaacctacaaatacactttgaatgagttagcatgtcatatgttactttatatcatctctatctttatagtcagtctctgaagtaggtattgctgtcctcactttatgtttgaaaacctgaagttaaaagatgttcaggtaattaggccaaaatcacatgtctggtctaagtagagtcagatttgaactcaggttgacctgatgtactgtattcattgcaccatcctccttccttataagtgaaaaactacctaagtaagaattacatggtggaaaaatattttattttcttcagtgccacttttataagcattctctatagagaaggatttaaacattagctaacatttattgaggactttaccatgtacctggctcttattttaaagattctttaaatgaaatgtctgggttaaattatatatcatttctgtagttgggcatttcaaaattctaagacattgttagtactaatgattttcccagctccatcgactttgggtcatagatatttaatgaaagatttctactcccatttttaaataatcaatatttcatattgacattgaatactatgtaaattataataaaaagatgggattgttcttgaaagttttttttttwaaggttttgttttgtctttttgkccttttttttttttttttttttttttgagatagagtcttgctctgtcacccaggctggagtgcagtggcctgatcacaactcactggagccttcagctcctaggctcaggagatcctctcacctcagcctcccaagtagctaggactacaggcacatgcctccacacccaactaatatttaaatagtttgttgaaatgaggtcttgctctgttgcccaggctgatctcaaacacctgggctcaagcaagcctcccgcctcagcctcccaacgtgttgggattacaggcgtgagccactgtgcctggcctgtcttgtttttaaaaatgttttgaacaccactgcccctggcccccagaggctgatgtacaagaacatgaaaaagcattcaaacttcaggattcttgccctaactttgcacatgtgataacccagatgatggactcacttcatctgggctgtcatctccaaccctggctggtgttttgtctgactcttggctacacagggacctctttaaaaagacatgcaggtctgtgtttattctgaagacacagaggttttaagaaatattcttctacacgactacaatcagtacagaagtacaatcagtaaaagtaaaggtaactaaagaccaaggagcccaattcaagaagtattactttagggtctcaaaactattcatttggcaagcatctattaagtacttgctttatagaaggtacttgagaaggaatgaagatgaataacagtgtctctctgattaataatgaatgtggcagagcactgtggcagacactctaacagtagtgcttttctaagcaatggtagcaactaattagtggtagtgaaatcaatttaatgggtcacaaacaccattatttttaattaaatagaatacaacagaagagaatgaaaataaagacagtgtgtggcatgccaaaaggttaagtatttctctctgtctttcacttgtatacgtgcttatactggtttccaaagtaagatgtatttcttgctgtgagatgtagccaaaagctatttaaaagccactgctgtagagagagagagaaaaagaagaaaacaaaagccttgctctcaagaagtttgcatcttgctgggaagataaagctattcatgaacagcagaatcctttgtctatggcaactgagactaagagataaaattaacgttgctgacttagtgtcccatgggattaagatcacgggaagaagtcaatgtgacagtacgttactcctttctctttgaaaaacttttttcactcagcttccaggaccgacaacacaccctttgttgatcgttttaagcctgcctagtttgtggtttcttagctccaaacttctaagggtggagcaatgctgagtggacatggctcttggaccatttctctcttctaccaacactcactccttaggtcacctccttcattctcagagctctaagtcccaggtgtatgcccacagggatgtttgcagccaccctgaagccccagtcttagatagtaagctaccctattcaacatctctgcttagatgacccatgggcatttcaaacttcctacatcccaaactgaactcctaatttccatcctgagtctactccttctttaggccttgtcatctcagctaatgggaattcagtccttccagctgatcaggtcaaaaaccttggagtcgcccttaactactgtttctcagtccacacatccagatcatcgttagcaaacctcttggccctatcttctccctccaccgctgctctgccctggctcctcccctttagctacaatctaggttattgcatgagcctccaagggtctctgattctactcttgttgcccttgagccattctcaacttagcaacctgcgtgattctcttgaactagaatgtgtctgtatctcatcaaagcctccattctactcccatctcaccccaagtacatgccacagcccttaccacagcctgtaaagcctcctgaaatggacccccacactccccaaatcactgtcctcaccttctgccacctctcactccactccactcacctggcctcccgctgtgtgcatggcagtcctgccctttcttcaggactttctcatctgtgcttctttgtgccttgagcactctgccaccagaccccagggcagagtccctgactccagtcagtcggtacctagaggtctcttaatgtagcctgcgatgatgccactattaacatgcctatcccaccacccacctctcctccacacagtcttccccctttcctgctttcatttttccatagtacgtatcattgcctaacatacattttgcccattttattagtgtctgtcctttcccttcctcatgacagcagagctttattttttaactttagattcagggcatacatgtgcaggcttgttacgtggatagattgcataacactgagatttgggcttctattgaactcatcatccaaataatgaacatagtactcagtagatagtttttcaacccttgcccttcaccatcccctcttttggagtcctcagtgtctactgttgccatctttatgtctgtgtgtagtcatcgtttagctcccacttacaagtgagaacaggcagtatttggttttccgtttctgcatgaattcatttaggataatggcttccagctgcatttgtgttgctgcaaaggacatgattttgttctttttttatggctgcatagtattccatagtgtatatgtaccacattttctttatccaacctacgattgatgagcacctaggttgattccatgactttagtatagtttaatagggctgtgatcaacatgtgagtgcaggtgtatttttggtagagtgctttattttcctatatatactcagtactatgattgctgggtcaaatggtagttctatttttagttctttgaggaacggagatttttttctctgcctgtgaattgcggtatccccagtacctaaaatagcacctgtttcatgatacagtcctctctatgtatccatcagttctgcatctgtggatttaaccaaccatgggtcaaaaatatttggaaaaaaaatccacaaaattgcacaaaacaaaacttgaatttgctgaaccctgagtactatgttgaatccacacaaatgaagtgatgtgcaggcattgtatttggtattacaaggaatgtagagatgatttaaagtatatgggaagataatgcataggttatatgcaaatactacaccattttatatcaggaagttaagcatccacggattttggtatcctggaaccagtcccccacagataccataggatgactgtatatactcaataaatatgtgttgaacaagtgaatgaatacttctaaagcattttgataaagtcacagaagaagtggaacttttaactccagcttaaccacaaagtaatcagtttaaagtgaaagaagagaaccctgtaatgaatactccagttggaacatttcctttcaatggaccttgagctagcctggaagcactgatttggataactattragtgtatcatactcatctgtacacatgtttgtgggacatcctctgttcattatagatatcttgctgcctgtggaaagtagattgaaacgtagcttaaagtacacaccctcaagaggcaacttccctgtatgatgattatgaaagtggaattttgaatcacacatgtgcatgaggacaccaaaatattattcagttattttcccgatctcaagaactagatgcatgtggtttgacggtttcattgcattagaatggatgggattcaggaaggaaagattattttggcccrtttgaatgccgtatgctttcaggtgttataaatgtagcttggaataaaaagtccaaacagccccaagatgcagtgggaatcagatgatgatgacgagaagcaggaggctctgagttgtgtctcttcttaaatctattgagatttttctttgtttataaatgtcaaatatgtaagttaatgattcacaagtaagcctcatttaagaaacttaatatttcaaaattgataatagactaaaggaaaatatttgccgaaaccttttttaaaatttttaattttaaaattaagtattaatacttgagatgattgacttgatattttatagactctagctatactatttgttaataataacattatcagattttgtgtcctaaggaaaaaattaatatacaagtttgacaagtagttgggtgtgtatagcaacagacagatgtgctgagaggtttatgtgattttagacaacaccaaggattagtgttgatgaatgatgtttccacatgtgggcttctattggcagcaagaggaaggtcactaatcttctacccacatctctgcttctgaacaccagacacaaaattctagtttgcctcagggaattcaatgtttgcaactaggaattatagccacaaacatcataggatatggtggatagacaccagcacactagtaactataacaataatggaaagctatgatggctcaactaacaattccaagccaacagatatgcctccaatacaccagaaaatgaagttatcttaaaaactaaaaaggggctytaagttagcttatctcctatatagtcagtggaaaaaatatatttaccatagacctagacctctatttttttttttttttttttttttttttttgagagggagtctcactctgtcacccaggctggaatgtartggtaccatcttggctcattgcaacctccacctcccaggttcaagcaattctcctgcctcagcctcctgagtagctgggattacaggtgccagccaccaagcctggctaatttttctatttttagtatagacagggttttaccatgttggccaggctggtctcaaactcctgacctcaggtgatctgcccgcctcggcctcccaaagtgctgggccaagcatctaacactcagtacttgttacaagttccaaaatgctatgggattgtatctctcagcaacttaacacttgaattttaggtttaatagaaaattactataacaaagttttgaaactcttatagacagcagcctggtgtgaagaagagtgtagaaatttgagtaagacaaacctgtctttcaattctgacaagctgtaacatttggtctaagttatttaataccactaagtctcaattttttcatcattgcaatggcattaagataacataaggtttttgtattacgtgaaattatgtttgtgtattagatgttataaaatggctaccgacaagtcctaaggtcacatgcatccctattaatatattcagtgagagaggaggtatctttgtcctggcatttcatgcacaggtccagagatgcttgctgactgagtaagcttagatcattcacctctgccctgagccaagcaatgaagccaggaagtgtgatttgctgattgtcctaccccaactcttgggctactcctgaaatacatggacctcgaattgaggagaaagcttttcccaaagcaaaatcaggaggcttggctacaagaaccagaagtggaactgggatagctaaacctatacgtattcactaccgtcaaaatagtgggtgaataattaataaaattcatttcccttcctgtccctacatcatactagaatcttaatatcttgtctcactgtgttgcccaggctggtcttgaactcctggattcaagtgatcctctcacctcagcctcccaagtagctgggactacaggtgcattctaccacrcccagcatcttagttattatttcttgatgtgatatcacgagagtgtcttatccacagttagtgccccttttgatgtcatccagcacctcagtaacattttctactagtccccaaaggcccatggctccccaatcccttggggactgcagacctaggccctctgccattcccctgcagggctatttatcagtggcatttgcacttcacacacatatgttcaatttttaaggaacagtttcatcaccaggaaaggggatttatgggaacaagcttcaaacccagtaggaaattcagaggtactgagatttaatactcgactcagcttgacttacttaaagctgctctttactcgtttccttcctccaccctccagattcaccagatccactcaaaacttataaactcctttaacaccagagactgtgttttataaaatgcttttggtgtatttacccagcccctgctatggtgctgggtaccctgcagatactgtaaatgtttgtgggtaagaataattctacagggtcatggtaagcaaattaccgtatgtatcactgtttacaatgttctattctttcaagatcatttaaaaatgttatttggaagagctgtgacaaagggtataaattctatttaaagaggtaggtatttactcttatccttaaaaggtaattttaagcaatctaaaacaaattaagttttccaccaatttcgggcttccaggggagtaagaaagggcggttgccagggaaatcttctcctgattgggaagcaacaatcatgcctagggatctgcacattgcataattgtaattttcctattcttgctcttttttttttttttttctgtttttgctatgagaagagcaagctaaaaaggctaaagggacatttaagccaagtcgcatttgtcaaggtgaaagctgtgtggagcagaaaagcagttctcccagctgcaaagaagatgcaaagaaatcgagtgagtagggaatctgagagcccactaaaagtgcttagaaggccaacacattacagccatttctctaaaaagttgtaggcaggaacctaaagtccagggtggagccttcttacaaatgctaaaacgctgttgggatgcttcaaggctcccaagccacccttaaaggtgtggctgtcctgcaagttttctaatcacccactccctcctccaaactgttcatgcttgtttaaacagcagctgcaaacaatacttggtaaggcagccccagaccaggaaacaacaacactctttcacttcagaattaagtgtttattattttgaaccctcttttagcagtgctagaaaattagtgacacgagaacgtttatgcttatttgaatggttacattttattttaaaaaccacgactgttgagtgggagcgtgcaccccattctcttcttctttttttttagtttattggttcattcacttaatcatcacggattcatcagaggcaaggtaatattattaaaagctttgatgtcagacaaatgcacatttctaccaattattatgaccttgggcaagtcgtttcatctttttttttttttttttttttttttgacacagagtctcactctgtcggccagctggagagtggtggcaccatcatagctcactgcagcctcaaactcttgggctcaagcaatcctcttgtctcagcctcccaaatagctaggactataggcacataccaccaccacaccagctacatttaaaaaattattttgtagagatggggtcttgctatgttgcctaggccggtctcaaactcctggaatcaagtgatcctcctgccttggcctcccaaagtgctaggattacaggcatgagccattgcattttacctttttgaatctcaattttgaagcagtaagatggaaatagtaatgcctatttcatacaactgttgcaaagattaaaataaagtaacataggcactgcccctagctcattgagattattccataattgtcagattttttcatgaatgtcagatgcctaactctcctttttgaatctcaattttgaagcagtaagatggaaatagtaatgcctattctatacaactgctgcaaagattaamataaagtaacataggcactgcccctagctcattgagattattccataattgtcagattttttcatgaatgtcagatgcccaactctcctttcataatgtacatttttctcctcctatttaccattccttttcaagcacaggaaagtcaaacaggttgatccctaagtcactgccaagcacccttatttacctggctgctgtcattgaaataccttgtgcttgggaaggaatcaacagctgctgaggggtaactgtgcaaatagaagcctatccctcatgcccaccattcaattgctacttttccttgctctactgcctttgttttcaccaaatcaaccaaatgcctaggttccttcctcccagttctttggttcctgatgaaatagaactttgctttaygtactcacagccttgggttcatcagttttcctcccaaatctctgcaacccagaatagctcacagaatcgcacaggcctgcccttgtatattttcaggacatatgcttcatttcagctgtcccggctttctaagtgtcttcattccttttgtggctctcagatttcccaaaatctcacgcattctcattactccacacctcaccatgcaacttcccatcctgagataatccgctctcaaagagtcacgtgcacatggcttcatctctcaatcatcgtctcacagaccatcattggcacagactgtaatctatttagctacactttgataactgcagcccagccaaagtggggcactcaagctagatgcccttggggagagacttttaaaactaagcgttcctacatctgatagagtagttcttgtaacttttctttcaaagggttgtaacccactatttgtttattaattttttccttcaaacagaccttaaaacactatgatattattttcttatctaaaatatgtgctttgtagtttatcaaaaaataacaattgttacccaaaagacatgtcaaaagacatatatgaatatgctagaagggggcgggggagattcctgaactgtgaatggcagacctcagcttgggcagtgtcaccctacactagttactaatctctcctgacctcagtttctctatttgacaaactgaggttataatatttactcttcatatccttcatgatagttgtaaggatcataagacattatgtgaacttatgtttttttccaaactcatgacatgataaatgtaattgcttatattaatttggtcattactaaatatgaacattaagttcaacaattactatcccagaataaattcatttcttgtttttcttctcatacatatttttaaaaggtttttaattgattctaagagccatagtttacacgttttagcattttggatattgggataaattatatattctatggagtgtcagaatttattgatgatgtttatttctttcttagtgacacaaaaaatgttgggacaattgcattagtatcttagattcagtaaaatgcgcagtggcacgatctcagctcactgcaacctccgcctcccaggttcaagcgattctcctgcttcagcctcctgaatagctgggattacaggcacccaccatcacgcctggctaattttttgtatttttagtagagacggggttttatatgttggccaggctggacttgaactccttgcctcatgatctgcccgtctcggcctcccaaagtgctggaattacaggcatgagccaccgcgtccggccgtgtgttcctctttcaactgagtttaggaaaacctaaagtggggggaaatgtcagcaccaaaagatactccacttccagcagagcccatccttcagtgcagtgacatcatttcaattcagaaagcattctcatcctggctgggcacggtggctcacccctgtaatcccagcactttgggaggccgagkcaggcagatcatgaggtcaggagtttgagaccagcctggccaacatggcaaaaccccaatcctactaaaaatacaaaaattagccaggcatggtggcgggcatctgtagtcccatctactagggaggcaggagaatctcttgaacccaggaggcaggggttgcagtgagctaagatcgtgccactgcactccagtcttggtgacagagcgagacaccacctcaaaaaaaaaaaggtattgaaatagttctttcaatatgttcaagagcagcctggccaacatggcaaaatcctgtctctactagcaatacaaaaagtagctgggcatggtggcacaggcctataattctagctactcaagaagctgaggcaagagaatcgcttgaacctgggaggtggaggttgcagtgagctaagatcacgccactgcactccagctcaggcaacagagcaagaccctgtctcaaaaaaaaaaaaaaaaaaaaaaaccatccctacatccctatcctgtaattagaggatgttagcacttgattatggccatttcttagtcaagggcaggtcttccagttttctgaatgataacatatggtttcagttatagacgggctaccactgaaatagacaatgcacactaatcctcattttgtttcatcaaaaattaagatctctgttggagtgctaatgcttaaacataataattaaaaagcaattaatccttttttctcatccataactactataaaatctaacctgtattagtttgcttttattattatttgtttatgtttgttgagtccaaccccctcctaagctggtgcacacaagcagggcatcccaccagcctgaaatcaatgaggacctgcactctttgtctctgctccagctttccttctaccaagacttccagctcctgaaactgccaccacagtaataacgcaggcttttcagagacagctgcaaggttatctttttctttggattttcctaaatcttttctctctgtgcagctgaaatggaaagacacagcaacctctgcccagctcacaatagcagctgcagccatgtaattctccctttctttacaatcaaaaggcagtaacatttcactctttgggcctggtatgcttaycactttatatgctttcttctaaaactatctacctaagcaatgtctcccttttgctttagggtttaagaaacaaaaactaaaaactgactygattatatcgatgttaatggcccttacagttcagcagttgtgtttttcttctccaargtctcgattttctgtctttacactttccctagaryggattactgtattattttatgtgtaatcttgttgtatgctacctttaggtatataaataatgtattactattcaaattccactccaatggaagtcacttccacataacttcttagctgctatcatttgaaaagtaagattaattgaaagatacacaggttaaatacttctcagctggttccctaaacaacagttacagactgtttctagtatgagcccaaatttctaccataaactaactttgaaaaaaatatctgaacaaaatttgccatgttttgttgcataagccatatgagctaatcagtttgtcattagtctctgacatactccagagagcawtgcttatgaacttcacatcaggattgagaaatagcaagtgtggtgtgcrtcatctatgaccctcagctgtaccaagttaatttttaaaatgtaattgctaaacctataatgaggctctgaagatgatcatatctatgcagtgagtcacctgccaatgcaaggaaaacaagactgttctcagcatttataatttcctgagaaatctttgttgctgtggtgattttgatgcttttacctacaaaagtaaaaacattacattgttactagcataattaataaatgacaagtgtatcaaatgtgatgagcacaaaggtgtccgggactataattgctcagttctgcaggtgccacaaagcacagcctagaaagacaaggagcattaaacagtggtcaagatatggccctaggaactgcctcattgaaactcagccccttcttagctgtaactctgagtgagctacataactttagtgtcctcatttgtaaaatgggaataataataataccacccctccgctgtgtggatcaaatgagctgacatttaaaaagcacttagaacagtgcctgcacacaggagcacaatataagaatttattaaataaaatgaacatgctgcagggtgatgcttcatcttggttagtacttttcagaattagaacctacaaaccactgttttcaagaccatgaatagtagcatctcttcaatctgaagttcttagatctaaactttccagttatacaggtgaattaacaattaaaaaggaaagaattatgctcttttagtagaacatctattctcacttccttagaacctataatatttagaaatctgtgtctgatatgtgtgtgtgctattgtggacaattttcttaacactttaggtttcaaagtgacataaatcataaaattttgattaatataattttgatcttaggagttaaacacctcgaaccctagtgctgccgttttagctgtgtgtcctttggcaagttactcaccttctctgacctcctgcttctcacctgagaaaaacagaaaaatatgcacaggttgttgtattgatgaaatgagatcttataggcaatttttttttagcacagttaaatgttaataatgaagtaccatgttgattttaatggataagcagtaaatagttaacatcaaaatattaaaagcctttttattttctcattgcaaacctggccaattccagggagcctttcctggatcctcctttcccatcaccattactgctaactctcgtttctcttctcgtctctgttataaatatgttgagggcaagaaccagcctccccgttttttggtctcttttacttaagccttgtgcagtgctctgtccactatagtatgtttgctatgttacttcttaatgaataaaaagagtggttattatgcattttttttcacgtcatgaaaaatgaagaaggaatgagatctaggttgagttcatgttgaagtggaaaatctaagaggaactgaagagaaagtcatgaagatggcttctaaaacgtagtgcagtgctctgctgaactcagaaaaaatgactgtggaaagaaaaaagaagagcagtgcactgacaatatgattttgttgtggtatccacagttagggacttagagtaggatccagcaaagcaaaaggaaaggaacaattcagacaagtagtagctacaccaggtaagtcaagcaatcagaaggccaaaaggggagaaacttgcaaagaggtgttatttgtgtgtatgtgtgtgcacgggtgtgcagaggccaagaaaaaataaaagcaagaaaatgccattatcttccattaggagatcattggaaacctttagagagtgctttaagcagatctaaggaagctgaatccaaattaagaaagattcagaaagaataagtgactggggagtaaatgcagctggtagagaccactggtttaggaagaagacagactggatatgagatggtaaagtcgaaaggttcaaggaaggcatagatcaatcagtaaacattcccgaatcttaaatggcaattgaaaacaaatcactgaaaagctcaaataaaattgctctcctttcaaatggcattcttatgcctgactcaactattatcagcatgagaaaactgagatgtacaaatgattcaaagccaatggttttaatttwtcctactacatgagtcatgttaaagactgagagacgtggatttgtacatattcaaaatatttatgagcctattacaataaaatattgttattgaaaggttaatgtctaaagtttcagataattatattaccaatatccagcaccataccaaaaaaagaaaatacttggtcttatttatacatttttaaataactaagacgataattggaatgtttgtaacacaaagaaatgacaaatgcttgaggtgatggataccccatttaccctgatgtgattattacacatcgtatgcttgtatcaaaatagctcatgtactctataaatatatacacttactacgtactcataaaaattagaaatgttagcctgtaatcccagcactttgggaggccgaggcgggcagatcacgaggtcaggagattaagaccatcctggctaacacggtgaaaccccgtctctactgaaaatacaaataattagccaggcgtggtggcaggtgcctgtagtcccagctactcaggaggctgaggcaggagaacggcatgaacccaggaagcagagcttgcagtgagccaagattgcaccactgcactccagtctgggcgacaaagcaagaccccatctcaaaaaaaaaaaaaaaaaatagaaatgttaaatctaaaaaaaaagaaaaagaaaagaaaaaggtaggcttttataaaaagtgatttatctgttttctatctgaataggttccacaagatgaatggacagggtacaccccacgaggtaaagatgatgaaattccatgccgaagaatgcggagtggcagttatatcaaggccatgggggatgaagacagtggagactcagacacsagtcctaagccttctccaaaagttgctgcgcggagagaaagctatctcaaggctactcagccatcccttacagaactcaccacactcaagtgagtagtcctaaccctgcacttgcgatagtccaggtgcttgtattatcaccgaggctcagatggtgtgtctcctagagtaagtggggcagaaacatcctacaggtggagcagtgcagtacattgattgtgactttagatctgacgtccgtaccccagtccctttgtagagagaggcaacagatgtgttctgcattgatcataagctgaacccctcatctctaagaagcagaagaaatcccatcttttcagaagccattctggatttaaaagaatccagaatggcttctgaaaaggattraaatttctggtcaatgagaatatacatgtatcccaattcttgaacgtttgctcaggcacgaagtacacacaagaactttttcttaagactcttgaatttttcagataattgagyaacataatagaagagattgtcttagagaagcttatagagtgtgaccgtgctttaaaattggatatgtgaaggttcttgacatacatttttaaatttgggcactcgatatgtattacaattgaaggccttaaaaaggttttgttttgcaaatataaatatagtcatacatcatttaaggayggagctacattctgagaaatgcatcattaagcgatttcactgtgcacacatcatagagtacacttacaaaaacttagatggtctagcctattacacacttaggctatatggagtggcctattgctcctaagttgcaaacctatacagcaaattactgtactgaatgctgtgggcgactctcacacaatggtaagtatttgtttatgtaaatatatccaaacatagaaaaatacagtaaaaacacagtattataatcttatgggacaaccatattatatgcatcattaactgaaatgtcgttgtgcagcatatgactgtagtccttaactgtatttgtgctgtttgtaaacaaagaatagcgctacgcaggaaaccactgagattgattattttaagcaagacctgatttcattctaaatgctgtttatagagagtaaattctttagagtcttggaatgtagaaatagatagaattccatttggacctgaaaaatatattacggataattcgtatttttaagtgcctttgattccatattttgatgaaatgaacattactattcatgcatttatgttactaaataaaatattaaaaggcaaaataaaacaaaaaatcaaagcagtcgagttaaggaaaacaaacccaattgttaatcaagagcactgaaaaacagctgactattgtgcgatgggaatttatttaaatagcagagtatgttgtattttaaagatccggacagagacggcctcccatgaattatttttcaagggttcatgtggaacaattctggatcattttaatcaaaaattaataccagtgcatcagtaaattaagccaagaaaaaaacctcttccttctttctttggcttccagttgcccttcctctttgcctttattactacatgtgttacttttcaagaatcatcagaacaaactaccacaaacttggtggcttgattagatctacaaagactctatttccagataaggtcacattcaccgatagtaggagttaggacttcaatatatctatttggagaacagaattggacccaaaacattgccacacaaggtaaaaaaaaaaaaaaattcgtggaaataaaaaacagaaacaagtcttcattgcactttggcgcgcctagcagaagctcagaaaattaaattagaagaactggatttgtaagaaaggcagtggaccaaggtgacatgaaatgagggaggccaaggacccttctgaaaaaaaaattcttctatggaccttaaaatatctctccactagacacaatgttaggtagtcatggccatagggttaacatcttccagaagatgcaagaaaaggattgcaatgggcaagaaagtcacttaaaccggcaacctccagagtcctttccacctcctaagtatcccgttaggttgtcatcaagatgcattggtcacattcactgagtgacactttgggtcttgggtgataagatagaggaattgctcttgtccacagcaatacccaggtaagaggaraacagaaagatgtagagccatgaggaagatgagaagagtgctctgaggagactgaggacagggctagagggtaggggctgaaatcaatgtcacaattgtgccctgggctactctcatagcttcaggatgtggaggatcactctgaagtcattgaaactctttctttctcatttgccttcttcacaatatgaccctcctccaacgtcctggaccgtatttttgtgaccaccatatatttcttttactgctcagaagttttcagagcagaaagaggcaaacatgcagatgacagctaggctgatggtagagggtcagctccttcagacggtgaagttgttgaactgggtatgagttagtgactgctatttcatccctccccacttacagaaattcaaagtggtgataaatggacaggagaacacctactaaattgaaaacattttacttaggatggagtttccccacaccatttctgttgtcccctgttctttggcaggaaagagaacttttttttcctatgtttatgtaagacggatagtgtgccaacatcataacaaggtttgaaggaagcacatctcatatattactgtgaaaactcaatcattatgattatgatccacaaaaggatcacaagagaaccttagacaaccattcaaacatatcttccttccctgtgctaccatcacatcccctagaatcatttctcatagttccacttacctccattcgtttcacactcacctattttatgagttccctttgtcattacagtctacacattaaacctccgtcatcttcaactgcatacaattgttagtgacctctagtttaaccagattggcctggcacggtggcttacacctgtaatcccagcactttgggaggccaaggtgggcagattgcttgggcccaggagttcgagaccagcctgggcaacatggcaaaaccttgtctctacaaaaactacaaaaattagctgggtgtggcggcgtrcacctgtagtcccagctactcgggaggctgaggtgggaggatcatttgaacccaggaagtcaaggctgcagtgagccatgattgagccattgcaccccagcctgggcaacagagagagaccctgtctcaaaattaattaattaattaatagtttaaccagattgaaagagatacaaaagaaaaaaaggaaaatacactatagaggcaaaaattcagacatgacatgactcataatcaattctgtctttcattccttgatgatgttttgactgcagatcattatttttctagaagtttgaaggattcagtcccttatgagaaaaaagatccctatatcctggaattctagttcctcaaaaaagaaaactatatttatgttcctacttctttgacatttaagtcgatttttttttccctccttcctcctcagtaattcacagctttagggatgaatcatagccctgaaccaagataactaaaattaggcaagtgagattggggcaacattttgtttaaggttttcaactcccatcttctctcagaaatgttgaagagaaggcactcctacactttcttacattgtttttctcttttcttttctattttccgaaggcatcttgagggtttatttatgtgggtggtttttcatcagctgcttagtgttagttattgggtcctcagacatataaggcctaaggtcagttaaacattctggtgttaggagtagttttgagacaatgaagtccatctttgggccagcaaaacccctcctgtagctactcttggaaaactattatttcggtcactctcttctcttatcccacagctattaacaaatcactccacctcatcactagcttttccttcttccttacttattagctaacaataaatttgaaatggcgtatcacccaagaatattagcattttcaaaaaaattctgaatgtttaatagtaaatttccaggcaagtagaggagacatttaggggccagagttccctcaaagcatgttgttgcagcctggcactgatgaagaacttaagtctcttacttggagtgccatttattctagaactgagactactgcctgctaccatgattagttaaaaccaagtccaaatcccatctgggacttttatttgatacactgcagaaagaactttttaaaaattatattaagtggggtgtcatttaaaagattctgaagttaaattcaaatatctgttaatcctacatgaataatagtttaaagtgtcttaatacttcatctctttatccaagcactaagaaaaattctccccctggaagaaatagtcagtctataatattacagattttgaaactcctctgaaactggggagaaggattccaggctgttgcaagagagccagtcagagctcctagcaattttgataaagtgtctaacaaaaggcttcaggaagatttattttcagttctaaatgccttgaaggcaaatcatttttcattttcaggatggttaatcctcttaatcttcatttttccccctggccctgaacctttgtttgtttgtttgttttagataaattggaaaaatttaaatttaaatttggaaaaatactaagtagctgtgtgccttttggcaaattgattaatgtctctgaacctcctcgtaaatgagagtctcagtctcttagcrtggatggcaccacttgggcggctctccctacaactcctcccaccccaaacctgtggaagacagcattagccaatcccagcattgatggattccatcaccctacccattgagaacagactgagcccctgaaccagtctcaatgcagtgctccagccaccatgattcatcgatccgagatgcccacaggtgctatccttagtctacaggaaatgtctcccaggaacctttcagcactgacgtgtataattgtaagaacaaggcacagtagagtagtggttcacagtttaaagacaaaaggaagtagtattggtaaagaaaataatttgagaagaggtagatggagtgttcttcttcaactttaattctggatattttaaatgcattgatttctacgtgaggagcccaaaaccatagcctcttgctggagtctcttttgttgttgttgttgtttatcttgtatacgttttttgctccccttttctcctcctggacatgctgtgtccttgcctgttcctcacgtcatacactcccctcctacctacctactgctcctcgttttccttttcttgttagagaaagagggggatgggatgaagattggagcatcgctattttttccccaaagatatgaactgtattgggaacatagcaatttgtatcatcccatctctgttctaagtagtatgaaatgtctctgttttgcctaaatgcttttttgttcctctcctacctgttcctccgtatcattgtaacgtataatagcaaatgctcctcacaaagtagggagaacaagaaaatacaacctgccacacgaaattgtgaatttacgtcctcagtgatcagtgatataaacccagggtagtgtcccattcttccctgactataatactttcttctattatcctctatacttctaactccccactcccactttccaatataataagaaacgcgacctgactataatactttcttctattatcctctatacttctaactccccactcccactttccaatataataagaaacgcgacacgtttaaaacagggaaagtcattcttgctcacagaaaaattatcacttgctcatctacaaattatctaaatacctttcaaatatttgttagaaatcagctttatttaaaaaagaaaaaaacagctaatacaagcaatcgcctattacattgagtcccagatcaccactcctagtttttaaaaaaatgttccttcattgggatatgaatgccctcctccaaatgatgtgggcatgtgtgagtattgtagtctgtaccaaatcctggtttcttgctatataattactctttagaaaagcctgtgttgaaaggaagcctgtgttgaaaggaagcctgcgtagactgaaaagtctctacaatgatcatgactatagagaggagagaactccttgtgtgcctttaaaggaggcaaaagaataaaagaaagtcccgatacttttctagagagaaggaatgagacatttttaaaagttargagtcagggattgggggagggagagagcatcaggataaatagctaatgcatgctgggcttaatacctaggtgatgggttgataggtgcagcaaaccaccagtgcacacgtttacctatgtaacaaacctgcacatcctgtacacgtatcccaaaacttaaaataatttttttttaagtaggagggatatttacattttracaaggttctaagtgcctgactgagtgctacgggctttacatacgtgttttcttttgatcatcagaactctatgcatgcaattttgcccattttacaaatgacaaatttccatctcagagagattaaataacttttttaaggttacctatcaatcaaatgtcagagctaagatttgagcccaggtgttgaaaccagaaaagataaaaagctggayggaaagttgaacttactaagactgcagtgatgagctatttaaaagatgtttaataatggaggggaaaggaagatcaactgggtgtggacaactgagaagtggtacccaggaaaaacagacattcaaaacagattgtgagagtgaagcatggatttgaaggggcgtcagaagcctgcagtgaagtgagttctgagtcgcaagtgtaaacatcagacatgcagctgaaacaggaaggatcttgagaacatcttgactcaggcttagcctcaggtgcaggaaagaaggaccaatgaccaaaggatcagagctgcagaaggcgctggctgacagaggacacaggaagaagggacggactcttaggagcctgggttcagctctgtggagactaatacaataatgaatcctgggccttctctgttctgtggcttaccatgtgtaacctgaaccttcttcaaaggatggcagaccaggtttgcacccttgacagctggcttcaaggggctgtgtaaacaaagccctaagacagcagagggaggggagcagggaaggccctggctaaggtttctggcaacaaagactcctcacttcctttaggtagtgctgatcagagatgctgcccactgtccttccaggacggcttctctttgcagagagcctcaaaattccttcgtcttttctgtctgccacctgccatttattcaatttaatatctatgttcccgttaaagtgcagacaacgaggtaaagagaacaccctaattacaatcacaaattatattcatgcaatcactcactcactcatttattcatgcaacaaacatttggtacctttaataatttaagtactgtgtccatcatttataccttggtttcaatattcactaaatgctttactaaaatctggttttccagagtcaagtggaagagaaaaatacacacagacacatacacacacacgagtctaagaatggcaaaagcaggcactacaaagaagaaaggaacttaaaattcagaggctggcggtgttaaaattgatagttttggtcaaaattattttctgatgagaaaaatctgcattgcctggcataagaaaggattgtggttttttgtttctttttgtttttgttttgttttgtttacaggttactattttgtcagcatagttcgttattagctttacttttgctgtatcatttattattaaagaaattcttcttatgcatgcagatggaagacattttgcaggaatgagaaaagcttctttaaaaggaagcctaggtggacatattaggagctgcctctaatcctttttagaagcaagctgggtgtaagtcctaaataaatgtatctttacagaagatgcatttgaaatagcaacatcatcaacattcctatctataaaccaggaggaaatgagatcaaaattgcagcccaaggaattcaggttagctgcaaggaggaacttctaagtgcaaagttattaattatcacatcaattaatttggaaattgttagagaaaacttccaaggcctcttttgaaacaagctgagttatattcctctgagacctttgataattctgcctgagcaagacagacaaaatatctatataagatctttacagcctaaagagtctaagactttagcataagatctgcaccatcgtctgatcatgtgcattgatcctgtattttcaagctcagcattcaggaagaagagatttcaaagcacccacataacacagtactccctaaatatatcacttctcttcctgacacttccctttctatcagtggaatgaccattttttaaatacagtcttgaaactttgcaactcacctcttacctcttccagctttactatttttcacttgagtgattgcaatggaccaatttgtattgacgcccccagcctctctctgctccaactccttctctaagactttctaccaggttgctaaaaaattatctctgaatcccatgttgtctaggcacaaagttccaaatgtaacattcaaaagtgtcacagtaagacwccattctcctttgagatcttctttcctgctattcccttacaagcacagaacacttgtatgggaagtaacatcacgccacttcaacaagccactggttgttcaagggtaattatgcagattcgagaaggtgcagtgtatgtggcgcacttagcacagtccctggcacacagtagttgctccacatatgttagctatcrccatcattattatcagttttggccacctactatgtgctaagcattgggatatattatagtagtcaggattcccagtacaacagaacttgcgatctaatgggggagaagatgagaagaaagtctccattcttttaaatcttcttctcaaatttaacctctggctgtcagccattatttcttcctcctaagaattcccgaagcactgtgttaacatttctcaaggtaatatagctttcttaagcactggtttattttctctgtccctcgtgtaggaagagattcaatgctatctgaaagaatgtttttgaagcacttggcacagagtcgtcatcccagaggggatgttgaacaaatgctaacgcatcattacacaatccctctatgcctaaagtgccctgaacagtaccctccatgagtaactttaatgcgcagtggttgagttgagctgccatctaacatctgcccagcatcctttcactgcgtctgtgttctcttcaattcttccccctccctctgcttctgaatctgtggttctctgaaaagctccctgttccttctcaaccctactttgcattgccagcccacctggaggctgggagctcagtctggcaggtacacattagcatgttaaaaatatccacgcagccatccctagtattgttatccactttgaatattagcgtatttccttcagttcatctggggaatcccagttccttctagttctatgagggggcagggagcaccagcattaactagtccttttgaagttgggaagggtgttcttcaatgatcacattaactactgcaacattctttaaaaattatctgtggctgggcttggtggcccatgcctgtaatcccagcactttgggaggccagggcaggcagatcacttgaggccaggagctcaagaccagcctgaccaatatggcaaaaccccatttctactaaaaatacaaamattagctgggtgtggtggcgtgcgcctgtgatcccagctactcaggaggctgagtcacttgaactcgggaggcagaggttgcagtgaaccaagatcttgccactgtaccctagcctggccgacagagccagactgtctcaaaaaaaattatatatatatatatatatatatatatatatatatatatatatatatgaacctacataaaccaatgaagagaaaatatcatctatcctgatagctagtaatattttaattttcttcctattgtttaacataaataagtataaataacagtcatcaaatgtttttagtacatatgataagatcctcccaacggtgtcagaaggaatttcgagttgatttttaaccaacactttactgatacaccaaggctttctcatggttgtgagcctcacgaggcagagcctgggtcttcggctccagccctctactttctctccaacttctttcctcccactgactcatgaaactctgaggacttttccctgaacagtctggagactgtttccaccatctgtacattgttcttgacttacagctcagaaccttcttttagttctttggaccacacctctttcccagaaaaggcagagctgagagctctcggaacagatccaaattaccaactgcatataaaattgccaccacctcggtagcatcattcctgtgccagattccaaaagagatggacactgctgtgggtacaagtgcctgagaagactggcctcctcctggggtttgtgccttcagagcctgggtttgaaaagccaagctgggagcactttccattgtcgtcgccttctccactcagtgaagaaagattgtgttggagttttagagtgagagaagctggagacgaagctagctggctgtgctcatctagcctgaggctgcatttcttcattgaaaggagccactccacaatgctagggggggtccagtcgtccaatgagagccaatggtggacatctcttcccaactccatattcagttttgtcatcctgggagcctgatattggccgtgatggaaatatttacaccatggaaatcgacacgctctrcgaggcagagcttcttcctcccaaaaagtcagtttctaaacatttaccactttaccaatggcattatttttaggtagcctttcttcagagagagaatgaataaaaaatcttagaagcaaaactaaaaggatcctcaaagatgattccaacccttttatattgcaaatgaggatatggaggccccaagtaaagaggtgcctcgcttaagctcttcagcaaggtttaggacccaagtcatctcactctcaaccaagacttctttccagaggaatcaaagttttcaagctgctaaatgccctgagggagacaagagagctataaggctctgtctccactgcacatatacgattcagtgccgccaagagcaatgaaaacaattttgtatcattatttgtaagttttgaaattacattatgtatgttaccgctaactaaaagtgctatatttgtccaaaaaaaagaaaaactaataggaattgaaaataggaagggatgacttcatgaaagagaaaggattcgatttggaatctgaataatcactgagaggcaacagactacggaggaggaattttgtctgagtataaagaaattaagctgactgatgtattagaagagtatttaaaaatgggaagccatctttggatagaaagtgaggacttttctaagtaagatccttacatatccagagaattcattttgttttaataaagtgagcaataggaaaccactgatagccgagccagataatgaagtgatgtaagtgttgttttagaaagatggcctgcgtggcgggktcggtggctcatgcctgtaatcccaacactttgggaggccgaggcgggcggatcacaaagtcaggagttcaagaccagcctggccaatatggtgaaaccccatctctactaaaaatacaaaaattagccaggcatggtggcacacacctgtagtcccagctacttgggaggctgaggcagaataatcacttgaacctgggaggcagaggttacagtgagccaagatcacgccactgcactccagcctgggtgacagagcaagactccatctcaaaaaaacaaacaaacaaacaaacaaacaaacaaaaacacagatggcctgcgtggcgtggagtcaaaaagccaattacaagagagattttttttcttatttagatgaaagtatattctatattatttacatgagtatatatgtatggaaggatatcttctaacatctcagcagtcattcttctcgtgaagaggctttctgggtggtttttgctgcatttcttgtgcttttctcttacttttttcttttggcttctttatttgtttttcttgttgaaatatatctaattttaaccccccaaaaaatcaccttgaagaatagtaatgactaacacttagaagcacttcctctgtgccagacacaattcacataataactaatagtacctataagacaagaatcattattaactaggttatacaaggaggaaactggggcacataaatttaattgactttccaaggtcacagagctagaagtgtcacagtcgggatttgaattcagagcccatgttatcaaccactatactagcctgcctctagatgagatagagagagacaaattggagacagtttgaaatcaagtaagagacaagagaaagttgtactgctgcagggaaagaatggtagaagcagagattaggatggtaccggaaagggctgatatacgaagttacacagataaataaggacaccaaaaatcaaaagccaaccaaggacaggtggtatagtttgggtgtttgtcccctccaaatcccatgttgaaatgtaatccccagtgttggaggtggggcctggtggaaggtgtttgggtcttgggggcggatccctaatgaatggcttggtgccgtcctcatcaacacgactgggttctcactttgagttcacgcaagatctggttgttcaagagtgtggcacctccccaccctcttgctcccttgctctcaccgtgtgtcatgctgacaccctgtcaycttcagccatgattgtaagcttcctgaagactcaccagaagcagctaccagcaccgtgcttcctataaaccctgcagaatcatgagctgattaaaacccttttctttataaattacccagcttcaagtatttctttctagtgacccaaaaacagcctaatacmacaggtcagatctccttgttgctgctgctattattttgtcttgcttgccgtagtgatacrccattctccaatatacaccatacccacatgtctcttttttatttagaaataatgggaagatttccttttttattattacaaaatataatactcataaaaattttaacaccaccaagaaatattttaataatgtgttaaagtccccctcccctcttcattccctttttagccctccatagaggtaagaattctgtttcttatgaatcttttcagaaatgttctaagcatatattatatatacccatgtctaaactttctttatacatactgttctacaatttgctcttttcacttgaaattaggtcttaaacattgttttatataaatgcttgtgggttaaccacactctttttaacaatggcaaagtattccattatattcctgtactataatttatacaaccacttccctagttgaatgggtaatattctttatgcaaaggaatggaagacaaaaaggcctagttataacaaaaagagatattcataacatatcagcatggtcatgggagtacaggccttggacaagagtgcaggaattagctaaaagtgtaaaagtaacttcaataaacatgaaggcttggcatctcaaagcacttaatcacttaaagaaaatgaaaatgaagcaaaaagcaagatataaagtaaaatatgttcccacccaccaaaataggaaagtataatcataaaacctgctgttccaattccctgctgggaagactgggttctgagactatgccactcggggttgagtataagcaatctaccatgggaagaacaatctaggggccattttaaaattaggtggatttttttttaacttacagcagtggtaatatttgatcaacagttagaattttccagcttctcttcctttttgaatattttgagatggacttcactattcagataacaggttaagatcctcattgtcatttctctttccttggctgtcttaaagaaaacartsatctcaggtagaggagtattagcgggagggaggaatgatccttggggaaaaatttataggtgttttgttttgttttgaattaggtaaatccattaactgcctgcactccgcagccctcactccccaacactttccctgagtttatttaagtggttgcccatagcaaccacctacactttaagtagctgagctgagtattgcggggagacagcttggcaagcctctgtctagcttccatgatcattcactgtgccccggaggtaacaatgtaaaattcaaatgataattttaaaatattaacaatgtttttgtgtttcctgtatttaaaaaaaaaaaaaaggcactacgttttttaagtgacatggtacaacagggtctgctggtcaccctcaataccactggaaatggaataatttcaggaatgagaggaacgctatgaagaaacccccgcagaagggacagcacgccttagccacactcctcttcttccctctccctttctggyagcacccatgcctgtagggtcccagtcctgctgacttagaggcagcctgaaataataagagaaggcagaacwgtgtacaaatctggactttacaaatttgcagccttatgtgagtgacttctctggttgtggctttttstttttcatttttaaaatgggtctattgccggacacagtggctcacgcctgtaatctctttaggaagccaaggctggtggatcacgaggtcaggagttcaagaccagcctggccaagttggtgaaaaccccccgtctgtactaaaaatacaaaaattagccaggtgtggtagcaggtgcctgtaatcccaactactggggaggctgaggcaggagactcgcttgaacctgggaggtggagtttgcagtgagccgagattgcaccactgcactccagcctgggcaacaaagcaagactccatctcaaaagagaaagaaagaaaaaaaaaagtctattgaggccattaagtgagatcagaatgttaaaatttttaaattaaaaatggttctaattatctattattaartaaatattgtgagagttaactgagcaacttatgttaagcacctcacctggaatgccctatacagtaagcatatacttagcatctcctgtgtgcaagctacaaatgttactcaaaaatacataagtaaataaataaacaaccttagagggaatagacaacgataaaaccatagaaacagatacgctcagagaccagggtactcaaccaccctccatgtgccaagtcccatgaggctcttcctcagggaactggaatcctactttcctctccaagtcaatcccccagggtcggccctggactgtgtttttttcctacattgtagctgcctgtagcctttgatccctgtaggtccatctctgtccctgtccctgtccctaaaaggaaggtacttccttccctcattgwccccaaagggctcactggctgaccatgaagcaacctgctccaccaagctgcctccagctttgtcctctgactatggatctgtgtggctgcttttgtgtctctgtcctttattcgtctctcactgactcctctcctctgttggaagcgtttcactggcaagttgaatgattaacctcgggtttggttacactaagtgttttacctattctaaactaatgtgtttgcctgtgtttacaggaattcaatgactggggatattagtccattttcatgctgctaataaagacacacccaagactgggtaatttataaagaaaaagaggtttaatggactcacagttccatgtggctggggaggcctcacaatcatggcagaaggcaagagcggcaatgagagccaagcgataggggtttccccttataaaaccatcagatctcttgagacttattcacaatgacaagaacagtatgggggaacctgccctcatgattcaattatcttctaccaggtctctccctcaacacgtggaaattatgggagctactattcaagatgagatttgggtggggacacagcaaaaccatatcactggggaagcaggacttacagtatcccagattgttttccctagtacattatgatacactgagtccttttctcatttgatcaatttgggcaaaacacactcttccaacactatgtgtagtgacccacctgacccctccctcccgctttaaaactgttcagaagcttctgttttcatgctcaccagcctttaacagtacaaagctttctttcttttgttattattcatatttttcatcctttgacctacatctggtagtattctcaggctgctataacaaaataccatagactgggtgacttaacaaaagtttattttctagaggctggaagtttgagatgagggtgccgatatggtcaggttctgctgagggcccttttcctggctagcagatagggccacctcctcactgtcttgacgtggcagacagagagagagctcttgagtgttcttcttctttttttttttttttcctgagacagtcttgctgtgttgccaggctggagtgcagtggcgcgatcccggctcactgcaacctctgcctcccgggttaaagcaattcccctgcctcctgagtagctgggactacaggtgtgcaccaccacgcccagctaattttttgtattttagtagagtcaaggtttcaccatgttagccaggatggtctcgatctcctgacctcgtgatccacctgcctcagcctcccaatgtgctgggattacaggcaggagccaccgtgcctggcctccagtgtctcttcttataagaacactattcccatcatgaagttctcacccttgtgatcacatctaaacctaattgcctcccaaaggccccatctccagataccatcacactgggcattagggcctcaacatatgaatcaggaggaaaacaattcagtccatagcatctgatactattttctatctttgagtataatagctcatggaagggtcgtgatgcacctcagccatgaagaagaaactatgagtaaatgcattttaagtgattaaaatatgaattctgagcattatttttaccagcaatgtgcctgctgctggaatttgctttgatagcatggtgaggatccgacagtttccatctcctgctgacttcagctcttagctcagtggctaagcggctgttactgacaggtctagagcatattcgtggatcgagctcaccttacgtgtctgcttcctcctgggctgtcactcagcgcatgttccctctctttagggcctcttaagagaacacactacctgaatcctaccaatggaatgttacaattattagaaacatttttcatatacagtactcatgaaatcattaagttttcatgtagtttttacaattgtaaaagtttgtcatttgtatctcatttgattattaaacagcccctttgtataccggagaatctgttgcattaatgacaggtcatgggcagaaccaaaagcccaggacttcacactccacaaccagaatgttttccatagtattaaatgccagtgagaaatgagaagagaagagttgttccctccaaatcttcactatggaagatttcccaggacaatcttgagtctacagttctgagtgctttgcctgtcttaatcacaaattaatttctctctytctatgtctgcattagaacccagaacagagatacagaagggcgatatcagtaatcaatgctggtgataatgtttgcttggggctgctggggaaacctggctactaattggcaataactcagtgggcgatgttggtccttaactccttaatcgtattagccctttgaccatcggatagcatctctttaagactggcccaatcctgcggctctgctcattccacctgctcattcctcccagcactgccagatgtccaaygagatcatacaatacaaggataacaaatttttttgtgggttttggttggtatatatgaggagaacctttgtgttttatttggataatttgtattcaacaagccctggaaccctaagaaaataggtgatgtgcctatctatctatctcccggtctagctacctgggaggctgaggtgggaggatcgcatgggcccaggagttgggagtccagcctggacaacatagtgagaccctcatctctaaaaataaacaaacaaataaataatacaagtaaatttaaaaatagaaaacaggccaggcgcggtgactcatgcctgtaatcccagcactttgggaggccaaggtgggcagatcacgaggtcaagagatcgagaccatcctggccaacatggtgaaaccccgtctctactaaaaatacaaaaattagctgggcgtggtggtgggcgcctgtagtcccagctactcaggaggctgaggcaggagaatcgcttgaacccagggggcggaggttgcagtgagccaagatcatgccactgcactccagcctggcaacagagagagaccctgtctcaaaaaaaagaaaagagaaaagaaaacagatgaggacaagggagaaaatatatttttaaataagtgtttagcttagtttccaataagaaaatctctgtgtctgtttcaaggaatttgggggtttcttcctggcttttcatgacatccrtctcccctgtcacttaggacactcagtgggtgtctctgtgatcctctggatcctggctagaatgagttatatatgtccacggagtcttacactcatgccaatttggaagtaagtgagtaactcacaagggaaattggcttcagttacattctccctgaccaataaataagtattcattggatcgtttgcatctctaagatattccatattcttcaggatgctgactccatcacacaggaatgaatgcctaaggcttcgcagtgggagataagtgggagagaagctgctttgcagaagtcaggcgtggtgcgagaggaaaccagtgacgcactttttctcctccatatgttatcagattagccagatcctatgtgctgagaactggcagagcttcctccgctgctgaatagattgagcagtaactcccarccacacagccaccttgataattaggtgacatttctgccaacttctgcaatctgccctctaggggggcagtgggccaagtcacacctttgtggctacgtatggtcccacatgaatgactcaatcccattgttttatgtcagcctttcctgtcccacacaaaagccccgagtgtgagaagctctctttatacatagaggaaccttccaccttcagccccatggtcagtgctgactgacagcatcctgggtgggttctccacgggaccctttccaggtgccattccccattgctrtagtcaagttcaacaaggtagtaagagcaagactttgacacggagagttttgaagtcagaaawaaatgaatccatgcctataattgagatgggctttgaacatgtatcacaataatgcacactgtcagctgcactgagtctcttctgtatatgttctgtcctagctaacaagtttcctgcctcatcactgacctccaagctgtcaccttccatgctgccacagttagagaagggttaaaggaagttgtgcagccaaacaggagagtctgagggcaggtggaactaagagacaactgggacctagccagccaggcccttcttgacaaaggagaagggaggagacgtgcrgagttaggaatgaagcatttaagtatatgtggtgtcctcgttcattcatgggttcatttgttcagctggtacttaaccttgctgtgtaccaggcactgtgctggacactggggataccacagtgaacaaaacaggcagtagcccctgcccttacagagcttgcatcctagtagggaagacaaaaaccagcaagacagrtaagtgacataaagagcaaggaagactaggataacggctaagaaggaaaaagttaagcaggaggaggtgctgttcagagaaagtgattacgaaaggccacactcacaaggggatagtgtcagggggtcgcagagtggggcatgcagctgtgcaaggggaaagtgagtcagacagaaagcagcaagtcctggaggtgtgcctggtgtgcaggaggccatgcaggagagcaggggtggccacagcagagagcgcaaagagagagctaggctcaagaaggcaggagggaagggagccagacagcatgggccacggggagcacttcgagttgtactctaagtgacatgggactctaacagccttgggtggaggaccagcactttaaggggataaatctggctgctctatcaagaagaaattggaagggggaagaatggaagtcaatactttgggttgtactctgagtgacacggggactctgacagccttgggtggaggagcagcacttcaaaggaataaatctggctgctctatcgagaagaaattggagggaggcaaggatggaagtcagggaaagccacacagccctccgggacagtgagagtgagaacagggtggggcagtggacaggtatgtgcccatcctgagggcagggctggcagggtgcattcacggatcagacatgggctgtggaagaaaacagagctggccattggatcacatggatgactctggagaggccatatggaaccgtggtgtgctgraacagtccttctcagagagagagggcaagcaattcatctgctaattcctcctggtctcctgcctttcattggtcgagtcgtattccatgggatattaacagcgccgcacttgtgagctgtgatacttactgagggccttgagactcctagtgaaaaagcctccacaggcccagcggctcaatggggttgggcaaacccgtccctgagggaggtcgagacaccagcagtgccgcaggtggaggaagaagcacggtggccaggcttcacagatggcagcagcatgagccatcctgaggctgctctgtccaggaagcagggccagagtccaaggctgaggggtcaggcaggaccaacaggatctggaaggtacatgcacaagccccagtacattattccagcagttcagctaacacaggctcaatctgggctgacacaggtgcccaaagaagctggcctgtatggtgaggtgtggccgcagatggtggtgccacacattgtcaggttagtgggaccatcccattccttctggtctgcagtggaggccaagacagcaaatggaattgcagagctcaaggtccaaactccatgcagaaggggttgagagaagggaagtaagaggtcaaagtttccatcaaagagatcagtatgacgccaaggcagatgtcccatcataatatctttttttttttgagatggagtctcgctggagtgcagtggtatgatcttggctcactgctgcaatctctacctcctgggttcaagcagttctcctgccccagcctcccaagtaggtgggattacaggccatgcaccaccatgcctggctaatttttgtgtttttagtagagacagggtttcaccatgttrgccaggctggtcttgaactccaggcctcaagtgatccatctacctcagcctcccaaagtgatgggattacaggtgtgagccatcgtgcccagccccatcataatatcttaagtacccacagctggagttagggaagagggctgctgccctgcaggcccgtgagtacacagggccagctggttacagggctggggcatagggcttctgcagtgcgatgataccaggttagatgtggcctggggtagggctctagccagccagctatagtggggtggggggtggtccccagtgtggacgtgggagcagacagggattaacacattactttgctgttaaaaaatgatgaattgcccatttgcctttttttaattttattttttaaatgcagaatctcgctctgttgcttaggctggagtgcagtggcacaatcatagctcactgcagcctcaacctcctgagctcaggcaatcctcctgcctcagcctcccgagtaggtgagaccacaggcgtgtaccaccacacccagcttcatttgcttatttcaattgtgcttcatttcagtagattacattcagtattactgaaattgttatactctctaggaaaatacattttaattcacataaaatacatgactgtgtataatgccatgtattgcataatgattatcattgactcctaagtaaatattgtgtttttgtctgaataagatttctatcaatccatctctttccctgtctaacacacacacacatgcgtgcacacacacacacacacgcacatgtgcacatcaccttccttcaataaatggcatcatacagtgcagactaagctttgacagctctggactcaagccaacttttggatccattgttcttataagccactttgagctttctgacaccattgtagtaacaactgtatatgaaattacaagagaaaaaaatgctggttttcacagccttcccatctgcgctgatttctagtgagtactgctaygctatattaagccaattttgattagtaattatcatcatgccttgcaaagttcctagaagataaggtgcttgtcaagtgtattattacaatgcctgtgcctacttttctgagggatatcatttttcatatcctgaggagctgccacatattcccccaccgttccccagaaacatcatcatagttgacaggtctttattgccgcagcccaaaagccatgtccatggtgtaccatctaggtgaacctgcactaattgattctgtcatttctgagaggcagaaaccacatctgcgggagcctggttggttcttttgttttaatgaagcgaaagtagcctccatgtttgtctgtgcctgtctgcaaagtgacagtgatttatctcatgctgaaagcaagttcaggggcctcctagagaagcacataaatctaccaacccccttgtgacagatgctgaagccctgccaaacccctcacaatgactcctgcaaaggaaaccttccccactgcctgccgccacaaatgcactatccacttccctacaagccatgagtccttcccttttccccaacttctttcgtggatatatccaatttaaaaggaaatgcaggcaaatactcttccttgagttaaatctgatgtctgtttcctgctttcctctaatcaactagataatgaaaatcatgacctaatccaacttattcattttaaagattaaagaaacaaagactggccaggcacaatgcctgatgcttgtaatcctagcacttgggaggccaaggcaggaggatcacttgagcccgggattttgagacaagcctgggcaacatagcaagaccccatctctacacacaattttaaaaattagccggtcatggtgatgcacacctgtggacccagctactcaggaggctaaggcaggaggattgcttgagcccaggagttcgaggctacagtgagctatcatcatgccactgtactccaacctgggtgacacagtaagatcctgtctcaaaaaaaaaaaagaaaaaaaaagtaaaagaagcaaagacttaggaagattttgaaactgtccaaacaaagaagagccaagttccaccattcactgggcatctgcttgtctaccaactgaacaaagagaaagaaggtcattctaaaattttttttggagactgagaattttacaattttccactgattctaacataccatctgggggctaataggcatctcctcaaactaaaagtcagctactgtacctagttgatatttgaaagccatgaagaacttaccaacatttgcccacagttaggctaaaagaattttctttgactctgaaataatctatgtatcagagctactgcttatgatatttcctaaaacatagcttctgaccattaaaaatatcattgctagttatcttagcatggtgcctaaattcagatatttcctttttattgttgtttcatatctgttacctccttgatatttctcattaactcttgggtcctcatcactcttaacctcactcatgtcctcccaaatgccacagccgagggatatttctgcaarctcatcttttttgacatttccttaatattttacactgttgaccactatcttctaggaactttcctgttgacttaagtgatgcccctctctctttgctctcttcctaaaaatcagacattttctcagtgtcttttgggggtccccttccttcattgtccctttaaatattgatacaccctatgrtcctgccttgatcactgcctcttcttatccaatatagtctctttagacaatctcatccacccttgcagattcatctattatctgcttgactttaacccccaaacttacctcttcggccccggccttccgtctgagctccacatctctgagaagtttccagctttttctggatggctccctggcacctctgtgttgaaacttatcacaagggggcttttcatgctcagactcttacttgttctttcctctctgtttgttgccattcttcccacagcctctattgcagtaggttattaaagtctgttaattatatcttctaaacatttctctagtaaattatccgaaaggccctcattacgagacatattgcactgtgtcagaactgttcgtctacatgtgtctctcccctgctagactcacagcgagggctcaatcaaggactagcaccataatatccatctgtttcttctgtgatatactagcactgtaggtgctggcacagagtaygtgctaaattaattgtgcgaatgaatcgataaatgtataaatgatctgtcacattagaagaatgtttgaaaatgaaacaattagctgtaatatcaccacagaacaggaatggttttgttgtggctgttgtttgttttcagcatgtgttttcactgttttgttcatagcacacatatttttaggtggctgtaacaataatggacatgtagttttgtgttctacccttttttcacttaaacattgattcataactatttctctgtgtatttacaggtgctttgtagctctcctttataatggctacattatatggcaaaagtagctctagaatgatagtgataggattgccaagcccgaccctgtaaggattacatctgattcacaaagctgagtgccagaggagcctgccaacgtgtaatgaccttgaaaagctacttaacccaaagagcaaattttcccatttgccagatgaacctaatcatagttgtttgtaatcctcagaaaaaaaggtgttgtagaagtagaaattatttttagtatctcacaggtttgaaatgtttgtgggatagaaacaactcactctccatggtctcttcctttgaaggcagggcaggttagtgaaaattgacctttcccaagcagtgaggattgaaaggattaagcaggggggaatgaggcaaaaacatctagcttattctgttgttttggagtcacctatcttcatcttttaaaagtttcctccctatctttctgccatattatcatcttttcccgatacgatcaaattttagcactggaaggaaactgaggaattataactagtccaactctcatgtttcagatgaagaaagactttggaaaaagcacagatgcttgtatacccctcttcttagggaaaagaggatggagaagtgtggatgcttttacaggggtagtaaattcttcttaggggaatccaatgagcttgaagaacatgcagtggcctgagacaaagtctattggacccacagagcaggcaatggtttgtgacagaagtcagtccaggcgtgttgacagatttaagtctttcttcctgtgatataagtccagttaataaagacttgggaaagaaccaaagggaattgtttttttgacaagtccagactttaggcaggtgagggcacttcagagaacttcatcctgtgttttgcaagagacagaggataagagcttggggcggggggtcagagagaccttgagagccttcttcagttcgacatatcaaagtgccatattttggggtatcggtttctgagcaccaacagagtcaaaaggaagcccacattttgcatagttttctggtaatattttagaaggaatgaataccggtaagaacgaggtaaaactgccaagaggatcatgcagcctccattgtactcatggtaatactactttcgtatgactcatcttagttaaataatacaaaccacagtgaagtcacgaggaaattcatattaatagaagttcattttccactagtttacctttttttttttttttttttttttttttttgagatggagtttcgctttgtcacccaggccagagtgcagtggtgcaatcttggctcactgcaacttccgcctcccagattcaagcaattctcctgcttcagccttscaagtagctgggactacaggtgcccaccaccacgcctagctaagttttgtattttagtagagacggggtttcaccatatcggccaggctggttttgaactcctgatcttgtgatccgcccscctcggcctcccaaagtgctgggattacaggtgtaagccaccacgcctggcccctctcatttactttaatgtgaccatatatctatgcccaaaaaatctaaagccatttcatgatgttcctattttgattatcatgagcatttttcctaaacttgtttttagaaacctaagttctcttgtaatactcattacttctgcttgttgcacaaataaccactgctaattctcccatgatgggtttcaagattcaccatttggtacttattcactgctttcatctaagacaatgtaaaaatgcgaacaacacactccatgaaatctctattaggttgtggttcctcattgaagcacattcattttccactgttctttgactttgagctagaagccagagttcgtcattaataccaagtttctgataactagaggagacattgtccaaaaatttattgagctgaaatgtcttgttttatacaacagatgcaccacttgaaagcaatttaaaaataaacactgcagtcattcactcctattttccattaacttagcttatttttgaggtacacttaaaaggcttggtctttgctcagtgagggccccatgttctcacctgtgactgcaggtgattggtcaaatgctgagagttccttgtcagaaccaaggactgctkaagttggagagttccatgctggcacgcaccatagctagtccaaacccaagaccacacataccactgatagccttttccatggatgacatcttctctgcattagaaagatattattcactaagcccacatgtgcctctgtaatttttactggtttattctcattaagtattttaacaggtttatttctattttctgtaactatttttggtttcctagtactacataggggcctatctagtcatcatcatcgtcatcataaaaaccaaatgggagcatttggtgcaaaataatgcatttgaattatctcagcctttgacctctgtggatgggagaataatgccccccaaagatgtctaaatcccaatccctagaacctgtgaatttgttaccttacatgacaaaatggactttgcagatgtgattaagttcaggatcttgagatgaagagattatcccagtgagatcaatgtcatctgagggatcttataaaagggaggcaggagggtctgggtcaggggaggagatgacagcagaagcagagttggagagagaaggaagcattggaggatgctgcaccactggctttgaagatgtaagaaagggccacagccaagaaatatagactgcctctaggagggaaaaaaggctgaaggaagccagcacactttaccccaaaatatgactgaactacagaagtagcctcaaagtcctcaaggtctctctgacctgctcccctgctccctttcaatcctctgtttctcctaaggcatagggcgaagcttttcttcggtattctcttatccacctgggaaccagaccccaaagagaaccacagttgccttccacctcccatccctgtaaatctcattcgctatctcagaaaagaacactgaggatgcaaacccacctggacagaccttttcacaagacaatacctcccrggttcattcaaaatccaaattccatttacaagttaatttctgtcttctaggcccattcattctccctaatgatcatttactgcccctcaaaagaatggtctacattcccccatgtccccctcccctaggcagaaggctttataagatctgtactccactgagttattgagtactcattctccygcaattctcccatgctatgcacattagaataaatgttgcatgcctttttttctattaatctgctttttgtcagccagtttttcagtgaaccttcagagggcgaaggggatgttttccttgggcccctacaaagcaaaggaacaggctgtcccctccagcatccgtaagcaactcagccctgctgagaccttgactgcagcccttaagacccattccagccttccagcctccagaactgtaagataataactctgtgggttttctaagcctctaagcttgtggtaatttgttacagcagcaacaggaaactaatacagcctgttcttcaaaactacttccatcagtgggagcacaaatgaagtgaatgaatgcacaactgctgcatagattatttaaaaacatatgagaagggaagcagtcattatttttcagtctgtaaagtaaggtggattttttttaaagggagaagtacctgggttttcattttacaaacccagaaaaggccttgcagcaggagcgtggttgtatgatacagggagcagcaagaaggccagtggctggcagcaggaggacaagggacaaggggtagaagacgaggccagggaggcagccagagccctgtcacctgcatgtttacaggtttcacttgaattttagaaccaattctagagattatctttgttttctcaatacagtttttaacaaaataaaattctggcagcgccttttccccaaggctctcgctcattgcactggatccagactgggcctggaacgtcccccttttttcctcgtcaggagcagttctgtgtgggcaccccaggagcatcgcgggcgcagagccgggcagggatccggccgtcatcaagaggcctaatcagagaacgcactgacattgtgggtgggttgccgttgattgggagaaaatgtcttcagcatttggacacctgaacagaggagtaaaaatagattcyccaggattcttaaaaaawaacacatacacggcagacccaagtcattccagagactataacagcttacgaaaaagaagaagaaaacggaaaacaaaccttgatagaaaagaaggctaggatagaggttggtgagtacccggcccccaggttgttgctacacatcgagacccaacaactagggggggtccaagaaagaagcagccgagatgaggtgccttgtgcgcctaaacaggccaactcgggggagcctaggatgcagcacacaggaacaaacaatggcttgggggctgacacttctcccttcatcggcctcccacttacacatggatttgcaaacatacacacaaacacaatttgtttctttacactctagkctgtgcaatgacttccattgtagacaaaagacctcatgctcaaatttggaaattatgcttttgttggacacacaagatcagcatacagagagaaaaatgagcccaccagccaggggccaggagcaaaaagcagacaaaaagcagattaatttaagcactttacctcagtgcttaaacatcggtttcacttatgaggacacataagattctcaccaccaccagtattacccctctcgaaatcgctgtggcatccayagaaagggaaaagccttatattcacatgtaagcaacttccaaaggatattgctttttgtagtaaccactttatttagatataatgcacatactatataacacacccattttttaagtgtacgatgcaatggttttttgtatcttcacagctgtgcaccaccactatcaattttagaacattttcagcacccacaaatccccatgcctattggtagtcatgccccatttccctccagccctccccacagccccagatagctccattctactttgtctctatggatttgcccattctggacattttgcacatgtgaccctttctttcatttagcataatgttttcaaggttaatccatgttgtagcatgcattagtagttcatttctttttagagctgcatagtattttactgtgtggaaaacccacattttatttattcatccatcagttgatgaactttggattgtttcacttttggctatcatgagtaatgctcctatgaacatatgtgtacaggtttttatgtgggcatatgttttcattcctcccaagtatatagctaggagcagaattgctggttcatatactaacttcatttataaccttctgaggagctgccagactgttttccaaagtggctgtaccctttttcttcccactagatgtgtataagcgctccaatttctccacatcctggacaacatattcttatctatccatttttattgtagttgtcttagaaggtgtgaagtagtaattcactgtggttttgatttgcattgctcaaatgactaaccatttgagaatctttgtatatgcttgttggtcacttgtatattttctttggagaaatatctattcaaattttttacccattttgattgaggtatttgtctttgaataattgagttgtaggagttgtttatatattctagatataagttctttatcagagatatggtttgcaaaaattttctcccattctttggattgtcttttcaatttcttgaggtgtcctttgactcacaaaaatttttaattttggtgaagtccaacatttaaaaaacaagaaaagtcataataattgaggtcaaaggcattttaaaagacattcaaatataagtttgaaaagatgggaagtcacgttcttatttaaaagaacaaagaggaattgtgcattgaaggtctgtaaagatgtttgatagctcatcagtacagtgaaaacattttggtggactttggtgagtcattgccattgcattttcttccccctacccagaaaaacttgggccattctaaagggatttggcgtctcccttgagttcttctgatttatgcatcatcaacacctgcaaagtctctcttcacatgattagtctttgttttgtgccgaatgcttcatactttaaatcttggaccaaggccgggctcagtggctcacgcctgtaatcccaacactttgggaggccaagacaggcggatcacttgaggtcaggagttcgagaccagcctgaccaacatggtgaaaccccgtctctactaaaaatacaaaaattagccaggcgtggtggcacgtacctgtaatcccagctactctagaagctgaggcaggagaattgcttgaacccaggaggcggaggtcacagtgagccgagattgcaccactgcactccagcctggacaacagaacaaggctctgtccaaaaaaaaaaaaaaatcttagagcaaaagtgaactttaatgatcattgaggcattctttgtgtctccacaccaagatggtcattgggaacagcttggaatactgttccaagcttggaatagaatctcccgtagagtttttaaacaacaaaaaaacaacaataacaacaacaaggatagctgtattttaatcaaatcaagcatgtttaatcaaatgtagcggtgtgtaccttgtacctagatgagaagtagttgaatccatcaagaaaagatctgaacttgttgaatttataagaatttgaacagcaatatgtttttaaaatttctactttatttaatggtatataatatgtaaatatagatcaaaatttgtaaatgccctttgaaaatataaattatcctttgctcccagcaggtccacttacgggtatctctgctgtagacaatcttatctaaggacacaaacatatacacacaaggtacaaaattgaaagctgctggctcacgcctataatcccagcactttgggaggctgagacgggcagatcacaaagtcaggagcttgagaccagcctggccaacatggtgaaaccccatctctattaaaaatacaaaaaaaattagccggcgtggtggcaggtgcctgcagtcccagctactcgggaggctgaggcaggagaatagcttgaacccaggaaggcggaggttgcagtgagccaagatcgcaccactgccctccagcctgggcaacaggagcaagactgtatctcaaaaaaaaaaaaaaaaattgaaagctgctacaatttctgtccattagtaggaaaatattaagtaaatcatgaaatattcatgctatgggatactgtgcaactgctaaaaataatgagggcctctgaatgaactgacataaaaaatgtacaagataaattatctattaaaaaacaagatacataatatcatatgtctggtatctcacacctttaacaatcacatatttaaaaataaacattgggccaggcagagtggctcatgcctgcaaccccagcactttgaaaggccaaggcaggagggtcacttaagcccaggggttcaagaccggcctgggaaacataacaagaccgaccacatctctacaaaaaaygtttttaaaaattttttttaattagctgggcatggaggtgcatgtctgtagwcctagctacttgggagactgaagtgagaggatcacttgagcccaggaattcgaggttgcagtgagccagtgagctaagattgcaccactgcactcctggtgggcaacatatagcatgaccctgtctctaaaaaatatataaataaatccttttccatattgatattgatattataaagtaggagaaatacatgaaaggatcttgtggcagacagaataatagcctgcaaagatatccacatcttaatgccggaacctgtgaatatgttacatggcaaggaagaattaagattccagttggaattaaggttactaaacaactgactttaaaatagggagattatctggaatgatccagttggataatcacaagcagccttacacgtgaaaagggaggcggaaaagttagcgttggagggggrcctggacagacccagccaaccactgccggctttgcatatggaggaagaggccacacatccaggaatacaggaggcctctaaaagctggaaaaggcaaggaaagagcttctcccctagaacctgcagaaagggacaccgcactgttgacaccttgatttcagccaatgagacccatttcatatttctgacctccaggaatgtaacataataaggtaatgttgttttaatccactaagyttgtggtgatttattacagtagcaataaggaataaatacagatacatgataataacttatctttaaataactaaactgtggagaaaggatacctttattttttacccatgccagttattacattttccatatgagcatgtctatattttgtaatttaaaattttttttaagcctgtggggtggtctatgaaagagtaacaggccgggagcggtggctcatgcctgtaatcccagcactttgggaggcctaggcaggtagatcacttgaggtcaagagtttgagaccagcctggccaacatatagtgaaaccccgtatctactaaaaaatacaaaaattagctggacgtggtggcgtgcgcctcccagctacttggaaagctgaggcaggagaatcgcttgaacccgggaggtggaggttgcagtaagccgagatcacaccactgcactccagcctgagtgacagagcaacactccctctctcaaaaaaaaaaagaaaagaaagaaagagtaaaaaaaaaaaaagggtgcactgaccactctatataatagcccattaaagatgtggaaaagatgaagaggcagcttccttctctttgcatcagagcaagcaagcttcctggaggagatgggatttaaactggatcttaaacaatagatagaatattgccatgcagagatggaggagatcaaaacaatggggcagcatgaacaaagcaatgaggcaggcccactggaggacaatcaagtgtcgtctttcttgwccacagcagtgcagtattacctgtatcctcagagagtgttcaggcatgatccgagagggcttggatggattactrtgggtttgggcttaatttggtaggcaatggaaaccactgaaagttttggagttttggggaaaaaactgattgctgggccagacatggcggctcacacctgtaatcccagcactttgggaggccaaggtgggaggatcacttgagctcaggagttcgagaccagcctgggcaacatggcagaccctgtctctaaaacaacaacaacaacaacaacagcaaaactggtggcattgccttttaaggattaatccttccatgcagagagatacagggagacaggacaggagaactctaccaggatctaggctctgagatcgggacagaaggagggaggacaacacagacagaaatttgggagctagatttggaaaacttgctcactcaccacctgcgggtggtcaagaaaaggaacggtggtctttgggcctgggtcgtggggggatgacctagtcagagtaatatgatatggagggtgagctcaggttgggatagactgggttttgcatgcctctgcagttccctgtataaacgccacgtgacttacaaggctgcaggactggctggggccaaggagagaggaccctgagccacgctatgtctccagggcaggatctccctttctgtcaggtcctcatcccctctgcttatccatttgcttcctggccagctctcccagggaatatttatccttagaacataatgatcatttcttcctctttcccgtatccatgcctagcctttctgcttcacaaatggagttgtctggctccaaagtcatccactctggtgcttcttaagggatttgaatctctccccacttgccgctgctgtgcacaggtctccctgcctgggccttctagtgagagatccccagcrgccctgaaaaacctgcctatacagcccacactattgagaaacctgtttttattgctaacctagatcctttggtcaaaagtcttatcttcctcatatcagctaaaataagaggcatgacctgctttttttttttaagatggagtcttgctcttgtcgcccaggctggagtgcaatggtacaatttcagctcactgcaacctccgcctcctgggttcaagcgattctcctgcctcagcctcccaagtacctgggattacaggtgcctgccaccacgcccagccaacttttgtatttttagtagaaacggtgtttcaccatgttggccaggctggtcttgaactcctgacctccggtgatccaccctcctctgcctcccaaagtgctgggattacaggcatgagccatcgtgcccrgccttgacctgctttttacctgtacccaaaaatataattagttcaaggctatgatgcatgcaattaaatttttctcctaaagatatatctttaatcagaaattctagagtaagtctcattgataagaacacaaagtaaagggctggtaaaaagcaaaaacagaagaacagatgtgagagtctgcttacttackaaggattcattccatttgagttctacaaacacacacacactacacatccccccagctcagaaaaggaccacctacccaggactctgactttagatctaaagaatttgtttctggtcagccttttctcttaatatctgaggggtcagggggccaattcctattagtccaattatgtcattgtactgaaagaaacagtattgaacatcaaaatgcaaaacatttttcttgtcttgctgacccaaatttatcactgatttggaacccctttcagaattgaaacatactctctaccccaaatgcccttggaatgacatttacatctcttttgttttttcaagaggagatgatcatcataatattgtatgaaaaattccaaataaaaaggcttagaactgctttgcttcctttattctcaatatgaaataataacaaacagagctctaagaaatttattttaagatataaacttatataacccatcgctcccttctctccagccacatccgcgtattcttccaccacctccacttttataaaattatctacactttgtttttgtctctaacatattcagtttcttccctgaaatggtcacttgattcacatgggctggttttgaaatgcctctccctgtggaggatgcattttatcatgaagtttctggtccctgggggtatttctgaatttccttccgaatattcatctaaaccctttccccgctctctgccaaaacaccccagccatacctatgaatgggtgtttaaaaagaaactgaactattgtttaaatgtaagtttttttaatgtatggggccttgaaaatttgcttttataagcatatataaaataattttcccaaaaagcacataaaaaataattttctgaccaggtgcaaaagctcacgcctataatcccaacactttgtcaggctgaggcaggaggattgcttgagagtttgagactgacctgggcaacatagtgagaccctgtctctacaaaacaaattttaaaaattaaccaggcatggtggccacacttgtgatcccagctgctcatgaggctgaggtggaaggatagcttgagcctgggaggttgaggctgcagtgagccatgattgtgccactgcactccagcctgggtgacagagtgagaacttgtctcaaaattaattaattaattaaatgaaataattttcccagtgatctctttgaattgtttttgttttgtttttgtttttgttttttaaatagcaactgagcaaatgttacataatttcctctttatcactttcaggcttagagaaatagcataatgtccctaaagaaatgtgctggcactggcgcrgggaaggcagggggtgaggagaaaaagcatcttcactttctggttataacggagagtcggcrcagccccaagagtggtcatgctccctaagcaaggaagccaagaactggtcccatgttaaaggttaagcgtgcatttgttcatccaagaggccggtctcttggatctagactgaggcccatgcaacctggaaaatgaaaaaacagaagagactgactactttcagaggattcatttcactggggctgtacaaacacagaagaatacactcctcctgacttgctagcactactttccctggagacagagagctccagatgatggttatgagactggtaacctttaaaagccaaagttaatgtttcctctaaaattagccacatatcctcttctagatttctgaggatctatagtccctttctgaatgctsttttccattcagtgcacacgatctgttactcagaggctggtgatcccgtatrcggaatgcacaaacttaccatcttccccgtcttttccctcaggctgctcactggtcatttctctgctcatcaatcctgtgccggatgggggtgggaaactcacagaagctgacagctcttgagggctgagtgtcttggcagaatgtacagtgacatgggcattcgttctgaattccaaggacgtgagttcaagctgcacctttaccatttactagatctagacatcatttatctcaagttcaaaaacagaccaaacgaatctatggtatcagaagccagggttgtttatctctgggaaggggaaagaaggtagcaagcctctggaatataactaatgttcactttctggactgaaagttgattccatgggcatgttcactttgtgacaattttttgagctgttgtaggggccaaggggaaacttccccttcaccctctgaaggtttgctgaaaatcaacttttaaaaggcagattaatagaagaaatggcacacaaatttaatgtattagtttgttctcacattactataaagaactacctgacacagggtaatttataaagaaaagaggcttaattggcttagggtttcacaggctgtacaggaagcgtgcttggtgaggcctcgggaaacttacaatcatggtggaaggggaaagggaagcaggcatgtcctacatkgctggagcagtaggaagaaagaatgaagggggaagtgctrtacgcattcaaacaaccagatctcttgagaactctatcaagagaacagcaagagggaagtctgcccccatgattcagtcacctcccaccaggcccttcckccaacatgtgaggatgacaatttgacatgagatttgtgtggggacacaaagccaaaccatatcgatgtgcataacacaggggaatggaaggagaattgttacaaaataacccagtgggatccagatgcttacatacccttcttaaggaaaaagaaagatggggaagtgtgtattattttagggaggtactaaatgatttttaggagagttcaatgggcttaaagaacacacagtgacctgggacaaagcctgtggggcctgcagagcgacagtggtttgtgaaaaaagtccgtccagatgagactttctttacctggacagacttcagtctttcttcctgcgatatgagttcagttagtgaaaacgcaggaaagggacagtaggcagggagtgcaggaggtggtgggaggaagggggtggttgttttctttggcaggtccagactttaggcagatgagggaactttagagaacaacttcactctatgtcttcagagagagccaggatgagagactgggactgggagctcagagagacttgagaggcttattcagttcagcatgtccgagctccatattttggggtacaggtttctgagccccaacactgtaaacttatgacctgaccatgtactcttgcatttatgttatatttcagtaaaaccgtatttttaagaagttaggccaaataaccgaatggaacgactgggcccaccaccactatcccccactagcccgtttcataagagacatcatctccaggagcgagaggcaaagcagcggtgagcaagccagcccttccagcaggacgaatatgtcacctttccatgacacagctcctgccatctgaaacagaacccctcagacatcccagacacagtctctcctaaatgggctaagaaaaggcatcactagtattccatccatctatcatgtcctatatgatactcacaccataacgacttctcagcacccctgcctctaagactccacagttaccacaagtcctgccgtcactgaccattacacattcttcctcttgaattaccttgtcactaacgagaaaaggctttgggtacctggcagacccaggytgaacttgaccaggcttttgctaagtccttaacaggaaatctcagcttttttgtatcctggcactcaccaagaggaactttttggcactgagttaytggaacagcttaaggatgccgcctaaacccagaagttggcgactgctgcagaccttccctcagagagcagctgaaaattattcctattaagtaggaggaaggaggtgaggtggcagctgctgggagatgttggggaaggtgagcaccccaatttgaaagtagaagacaaggcaaagaagtctcatttcccagcttggattcccaatcacagaaaaatattttttgattcttcctgttactttttaacttggcaattgaatacttctaacatctgactgtcaggctacctggaaatattagcagaaagtttatatccatttccctctaatatatgcttgaattaatgtagcaccagtctttcgtgctcccagaacacagtgaaatagatttacaaatatgtggcatggaaaatcagttaaaaacaaatagcacttactatcagttaaaaatgaatttagctagatgtttttatcagtgtggcaggaagttatttatgaacactattgttaggtacaccagaacttgctctgccagttcttgttttcagcactaggggatcaaaagtcatcttatccaaaagcaaaccagataactgaaatcatcaatcccaattgctcaattcttgcatgaataacaataaactattaactattctaactaattaggaaaacattttgttcctagagggtactgtttgcacagcgttccttccataaatatttatctactgttcttgctgccaacaatagttagtcacctggtatatacaaaacactgtgttatgcttggtagtataataaaacaaaacaaaaaagataaattatctgctaatattagtttattaccaaatgttcttatatcctgagagcccaacagagtttatgtgtgtgtcagtttatgagtgtgttatcggtgagtgagtcaaatacaggcaacagagcccacctagaaactggtttccttttttcagttcccacgagttccttgtgtatcaatagtgccctttcacattaaaaaaataaaaaaaaatttttaagtcccatctaagaatacacaaggagctcattaagaactccttcattccagtattctttcagcctgatcttaaagcacaagtaaaaatgttctcttcttttaaatgggctctgccaagttaattatggacaggaacactaaggtaaggaccaggggctccgttcaataccatgctgaagaggtgaggccctctgccaaatgttcactggagttatcgggggcttagagttggtcttttcaaactttagtgcagttaagaatcacctggaagtcctgttacaatgcagatgctaatttagcgggtctgaagtggggcctgtgattctgcatgcctaacaagctcccagggggtgccaatgccactggtccaagaaccacattttgaatagcctgtttttaaaaacacccttagagcctaaattaattgttctggggtggggctcagaaattgaggatataataatattattaataaaattcccaaaatgatcacatgaatgtaaaattcacaaagcctccttattcctaaatatattaaaagacgacaggcagctacactagaccagaaagaaaagaaagaaagaatacacaaggagctcattaagatctccgggacagaagaaagaaagaaagaaagaaagaggggggtgggggggagggagggagggaggaaggaaggaaagaaagaaagagaaagaaagaaagaaagaaagaaagaaagaaagaaagaaagaaagaaagaaagaaagaaagagagagagagagagaaggagagaaaggaaggaaggaaggagagaaagaaagaaaaggagaaaaggagagaaaggaaggaaagagagaaagaaaggaaggaaagaaggaaggagagaaagaaaagaaagagagaaagaaaaggagagaagaagagaaaggaaggaaggagagaaaggaaggagagaaagaaagggaaggaaggaaggagagaaagaaaagaaaagaaagaaaggaaagaaaagaaaagaaagaaaggcttaggttttaactgtttttaccatcagagtctatggttgttataaaatagtcaaatattgcaatctattcataattctattgtattttaaatttgcgcttctgttcccgaaataagcttcaccacttgcagcttaagccacagaaatgcgaactcagaagggaccgggagaggagagaatgttctttcagcgttagaaatttatcttgtaaatagaagctggcagtggccacatggatttttttttttttttcagagctagggcaggcagttagtagacctcagttacagcgtcagctctgccactaactagctagttagacccagagctgctctgagccttaattttttatccgttgaaggagagcctttgaaagaagataacagcaatccaggcccctgacatcctttgattctttgattaagtcaccaacggcaaacatttaaaaacttgaatgagcaactcgctcaggatttcctggaaggcaccctgacttggagagtggtattatgcaagtcccgcagtacacacggcacgtcccgcccgggcggtcctgcgcagtcctcagcctcgaccgccccctgccggtcctccccgggactgacgccgccacccgcccccgggccgagcgcgtctccggggaaacacagacgcactctcagctcccctggacctacgccgtcgtccccccaccgtccttccacgggggcgcaggaaggagtgggacggagcatcggtgcctttttcattagaatagacacaaagcccaattaataaagacccagagaagaggaagggaagaacaagacccaggggttagaagagagaagaacaagagcggattctcagccatgggaccgcagcttgtgaaaggggagctttgtttatttattgtctaatctccttgctgccctgagctcgtgcagcacgttccttatcggaatcttgggagcttgggaatttccacaacagaatatgtcgaatagcttatattgctagcataatagagtacattttgaccagaaagcttttatcccttttcatgtggtagtgattgttcggtgcttctctatagaaaagttaaaccatcctcaatacggtgaatattatctttccattctttcacccaaggcataagaaattactataatttaccatggcataaaggtaataaaagtgggtagaagtcatctttccaacacctaaacacctatctggaaaagcttttgaccaccaacagtactcattatttctgtctttgtacctaattgatttagtcagagtatctgtggccatttaaatactatgtgattctggtgataatggattgatggggcatgtttccatttcactcacaaatgctttcaaatatacttctgccttatagcgtatgcaattatactttctgttcagaatctgtgaagttaatgattcttcacatttcctggaaaacttttatgtttttgttcagatgaatgagtagttattttctctaagtataaatttcagagctgttgcatttctacagctaaagcccatgtaaaacatagccaatgaatgggcattcatctgtgtttcatggcacatcaaaatgtattttaaatgccttttcctatggccamctccagtcttttttgccttaattatggcatcaaggtgactattaggagtttgcagtagccagtgatgtgggggtaaggcaggagcaatattcaggacatgtgtctggtcattaagaagtacccaaatttctagagactcagagaagaataagaggaaaattccaccacctcccttctcctgcctgccttctctctcccacagtgacagcactgacctatcagacagggaaaatggaagatgcaggccttatgcatagtagtgcctgtctccaaccaggtcccaagtccacccatgagtacattcttcaagtgtgctcttctcactgccacacacacagaccctggttcatcatggcagacgtttaaaaatttggagactaacttggttctacttattcttaggtacaaactcagttccaatgtccagctttgaactagatggtgaaccacactattagtttttcctgcatcctgactcattcattgtctgaaggtgggatttttttaattaaaattttattttgagattaaaattattttgagataattgtagattaacatgtagttgtaaaaatagtacagagagatctcatgcaccttatacccagttttccccccccacccaccgtggtaacatttcaaaaaactgtagaacaatatcacaaagaggatattgacaytggtagtcaagatacaaacatttccatcattgcatgggtccctcatgttgcccttttatagccacacccacttccctcccaaccccaccactttctttacccctcgcaatcaccaatctgttctccatttctgtaactctgtcattttacatgaatggaatcacacagtatgtaaccttttgggactggctttcttcattcagcatagttctctggaaattcatccagsctgttgctgagaagtattccatggatgtactacagtttaaccattcattccttgaaggatatcctggttgtgcgcaatttggggcgattataaacaaagctgctgtaaccattcctataaaggtttctgagtgaacatacgcttcatttctctaagacaaattcccaggagtacaattcttgggtcatatagtagttgcatattcaggttttagacaaaccatcaaactgttttacagagtggttgtaccattttacattcctaccagcaatgtatgaatgatcccttttcgttgaatcctcaccaacatttgttgctgtcattaattttttgttgtagtcattatgataggagtggagtactatcttattgtgaatttaattttcatttccttaatgactagtgatgttgaactcttctcctgggtttatctgtgaagtgtttcttcatgagttttgcccattatctaattggattgcttgttttttactgttgggttttgaaagtactgtatttatattaggtactaatcctttgtcagatatgtgattttcaattatcttctatttctagcttatcttttcatcttcttaatcaggtatttcacagagctaaagtttttaattctgattaaatccaatttatcaggttttcactttatggatcattcttttagtgttgattctaagaactctgcctagcttagaatcccaaagcttttcttcaatgttttttctaaaagttttatagtttcatattttacatttaagcccttgatcaattttgagtttgcgtaaggtgggagacttacgtctttttgcctgtggatgtccaattgctccagcaccatttattagaaaggccatctttcctcttttgaattgcttttgcacttttgtcagtaatcagttagggaggttttgggctttcttgattctccattctgttgcactggtctgtgttcctaccctttcaccaatactacacagtctagattactgtagccatagagtatgtctttgaatagactgaatcctcccccttccttctcctttttcaaaattgttttagctattcttgttcctttgactttccatacaaatttttaaaaaatcttstctatatctacaaaaatctttatgagattttgataagagttgcattaaacctgcatatcaatttggggagaattgacatttctcctatttttgagtatttcaactcataaacatgctatgtgtctccatttattaaaatcatctttgatttatttcatcagtgccatgtacttttcagctcaccagayccgaacatattttgttagatttacacctaagtattttattttctaagcagttgtaaatggtattggatttttaatttctgcgtccaggtgttcattactacatagagaaatacaactgatttttgtatgttagccttatatcctgtgactttgctgaattcacttagttccagaagtttttttgttaagttcttcagatttcctttgtaggcaatcatgtcatctgcaaacagatgacaagacaaaacagggacagttttgaactaggtggtggttttgagcctaggtgaactaggttcctttccaactctatgccttttatttccttgccatactagctagaatttccagaacttttgaataagcatgataagagtggaaatctttgtcttgttcatgatcttagggggaaaacattctgtctttcaccattaagtatatcattagctgtagatctttttagatgttccttatcaaattgaagatattcgctcttatttctatttttcttagactttttatcatgaatgagagttgaattttgttacatgcattttctgcatcagttgatagggtcatatgatttttttccttagcctcttaatatggtatcaatagattacattaatgttcagatatggaacgggccttgcatttctgaaagtggaatatcccatccaagcggagtaaattccacttggtcatggtgtataattctttatatatattactgaattctatttgccaatgttttgataagaacatttgtgtctttattcatgaggtctatagttttatttttttgtactgtctttttctgcttttgatattagggtaatgctagctttataaaaattcattttataatgggaatgtttacttctcttctattttctggaaaagattgtgtataattggttttggtttttctttagaagttggtgacatcctcctgtgaaaccatctggacctggatatttctttttgaggaacttttaaattacaaagtcaatatccttaagaattacaggtctaatatctgttgaaaagtaggtgaattgtggtaatttttgtttttcaagcaattggttccttccatctatattgccaagtttacaagtatacagttgttcayagtatccctttatacctgcagaatctctagtgatattccatttcattccagatattggtcattagtgtcttttctcttttattctttgtcaggcttgtgcaaaaattayccattttattgaccttttcaaagaagaactttgattcttttcaagtattttatcttttatattgtttttctgcttgttttgagtttattctgatctttttttaggttcatgaggaaaagcttaattattgatttgagacttcttttctaacatatacatttagtgctatacgtttccctctcaacactgatttagctgtgtctcaaaacttctaatatgcttgttttaattttcctccagttcagtgtatttgtttattttccttaagatttcctcttttatctatggcttattaagctttgcattgtttaatttccgcgtttaaaggtgatcttgttatctttctgttactgatttttcatttgatgtcattgtggttgtagaatacactatgtatatttcagttctttcaagtttgttgagtttttttttatggccccaaatatggactattttggtatatgttccatgggcacttggaaacaatgagtattccgctgttcttgggtagagtgttctctaatgtctgtttgagtctattggtttatggagttgttgagttcttgtctatccttgctgattttctgtctagttctgtcaattgttgggaggtagtaactgaggtctccaactacaatcgtgaatttttctatttctcctttcagttctatcagctttttcattcaatatatgctgttgtttgctgcataaacatctaagattgctatgtcttcctgatgaattaacccatgatatatcattatataatgtacttccctatctctgactttttttactttgtagtgtactttatctgatactagtagagcaactcctattttcctttaattaatgtttgcatgatataaattttccatccttttgctttcaacttgcctacattgttatatttgcagtgaggttcttatagatgtgttttttaatcactctgaaaatctctgccttttagttgacgtatgtaggctatttacatttaatgcaattattgacatgttagggcttaagtctgccattttttattttgttttctgtttattttgtctgttgtttccctattttatttttcccaccttccaatgtgatacttaattttttcaggattctatttttatttatagtgtttttgagtgtatctctttgttttttttccttttgagacagagttttgctcttgttgcccaggctggagtgcaaaggtgtgatctcagctcactgtaacctctgcctcccaggttcaagcagttctcctgtctcagcctcctgagtagctggaatcacaggtgcctgccaccacgcctggctaattttttgtatttttaatagagacggggttcaccatgttggccaggctggtttcgaactcctgacctcaggtgatccacctgccttggctttccaaagtgctgggattacaggcgtgagccaccgtgcccgagtatatctctttgtacaaatttttaagggtagctttaggtattataatttatcagaatctaatgacatcatcatttttaccagtttaaatgaagtgtaaaaatcttaaaagtgtgcaagtgtggagccaggtgcatgtgtcacgcctgtaatcccagcactttgggaggccaaggtgggcagatcatgaggtcaggagatcgagaccatcctggctaacatggtgaaaccccatctctactaaaaatacaaaaaactagccaggcgtggtggcgggcgcctgtagttccagctactcgggaggctgaagcagaagaatggtgtgaacccgggaggcaaagcttgctgcaatgagccgagactgcgccactgcactccagcctgggcaacagagcgagactctgtctcaaaaaaaaaaaaaaagaaaaaaaaaaaagtttgcaagtgtgcatggagattctgagccttccaaagcagccagggaatgcccatccaccacctacataaacagatacaacaaacacagccatgcacacaaacaaacttgaggctgtgcccagactcagctacacctctggcacccactgaggttgcttttctcacccctgttcttccctgtggcccctgattctcatttcctgcccaattccaagctgacaaagttgacgccactcacctaagctcaacctagaacaaaaaccagataactaccacaaataagaagtcatataaagccatgaaaattttgtttccatctgaaggaacccagatatgattgcacaattactattggtgatattttaggaaccatgaggaatgtaccaggaaaagagtaaatgtcatctcactttcccgaagagaagatttttttagactgcaaatatttaccttcatatgagtcttgcaaaattctaaaataaactttaaaattgatggtttgggatgatttcgaaaatgggaaaacagcatagatgtattaacaaggggtatatggaactacccgtatttccctctttgtcttagttgagagaggtacatcacaggaatgtgactgtacttaggatagcattggaaacagtagatcacaattaccttgcaggaaaaacaaacaaacaaacgaggcctgggcaataggaacatatgtagttggttaaacagctttttggttaacggactgagccaactcactgatcactgatcactggtgttaccaaaggagattactgatttgcccaatcttagtgaataatttgctagcgtttgagtaaggatatagatgacatgcttatgggagggtacaggatggttaagactacagaaattagaaccagctttcaattttgagtttacaaacttgtcggcttcagcttcctcattgaaaataggtataataatacttcgtaattgttataataatccttaatactggtgtgataaataagatactgtaggtaaagcacttaaatgcatagggccatgtaacgcactcagtaaattgtggttttgttatttttgcttttctcatcacattagctgctacacataactggcaagaataggtgatatatgcatgtattgcataagaatgacagaataggccaggcgcagtgctgcacgcctgtaatcccagcactttgggaggccgagatgggtggatcacctgaggtcagtagttcgcgaccagcctgactaacgtggtgaaaccccatctgtactaaatataaaaaaattagccaggcatggtggtgcatgcctgtaatccgagctacttgggagactgacaggataatcgcttgtacctgggagatggaggttgcagtgagacgagatcacgccattgcactccagcctgggcaacaagagtgaaactccgtctcaaaaaaaaaagaaaaaaaaaagataggcctttcatttcccgttaactgaagcaaaggatcaaaatttgggatgatttaacatcatttgatmtaaagaagatctaaaagtcacccaaaaagagcttaccagaagtaaaaaatgagattataggccatgtgtgttagtcagggttctctagagagacagaactaataggatagatgtatatatacaggggagtttattaaagagtattgactcatgtgatcacaaggtagagtcccacaataaactatctgcaagctgaggagcaaggaagataatccaagccccaaaatcttaaaagtagggaagccgacagtgcagccttcagtctgtagttgaaggtccaagagtcctaggatgaagaatctggaggccgatgttcaagggtaggaagcatccagcacaggagaaagatatagtctggaagacttagccagtctagtctttccacgttcttctgcctgcttttattctggctgggctggcagctgattagatggtgtccacccaaattaagggtgggtctgcctttcccagttcactgactccaatgttaatctcctttggcaacaccctcacagacacacccaggaacagtactttgcatccttcaatccaatcaagttgacactcaatattaaccatcacaccatgcaatccaaagctttcccaggctgcatcctagcaggatttcctacagaatgtggatgataatggccattctgtattcctcacttgtcagccacatttgaaaggtgaagtatcattcggggtgccttcttgtcaaagagaaattaacaatttgtctgactttagaaaagagtcatcaagattatggagagcctggaaatgttgacataagaggagtggagggtcatgtcacctaaagaaaggaaggcttggaagatacatgattgctgtgttcagaaccattgaaggcgattacatagaagagataccttttttgtgacctttcagcatgctgatagtgagttcagatagacatagagcatttgacaatagggattagaagaaaaccaacatcaaaagaattatttaagggtctctctttagttgctcttagaattcctaaagtgaagtcagaatatgaagcaatttgtgaaaaaaaaatctatcaaaatacttttacactagctttaactgctccaatttgtcagtgtcagcttacatctgtgtaagtacatctgctctcaaaattgaaagaaacacattgtattcagctcaaagcagcatgtaggtcactacttacatcccttcctaagaattactattgtgggctgcctggtacaatttaaactgtcactacatctttcttagcaataaagttatttcttttcttactggttcataaactgatactgttgtcaacagtctttcagcaatctctaactgcttatgaaattgtttttctggatgtcttaatcttggcaatacaatgaattctcaacaatattatattgagttttaattctattactgtttttcaccaactaatagaagtatcatttttctattttcagccatggccataatagtccctgaagtactactatattatttagcatccttaaaactggcactgaattagcaacaaagtgcctcctcagggtgggggaaatgatggtttgtttttattgtgttggtccccaaatgttagtagcaaaattactgagaaatgaaatagaaaagacgaagttcttctgttaaagagagattcctacttctgggtatatacctgaaagaattgaaagcagggactgagaccaggcactgtggctcacgcctgtaatcctagcactttgggaggctgaggctggcagatcacagggtcaggagtttgggaccagcctagccaacatggtgaaaccccgtctctactaaaaatacaaaaattagcccgacgtggtggcacatgcctatattcccagctactcaggaggctgaagcaggagaatagcttgaacctgggaggcagaggttgcagtgagcctagatcacgccactgcactccagcctgggcaacagagtgagactccgtcttaaaaaaaaaaaaaaagaaagaaagaaagaagggactgaaacagatacactcgtactcatcacagcattattcacaataaccaaaaggtggaagcaacccaagtgttcatctatggctaatggataaaccaaatcacattcaacagagtatgattcagccttgaaggaaggaaatcctgtcacactcgacattgtggatggaccttgaagacattatgccaggagaaatataagacagtcacaaaaggacaaattttgtatgattccacttatatgaggtgcctagagtgaccaaattcatagatacagaaagtagaatgttggttgccagaggctgggggagggagggaaacggggagttcgtgtctaatgggtacagggtttcagtttgggataagaaaaaacttttggagatgcacagtggcagtgattgcacaaaaatgtgactatccttaatgccaccgaactgtacccttaaaatggtgaattcagtggattttatattatgtgtattttgccacaatgaagggggagcacgagaaagacagagagacagacagatgtttattacgcagtaaattcacacaattccataaggtggatattgttrgctctgttttaaagaggaagctgtggcttgcacagtgtcacggacccaaccaaaactcagactgatgaaccagtgttcaacgaattgaagagccaaatccaccagaacaaacttcccgctgtaaaactatttatgctacagggaaccaccccccacagaaaatcacatttttatctggattgttgtaattgatttggtgatcaatttggtcctacgcaaatggaaattaagtgaaggtaattgcaggagttattttgaggcaatgcaaaggattgtttttataaaactggcagccctggaccagaaggaagaggtgccccacttagctttagttgctgttcagttctggacagtgatttgcccacatgtgtatgaccgcgttctcacacagacctcctgcgatcatgaaagcagcctgtagcccaaaactcctgcctggcatactttggaaacaattctttctgtactgcctgctgtatccccagccagctggcaataaaactctgctaggcacattgaagtattaagatagattatttccttactgctcccaaaaaaagaaactaattcccctgggcctgactgtactctagatatcaggtaaaaggtgtcgccacttgcctcctgtcacccaggagcagarctcggcaggtctgacctctcaactgcttcctcttggattggccctgtgtcgcccctcctgtcttccttccgcagttccctgattttctccaggccctcatcacagtcccactgggcctcttgtcacaatgtcttggccaggcttcacaccctaccacccctgccccccacacacttacataacaaacatataaggaggcctaatacatgtcggaccctgtgctgacattggggattacaatgatgtattcccatgatgccagctgtggtcactgccctcgggaagcccacgttttgatgaagaaactgaccagcagagcattacacctcacttcaataggcctctgaccagaacaggctcagctttggatacaccggcatcctgagtgtctggcaccccggccgctgcctgtacctctgcctccaggtttttgcccttgcagctccctggatctggaatgactatgtctggctcacttttacctggtgacagtcttaccactcaaggtgtaacttaaagccactttctgtctgaagcttttcctaatggctgcactccaaatgagtctcttctttttctgccctcttatggttgcttgcttgcacatctgttataagcttaacatgaattacactgaagtcagttctgcatgttcatcttaacctggagatgtgaaattcccaggggcaggaatcacatgtcctccatgacatccagcataagcgtcatgcatagtcggcattcattttgtattgctttaaatctaatgttgcatagccttgataactgaggaaagaacatttaagttccaagtgccacaagagtctaaatatgatggataaacatatttggcacgctgaaagaattgcattttatgttgataatttctacgtctgatgaattattatgaaaaggacaacaccttcattttggataaagccaacttgataactaaaatgggttattccagcttctagcatgtggctttgcacatagtgagcctgtggtttttgaacagtttctccagttgagcattcagaaatccccaaccaaatcaggttgggttttgtttttttttttttttggcagagcaatatagatggagcaaataataagttgcagcatcaactgaatccccaagattattctctcaactccctttcaccctaccctgaaccctgagcttctaggagataccaaagtctacagctcttcacaatagcaatgtctcccagaaataatgatgacatttatgccccgtgtcaaacctttacggaggaagaacaagaatatagaaggggtctataggagtttgttcctctaatttgtatcttaaactttagaagttgtccctgtgtataaactgagatcttcggatggggcacattggttggtgaaatagatccctttatgaagtcacactcctaagaaacagawggaaaattaatgtttaaggaaaactgtgttgttgcaaaaaacgtaaaatttgtaaagggactctggccggcaatgcaaatatctggaacaaaggaagaaagtcgggcatctgcaatcctactatgcgtgacgcttatgctggaggagtcatatgcatgagtcatatgcatgactaatccaactatgcatgacgcttatgctggatgttatggaggacatgtgattcctgcccttgagaatttcacatctccaggttaagaaggacatgcagaactgacttcaatataatccatgttaagcttataaatagatgtgcaagcaagcaaccataagagggyagaaaaagaagagactcatttggagcgcaggcattagggagagcttcagacagaaagtggctttgagttagaccctgagtctataaataaaaatagtctgtgaataattttggccaataatgatcaatatcatcaagagattcactgtaaactgaagctcccgttattatagcttcatagaaattttgagctctctcattttacagattagaaaactgaatcccaagagtttaaagtcacttttttcagtctttcaaatagttaatgacaaagccaagacttattgtgcagtgtccagatttcattggtcaggtttgaatacgttgggtattatgtaaaatttttgttcctgtttcttaattgtttgcactggctagaaactccaataatgatgctgaaatgaagtgacaagaacagttatcctcgccttgctctcagtctttttttttttttttttctcaagatagagtctcgctctgtcacccaggctggagtgcaatcttggctcactgcaacctccgcctccccagttcaagcaattctctgcctcagcctcccgagtagctaggattacaggcacccaccaccaaacctggctaatttttttgtatttttagtagagacgaggtttcaccatcttggccaggctggtcttgaatttctgacctcatgatccacccgccttggcctcccaaagtgctgggattacaggcaacagccaccgcgtccaccctctctcagtcttatagaaaaagccttcagtcttccaccattaagtgtgatattccctgctggtctttagtaaatgccctttgtgagattaaaaaagttttctgctatttcaagtttattcagtctttatcattaatagctgttgggtttaatcaaatgcattatctacttctatgtgagacgatcttgtgggtttagtcctttgtttccttaatatggtgtattatattaattgattttcagatactaaaccaaccttgcattcctgaagtatgtctgacttggtcatcatgtgtaatcctttttgtattttgtgggattccgtttactattgttttgttgggaatttttgggtgtatattaatgagggctattagtaggtagtttcctttccttgcaccatttatttatttatttatttaatttgaggtggagtctcgctctgtcacccaggctggagtgcaatggcacagtcttggctcactgcaacctctgcctcccggtttcaagcgattctcctgactcaagcctcctaagtagctgggactacaggcgcatgccaccacaccaggctaatttttgtatttttagtagagatggggtttcgccattttggccaggctggtcttgaactcctgacctcgtgatctgcctgccttggcctcccaaagtgctggggttacgggcatgagccactacatctggcctccttgcagtatctttggctttgatctcagggtgatactactctcatggattgagtttggaaatatttattcttcctctattttctggaagggttgatagactattgatattacctctttaaatgtttgacataatccaccagtgaaacgatctgagcctgaactattatttatggaaagatttttatttaaaaattaaatttatttagctgttggagatctattcarattttttatttcttcttgaggcagttttggtaatttgggggtttttttagaatttttttctattttgtctcagttgctgacttcagtattctcttacaatctttttactttctgatgtcagtcataatgtttcctctcttttttctaattctgatcatttgtttcttctcttttttcttgtttaatcttgctaaagtattgatttttttaaagagcctacttttgttcaaaaacarctaattcgtttttcttttgctttccatttcatttatttccactataatagctattatatgcttcattctgcttgcactggatttaaattgctctttttcaagactattaaggtgaaagtttagattattaatttgagataatttcttttttctaacatagatatttaaagttattaattttcctgtaactactgttttaactgcatcctataagttttcatatgttgggtttctattgttatttagttcaaaatactttgtaatttcccttgcaactttctctttgacctacagtttttaaaaatgtgtggtgtaggccaggcgtggtggctcacacctgtaatcccagcactttggaaggccgaggcgagcagatcacaaggtcaggagatcgagaccatcctggctaacatggcgaaaccccgtctctactaaaaatacaaaagattagccgggcatcgtggtgggcacctgtagtcccagctactcgggaggctgaggcaggagaatggcgtgaacccgggaggcggagcttgcagtgagccaagatcgtgccattgcactccagtctgggtgacagagtgagactccacctcaaaaaaaaaaaataatgtttagtgtaatttctaaattattgtgcggttccaaaatttccttttgttactaatttccagtttacttctattataattactgaacatactttgtctactttcaatcttctaaaatttattcaggcttgttttatgacctattatgtggtctaccctagagatagttcagtgcacttgaaaatagtatgtattctggttttgtttagtggagtgttctataggtatccgttagttctgtttggttgatagtgtcttcgaggtcttcggtttccttgttgatttctaattgtgttatccattgctgagagtcaagtattgaagtgtctaactactattgttgaattattcatttataccttcaattctgtcagtttgtgcttcatgtattttgggactctattgttaggtgcatatgtttataattgtaagatttttcctgatgtactaagacttttgttgttataagacgccccttgtgtctttattaactttgttttttgtcctaaagtatatttggtctgaaattagtatagcctctccagttcttttttgggttttgtttttgttttttgtttttttgttgttttttgttttttgcatgctatatttttgcaagccttttgctttcaacctatttgtgtctttgaattgaaagtctctgacaggctgcatagaattggattctgttttttatccagtctgacaatctcagccttttgatagggaagtttaatccatttgcatgtaatataattatttctatggtaggatttagatttgccattttgctatttgttttctatatgtctgtgtctctttgttgcctctgttcctccattattgctttcttttgtgttatatatattttttctagtgaaaaaatcctttggttttctttactaaatatttttaaattattttcataatggttactccagagattacaatatgtatcttatcttaatctagttcaaatcaatattattatagtagtatgatatgaactacaattaattatagcagttataatttaatactgcgtctttacatttgcctacatttctctccactgcaaatggtgccatgcatggtctataaattttcatgtgcatatgttttaataaactttaattttttataatacatatttttttttagatggagtcttgctctgtcgccacgctggaatgtagtggcacgatctctgctcactgcaacctccaacccccgggttcaagcaattctcctgcctcagcctcccaagtagctgggactacaggcacacactgccacgcccagctaatttttttttttttttttttttttgkattttagtagagacgggtttcaccatgttgcccaggctggtctcaaactcctgagctcatgcaatccacctgcctcggcctcccagagtggtaggattacaggtgtgagccaccccccacccctcttttataatatagttgtacatattttatggtagtaagttataaaataaactactgtctacatatattttatgcattcgtgatatacctaattcttttttaatttttaaaatatttctaggccacagtttgtctgcagcttttttcaaattgttgcaaatcttccaaaaaaaaaatttcaatacatttattgaagaaaaccagtgctcaagtggacccatacaattcaaacctgtgttgttcaagggtcaactgtattcagtattataagtaatctagagattatttgaagtaggaggctgagtacggtggctcatgcgtgtaatttcagcactttgggagcagaggcaggcagattgcttggacccaagagttcaagaccagcctggacaacatggtgaaacctcatctctactaaaaatacaaaaaaattagcagggtatggtggcatgtgcctgtagttccaactactcaggaggctgagatgagagaatctcctgagcctgagaagttaaggctgcagtgagccatgatcatgccactgcactctagcctagatgatgggagtgagaccctgtctcaaaaataaataaataaaatagatgggaggatgtgcataggttatttgcaaatactatgccatttacataagggacttgagcgtctccaggttttggtatttgcagggagtcctggaaccaatcccccacagattcccaaggacaacagtatttttaagcctggcttccttgggttcactgtgaaattagcatagtttagtgatcagccaatgattggtcagaatatgtctttaaataccttaagccaacaagtcttccacctttgctaagggaaactgtatgtgaaggcatacttccaaatttcaggcagcttacaaatcagccttagyatttacttcctgcttgtgcaggatctcaaggtcagccacaggtgagcgatggagctcctttcctttcccaggtctttcctcagcatgcacacatccctgtaacatgcataaagtcttctagattctcagcaatatatcagaacttttcaagttccctaggtctttctttgaaattttgggccaagttctttgttgttttcaataacagcctggggatagggcttttccacagagcagagcttccaatcagatcaaatagttctgatgccctgggatccaggctttcgaggggagatgtgagaccagtaaaaatattaactgttcactggagatggtggtttcaacagagctccaaaagggtgcatccactctgttggctgcaaggctgccatctgttcacagctagcatgccagcaccggggagcagggcaatgggcatatccccaagttaaatctccaaagaccccattgtttttatctaaaatcagcagtttttcttggataaatgagtttgttcgttccctgcctttggttacttagttcaggaatggttgattttaatcgttttgccaatatgttaacctaattcctctctgtcattccagaagtcccacccccttatgtaaagtttcttgctcatttatctcaaatgttttcctataaaatttttatgcgctgacacaaaaacttttacatgattgtttattacagcattattcataatagccaaaaaaataaaaacaagccaactgtccatcaactgatgaatggacagattttggtgtatattcatacggtgcaatattattcagctatacaaaggaatgaagtactgatacatgctacaacacggatgaaccttgaaaacrtcatgctagggctggatgcagtggcttgcacctacatgtagtcccaactacatgggagctgaggcaggaggattgtttaggcccaggagttggaagctgcagtgagctgtgatcatgccactgcactccagcctgggcagcagagtgagaacccatcgtaaaaaggaaggagagagagagaggggggtggggagggggagagggagaaagagagagagtggagagagagaaagagagagaagaaagaaagagaaagagaaggaaggaagggagggagggagggaggaacggagggagggagggagggagagagggagggaggaaagaaaatatcatgctaagttaaagaagacagataccaaaggccacggattgtatgattccatgtacatgaagtgtccagaacaggcaaaggcatagagacaaggggtagatgtgggatttgggctagggaagaatggagagtgactataatgggcataagattggatcaggggatgatgaaaatgttctaaaattcagtagtaattatgattacataattctatgaatatactaaaaatcactgaagtacacactttaaaagggtgacttttatggtactgtgtataaattatatcacaataaaactttatgagccggccgtggtggctcacacctgtaacctcaaccctttgggaggccaaggcaggcagattacttgaagtcaggagttcgagaccagcctggccaacatgatgaaaccctgtctccactaaaaatacaaaaattagctgggtgtggtggcacatacttgtaatcccagctacctgggaggctgaggtaggagaatcacttgaacctgggcagcagaggttgcagtgagccaagatcgcgccactgcattccagcctgggtgacagagtaagactgcatctcattaaaaaaaaaaaaaaagaagaagaagaagaagaagaagtccgggcacagtggctcacacctgtaatcccagcactttgggaggccaaggcaggcagatcacgaggtcaggagtttgagaccagcctggccaatatggtgaaaccctgtctctactaaaaatacaaaaattatccaggtgtggtggcacacgcgcacacctctagtcccagctactcgggaggctgaggcagaagaatcactcgaacccgggaggcagaggttgcagtgacacaagatcgtgccactgcactccagcctgggtgacagagtgagactccgtctcaaaaaaaaaaaaaaaaaattttgtcgggtcacaggaggatcacttgggaccaggagttcaagaccagccagggcaacataacaataccccatctctacaaaaaaaaattttaattagccaggtgtagtgacacacacctgtggtcccagctactcaggagactgaaatgagaggattgcttgagcccaggagttcgaggcctcagtgagctgtgatagcaccattgcactccagcctgggcaacagagtgagaccctgactcaaaaagaaaaaagaaagaaaatgaaaaatgttttacagcaaagtattttaggtctagaataatgatcaactgagttaccctcttcatttatttatttactcatccatttcatgagatgatttaaagacagtgcccggcataaaggaagcactcaagtgttaggggttattagtggtaattaaagtaagacatttaagtgccagtgtaccactgtgtaacaaaatgaatgaaatattgattctgcttctaagagctcagaaatctgaagagtacacaaacgtataaccaaatattaataattacaacaatgggaaaagtgtgtaacagagaagtataaaagccactataggggtacagatggaggactttagtctgggaagaacaaaggaggccttctgaagggaaatgacctaaatagaggttctaacacccagtgacctgctaaaatgagttgaagagtttggtgggtggaaagcagaggaaggagagcattccaggccatagaaacagtgtgtgcaaagatgaaacttgcgagggcatgcgtgatcacgtggggaaacagcaaacgaggagactggaaaatcaggtaaagagtttagagtttctcctgtggttaagaggattcacccaaggagcctccgtaagagagtgtcgaagtaactagcaggacaagagagatacattcaaggatacaggactcatgataggagcatggttaggagaaccaaggtgaagcctggactgaggaagcagtagaccaagaagtgctgaaggagagagaggcaagaactgaatatggaactaccattcgacccagcaatcccactaccaggtagatatccaaaggaaaataaatccttctaccaaaaggacacatgcacgtgtatgtttattgcagcactgttcacaatagcaaagacatggaatcaatctaggtgcctatcagcagtgggctggataaagaaatatggtgcatacacaccatggaatactacacagccataacaatgaaatcatgtccttcacagcaacatggatgcagctggaagccatcatctgaagcaaattaacgcaggaaacaaaaaccaaatgccacatgttgtcacttataaatgggagctaaacagtgggtacacgcagacatgaagatggcaacaacagactctggggactactagagaggggatggagggaggggacaagggtcgaaagactaactgttgggtactgtggtgctcactacctgggtgatgagatcactcataccccaaaacctcagtatcacacacaatatattcatgtagcaaacctgcacatgtaaccccaaatccaaaaagttggaaacaaggaaagagagagaagaaaccatatttaaatgtatataggaagtagaaacaagaaaatatgattatcagctggatttggacagttaagaaaaagagacaggataaatttctggatttctagtttggttgactgggtagatttcagtgccattcatctcaatgtggattaaaaaaataagaaaatttgaggagaaaggtatgtgttcatttggggttcatgacaattttttggtacttgtggaacatctggatagaaatgtacagtagttacttaaaacttcagttttgaagttcaagagatctctagactacaaatagatttgggagtgattagcataaggttggtagtagaagccattgaggagatgagattgtccataaacagaatgtacaataaaaacagaatataaacaattataaagtattagggaataaaagcatgtaagggcaagttagaggaagaggaacccaaatgagaatccaggctggattccccaagaaatagaaggagatgttggccgggcgcagtggctcacccctgtaatcccagcactttgggaggccaaggcaggcagatcacttgaggtcatgagttcaagatcagcctgaccaaaatggtgaaacccccctctctactagaaatacaaaaaaaattagctgggtgtggtggcatccgcctgtaatcccagctacttgggaggctgaggcggagaatcactttaacccaggaagcagaggttgcagtgagctgagattgcaccactgcactccagcctgggcaacagagtgagactctgtcaaaaaaaaaaaaaaaaaaaaagaagaagaagaaggaggaggaggaagaggaggaggaggagaaggagaaggagaagacagaataggaatgtggaagttaaaaggccaagtttccattggaattaccttcaacactatgtgatctctcaaagtcatgatttctttatctaacagtagccaggcattggataaatggtaacaaatgtcaggtattattataaagtagaaataactcaagaggcaactacaaaagtaaacaactttaatgaaagttacatttctatacggattataaagccattataggtaaggttactgaaaagaaaggcttcgttttaccaaagcagattgactactaaaatgccctgtgtttgattccctgaaactagttcaacagagaactgtcacctactaagtaccattgtccacaccaaagcccaagggatcaaagcctctcagtttaagccattaatgtttatgagtatgatttgataaaagtgtcatgaccaaggccaaatacgttcatttttgaaatacaatgaagttagattaacctcctgaggccataaaatgtttcctctgggtcccatggaagagccttacattccaatacttttgtaagtcagagagaagacaacgtgaaaatgaacaaaacttagggtgcagatggctccataagatggtccatcacctccaaagattctcccattagactccataacctggaagcatttccttctttgggggaaaaagcatcccagccatctgaagttatttccagtaatatgttgcaaagttagtcattttgtcttttgagacactggtttaaaactttgtggtctgatgattactgtacacgctcttcttcgcaatggcagccttccrgatacaaagggtcaagcttgtttgtgtggttggctcactgtcacctaagaacttcccattattggttgtactttaaagtcatgataatgaatgggacctcccagcccaaaaaatcaaaatctccctttagttctgataagctaggaaaagttaacttagcataagtaatttagggagaaggatggaaaaagaagagtgccatttcgttagaccaacattggaaataattaacgtaacatgagagagttaatgtttctgaatrtgcacactgtctttcttctgagcagatcaactttcttttgaggtaaagacaaagtcatcgatgcactattttggtgtttatttaatgagcgtttctgcatccggagcacatgggcatatagtaacctttatattgatagcggagggctctgttctataagtgggcaagataaaacagttcatttccttatattttgtgtgttattaatgtatgcattgttttatcaggaatgactcaccagagaagaactattcaattccttctgaatgatgtttcactttgaaatttgggaattgtgccttatttcataacgagtggccagagtgaatgattgttgcaatgatgcctcatttccccattcagccagcagacgctcatttttcaaaacgccggactttcacttcttctttgaatatacaccatttatgaaacagccactcccgtcactgccctgataacatttggaatggcatcatcatttatgttggcaatatcattgctctgggtcaggttgcaaaatagtcaaagaaacacatttgtcatctaatgcgcaagttctaaagagaagtgaactttaggttataaatgcttccagctacgattctctttttctaaaaaagatcttaaaaggaaaacgaatttttcagtttgtttgttggttgaaatttttggcattggtattataaagcgatgcagctggaatcaccataatagcacgtaacacatggaaaatattaccttgacctggcaaactattttcatgtttgaccactacttgaaggatccatagggcacatttctagaacaatttttttcttttacttttttatattaaaaaatacagacagggcctcactatgtagcccaggctggtctgggctcaagagttccttccacgtagacctcccaaagtgctaggattacaggtgtgagccacactgcacccagcctagtttatcttttgtaacagtaaaatgcaataagagatttactttcgatgttatattctagatctgtcttaatttkgtttctccctcagtgcagctgcaaaaagtggttgcttatcacattctcagggtttagtattattaagaatagtttttggctgttatatattaagtaattccayacaagctttaagaatagatgcaatcgtacacawtgctactaagaggacacttagaatrtagggaatatctttacaatttgaggacatcaagatggatgtacatraatgtaatgtgtaaatgtatgttttttaaaatccacatttctctaattaytagtgagatcgagcattttgtcatatgcttggtgatatataaagttactttcctgtgaatttatatatttattttcttatgattccctctttataggctttgaccattttttattgtgttggtttcattatttttattcataatttaaatattatgcatgtgaaccctttttgctgcttagtgttgcaaatatgttcttatacacaatgactatttttcttaacattgttgacaggatctttggctgaacaaaagttttaaattttcatgtacttccattcattaacctttctctttatggcatctaagtttaccacgatgcttctaaagtctttctctaccatattcctttgcatttstttaggccttctttattgccttccataaggctttataggtttttttattcataaaacattgataaatttctctttaaattgtttaagtatagaaattgagattataaaatataatctatattgtattggagaactttaagtttttaaaatattatttttcatctatatgcttagtaggaattcatttttccccaagtggaggcaaaaaaggtctaactccattattaaatacttgatcttttccttgcctattccaactgccacgtttgcaatatattatattcaaacacatacttagttctgtttctggagtccttatttcattctactgctttgtcagttcctttactaacatgacccattttcatcattgcagctataaagtatagctgaggccgggcatggtggcacactcctgtaatcccagcacttggggaggccaaggtgggcagatcccttgaggtcaggagttcaagaccakcctggccaacatggtgtaaccccttctctacaaaaatacaaaaattagctgggcttgatggcatgttcctgtaatcccagctgctctggaggctgaagcaggagaatcgcttgaacccaggaggcagagattgcagtgagcygagatcrcactactgcactccagcctgggcaataaagcaagactccatctcaaaaaaataaataaaaataaaaaataaaatatagctgagatcagataaagggcattcctccccttgttttttatttatttttattttctggctgttcttagaacctttagacctccttactcatcaaccacatttaattttcgtgtggattctcaaatctatctcttcctctctactaccactaatacttaactgagcccttttcccttgtttagattatagcaacattgcaaccaccttaactggccttctttctctagtattgcccagtttagtctaccctctaaactccgtaaggaaatctgattattttgaggactcacgtaattttttacaacggttttgtggaaatataatacacataacatataattcaccattttcaagtgtacaatttaatgattttcatatattcagagttgtgcaaccaacactataactaattttagaactgttttatcactgcaaagagaaactccatacccttcagatatcacttcctaatgccaccatcttcctatgctttccccrcccagctctagtcaaccactcacctactttctatctttagcgatttgcctattctggacatttcatgtaagtagaatcatgtaatatgtggtcttttgtaatatgaggcttctttcagttagcatgatgttctcaaagttcatctatattatagcatgtatcaatacttcattcctttttttagtcaaatagttcatttaccacatttcatctactcagagttagacatttgggttgcttccaccttttgtctgttatgaataatgctgctctgaatcttatataaactttaaaatgagtttgttacatttgaataaaatttctatggagatttatggggcagtggcttatgcctgtaatcccaacactttgggaggccaaggtgggcagatcacttgaggtcaggagtctgagaccagccgggccaacatggtgaaaccccatctctactaaaaatacaaaaattagccggccgcggtggcgtgcgtgtgtcattccggctactcgggaggctaaggcaggagaatcacttgaacccaggaggtgaaggttgcagtgagctacactccacctgggcgacagagtgagactccatctcaaaaagagaaaaaaggtaaaattgacatggagatttttgtcgcaattacgttaaatttatagataaatttagggaaaatttaagtttttttacaggaaaattgttgtgggggttttttgcattaatttagcacttacttagtgccttccataaattttatcattttcttcataaaatttgatgcgtttcttttttgtaatttctgtgtattttatgttttgcaattttaaagggaatttttttcattaaaattttatttgatgttacgtggaaaagctgttaatttatgtattgttaccttgtatctagctaccttgaggatttcccttaaaagttctcatggtttttcagatgattttctcttactttacagataattgattacataatctataaatactcaaatcttatctctttacaatgtttatattacttatttttcaaaattttctgatttcactggctaggatgataaataatagcggctatgggggcatacatctttttccctatcaactttaatttatttaattaggaacaatgttacagccaaaatgaaagaaatctaataaagaaagaaaaatcgcactaataccatgtgaaaagaaactttaaaaataactaacattggccgggcacagtggctcatgcctttaatcccaacactttgggaggccgaggcaggcaggtcacttgaggccaggagttcaagaccagcctggccaacatagcaaaaccccatctctacaaaaagtacaaaaattagccaggcatggtggtgtgtacctgttgtctcagctattcaggggctgaggcatgagaattgcttgaacctaggaggcggaggctgmagtgagccaagatcatgccactgcactccagcctggacgacagagcaagactctgtctcaaaaattaaaataaaggccgggcgcggtggctcacrcctgtaatcacagcactttgggaggccgaggtgggcggatcacgaggtcaggagatcgagaccatcctggataacactgtgaaaccccgtctctactaaaaatacaaaaaaatagccaggcgtggtggcaggtgcctgtagtcccagctactcgggaggctgaggcaggagaatggcatgaacccgggaggtggagtttgcagtgagccaaggttgcrccactgcactccagcctgggtgacacagcaagactccgtctcaaaaaaataaaaaaaaaattaaaattaaataaaataactaacattaaattgattatatatgaatagaaggactgaggaagaatataccccaaactgctatgagtagttcttttaagggtatggaattctacagacaggaacaaggggagacagagggacccaccttctactttgtgcacatctgtatagcttggctatttgcaattagcattttctacttttataattttacaatgcatcctagaataaatccaaagaatacaaagtgtgtagtgacttgtctttacatataaagattgagagttgtgcctttttaatggctaaggtgtaagttctgttcacgaagttcaatttcaactatattagagagttaaagatggaaggaatggacaccgaagcaaggaaggaaggaaggaaggaagataaattgatagataaaaatatagatatagatatatacccacttactgttaccaaacagtccaaaaacaaaaagatggccacaggaaagaaatagatacaaagaaaagctttacaaattacacaagtcagaattcctgggcaggacaattgctgcttattatctgcttcctaggatggctagaaaaatgtgaatgaggcaattagttcatggttgaagagaatgttaattgctctcgaatgtcatcagatcttgatgatttcctgtcaaaagctcttccttctgagacactgtgggggagtttagtaatcacagaagggcatctatgtcatttgtcccagtrtttagggtgctacataaatgacaatagtgccacatsttattgcttcctgcattttggaatgtgactaatgcacctcttccattgttcccttccagaatctccaatgaacactcacccaaactccagatccggagtcatagttacctgagggcagtgagtgaagtctccatcaaccggagcctggacagcctggaccctgcaggcttgctcacatcaccaaagttccgctccaggaatgagagctacatgcgagccatgagcaccatcagccaggtgagggccgtcagggcagcggtggtcaggagccattagtggcaggaaggttagtgagaattgagaggscatgaggtggggaggcagtcattcatccagtagaccattgatggatcagacaggaggtccagtcaagtgctgcaaagagcatgccatgggttcagccgcagtaagcccccggtatcaatggtctgccaggaggtggggccctctgtaagtggataaagcacaatgaagagggtccttggaaattcactagagatcaggagttcaagatcagcctggccaacatggtgaaaccctgtatctatcaaaaatacaaatgtaagcctggcatggtggcacccatctgtgatcccagctactctggaggctgaggcaagagaatcacttgaaactgggaggcagaggttgcagtgaaccgagatcacgtcactgcactccagcctgggcgacatagcaagactctttctctgttaaaaaaaaagaaaaagaaaaagaaaacttcggcttttaaacaagcaagggatatgaatctaactttgacataggataactaatctggcaaaaaaacataggaaagattggagagaatgagaagctagaagcagagaggctagtttggaagacactgtgatcatcaaggtgagaattaatgttactgnnnnnnnnnnnnnnnnnnnnnnnnnnnnnnnnnnnnnnnnnnnnnnnnnnnnnnnnnnnnnnnnnnnnnnnnnnnnnnnnnnnnnnnnnnnnnnnnnnnnnnnnnnnnnnnnnnnnnnnnnnnnnnnnnnnnnnnnnnnnnnnnnnnnnnnnnnnnnnnnnnnnnnnnnnnnnnnnnnnnnnnnnnnnnnnnnnnnnnnnnnnnnnnnnnnnnnnnnnnnnnnnnnnnnnnnnnnnnnnnnnnnnnnnnnnnnnnnnnnnnnnnnnnnnnnnnnnnnnnnnnnnnnnnnnnnnnnnnnnnnnnnnnnnnnnnnnnnnnnnnnnnnnnnnnnnnnnnnnnnnnnnnnnnnnnnnnnnnnnnnnnnnnnnnnnnnnnnnnnnnnnnnnnnnnnnnnnnnnnnnnnnnnnnnnnnnnnnnnnnnnnnnnnnnnnnnnnnnnnnnnnnnnnnnnnnnnnnnnnnnnnnnnnnnnnnnnnnnnnnnnnnnnnnnnnnnnnnnnnnnnnnnnnnnnnnnnnnnnnnnnnnnnnnnnnnnnnnnnnnnnnnnnnnnnnnnnnnnnnnnnnnnnnnnnnnnnnnnnnnnnnnnnnnnnnnnnnnnnnnnnnnnnnnnnnnnnnnnnnnnnnnnnnnnnnnnnnnnnnnnnnnnnnnnnnnnnnnnnnnnnnnnnnnnnnnnnnnnnnnnnnnnnnnnnnnnnnnnnnnnnnnnnnnnnnnnnnnnnnnnnnnnnnnnnnnnnnnnnnnnnnnnnnnnnnnnnnnnnnnnnnnnnnnnnnnnnnnnnnnnnnnnnnnnnnnnnnnnnnnnnnnnnnnnnnnnnnnnnnnnnnnnnnnnnnnnnnnnnnnnnnnnnnnnnnnnnnnnnnnnnnnnnnnnnnnnnnnnnnnnnnnnnnnnnnnnnnnnnnnnnnnnnnnnnnnnnnnnnnnnnnnnnnnnnnnnnnnnnnnnnnnnnnnnnnnnnnnnnnnnnnnnnnnnnnnnnnnnnnnnnnnnnnnnnnnnnnnnnnnnnnnnnnnnnnnnnnnnnnnnnnnnnnnnnnnnnnnnnnnnnnnnnnnnnnnnnnnnnnnnnnnnnnnnnnnnnnnnnnnnnnnnnnnnnnnnnnnnnnnnnnnnnnnnnnnnnnnnnnnnnnnnnnnnnnnnnnnnnnnnnnnnnnnnnnnnnnnnnnnnnnnnnnnnnnnnnnnnnnnnnnnnnnnnnnnnnnnnnnnnnnnnnnnnnnnnnnnnnnnnnnnnnnnnnnnnnnnnnnnnnnnnnnnnnnnnnnnnnnnnnnnnnnnnnnnnnnnnnnnnnnnnnnnnnnnnnnnnnnnnnnnnnnnnnnnnnnnnnnnnnnnnnnnnnnnnnnnnnnnnnnnnnnnnnnnnnnnnnnnnnnnnnnnnnnnnnnnnnnnnnnnnnnnnnnnnnnnnnnnnnnnnnnnnnnnnnnnnnnnnnnnnnnnnnnnnnnnnnnnnnnnnnnnnnnnnnnnnnnnnnnnnnnnnnnnnnnnnnnnnnnnnnnnnnnnnnnnnnnnnnnnnnnnnnnnnnnnnnnnnnnnnnnnnnnnnnnnnnnnnnnnnnnnnnnnnnnnnnnnnnnnnnnnnnnnnnnnnnnnnnnnnnnnnnnnnnnnnnnnnnnnnnnnnnnnnnnnnnnnnnnnnnnnnnnnnnnnnnnnnnnnnnnnnnnnnnnnnnnnnnnnnnnnnnnnnnnnnnnnnnnnnnnnnnnnnnnnnnnnnnnnnnnnnnnnnnnnnnnnnnnnnnnnnnnnnnnnnnnnnnnnnnnnnnnnnnnnnnnnnnnnnnnnnnnnnnnnnnnnnnnnnnnnnnnnnnnnnnnnnnnnnnnnnnnnnnnnnnnnnnnnnnnnnnnnnnnnnnnnnnnnnnnnnnnnnnnnnnnnnnnnnnnnnnnnnnnnnnnnnnnnnnnnnnnnnnnnnnnnnnnnnnnnnnnnnnnnnnnnnnnnnnnnnnnnnnnnnnnnnnnnnnnnnnnnnnnnnnnnnnnnnnnnnnnnnnnnnnnnnnnnnnnnnnnnnnnnnnnnnnnnnnnnnnnnnnnnnnnnnnnnnnnnnnnnnnnnnnnnnnnnnnnnnnnnnnnnnnnnnnnnnnnnnnnnnnnnnnnnnnnnnnnnnnnnnnnnnnnnnnnnnnnnnnnnnnnnnnnnnnnnnnnnnnnnnnnnnnnnnnnnnnnnnnnnnnnnnnnnnnnnnnnnnnnnnnnnnnnnnnnnnnnnnnnnnnnnnnnnnnnnnnnnnnnnnnnnnnnnnnnnnnnnnnnnnnnnnnnnnnnnnnnnnnnnnnnnnnnnnnnnnnnnnnnnnnnnnnnnnnnnnnnnnnnnnnnnnnnnnnnnnnnnnnnnnnnnnnnnnnnnnnnnnnnnnnnnnnnnnnnnnnnnnnnnnnnnnnnnnnnnnnnnnnnnnnnnnnnnnnnnnnnnnnnnnnnnnnnnnnnnnnnnnnnnnnnnnnnnnnnnnnnnnnnnnnnnnnnnnnnnnnnnnnnnnnnnnnnnnnnnnnnnnnnnnnnnnnnnnnnnnnnnnnnnnnnnnnnnnnnnnnnnnnnnnnnnnnnnnnnnnnnnnnnnnnnnnnnnnnnnnnnnnnnnnnnnnnnnnnnnnnnnnnnnnnnnnnnnnnnnnnnnnnnnnnnnnnnnnnnnnnnnnnnnnnnnnnnnnnnnnnnnnnnnnnnnnnnnnnnnnnnnnnnnnnnnnnnnnnnnnnnnnnnnnnnnnnnnnnnnnnnnnnnnnnnnnnnnnnnnnnnnnnnnnnnnnnnnnnnnnnnnnnnnnnnnnnnnnnnnnnnnnnnnnnnnnnnnnnnnnnnnnnnnnnnnnnnnnnnnnnnnnnnnnnnnnnnnnnnnnnnnnnnnnnnnnnnnnnnnnnnnnnnnnnnnnnnnnnnnnnnnnnnnnnnnnnnnnnnnnnnnnnnnnnnnnnnnnnnnnnnnnnnnnnnnnnnnnnnnnnnnnnnnnnnnnnnnnnnnnnnnnnnnnnnnnnnnnnnnnnnnnnnnnnnnnnnnnnnnnnnnnnnnnnnnnnnnnnnnnnnnnnnnnnnnnnnnnnnnnnnnnnnnnnnnnnnnnnnnnnnnnnnnnnnnnnnnnnnnnnnnnnnnnnnnnnnnnnnnnnnnnnnnnnnnnnnnnnnnnnnnnnnnnnnnnnnnnnnnnnnnnnnnnnnnnnnnnnnnnnnnnnnnnnnnnnnnnnnnnnnnnnnnnnnnnnnnnnnnnnnnnnnnnnnnnnnnnnnnnnnnnnnnnnnnnnnnnnnnnnnnnnnnnnnnnnnnnnnnnnnnnnnnnnnnnnnnnnnnnnnnnnnnnnnnnnnnnnnnnnnnnnnnnnnnnnnnnnnnnnnnnnnnnnnnnnnnnnnnnnnnnnnnnnnnnnnnnnnnnnnnnnnnnnnnnnnnnnnnnnnnnnnnnnnnnnnnnnnnnnnnnnnnnnnnnnnnnnnnnnnnnnnnnnnnnnnnnnnnnnnnnnnnnnnnnnnnnnnnnnnnnnnnnnnnnnnnnnnnnnnnnnnnnnnnnnnnnnnnnnnnnnnnnnnnnaactgcagggcaggctccaagggcagagtagggagggagccagggaaagctgtcatgtgggatttcagtgctgacccatcgtgtgtttccttgctttacagaaatctccaagaacatgcaaacctattcgtgctrgttactgcttgtccaatgatatacattatcccaattctcagggaaatagctggagcctcattttggtgcattttggacttgttttgtttttatctttttcacaataggtaatataacatttaaaactttttggagcacatatttattctgcatggcctaaaggtcacacagtcattgagaattataaaatggtctacaaacctaggggtcatacatgcagaatacatcagtggatttaaaatattctgttggaaaaatatttatatacattcatggttttcataactttatggagaacttttaatttcccccagcagcacactacccttgcagctcactgtttttagtccctggctgcacatttgaccttctttagggcaacatcactttctaatgatagcttagtaagataccaacaaatcattgcacagacacatgggagaagtaatgctgtcaggtcaagcactgcaattccatgacgtagccattcggccttaggtaaaatacagaaagaatggccagctgaaatggattcctaatgacatcatttttctagttccatattcaattttcaagtaacacagtatcttttttttcttttatttttatactttaagttttagggtacatgtgcacattgtgcaggttagttacatatgtatacatgtgccgcactggtgcgctgcacccactaacttgtcatcttgcattaggtatatctcccaatggtatccctcccccctcccccgaccccacaacagtccccagagtgtgatgttccccttcctgtgtccatgtgatctcattgttcaattcccacctatgagtgagaatatgcggtgtttggttttttgttcttgcgatagtttactgagaatgatgattttcaatttcatccatgtccctacaaaggacatgaactcatcattttttatggctgcatagtattccatggtgtatatgtgccacattttcttaatccagtctatcattgttggacatttgggttggttccaagtctttgctattgtgaatagtgccacaataaacatacgtgtgcatgtgtctttatagcagcatgatttatagtcctttgggtatatacccagtaattggatggctgggtcaaatggtatttctggttctagatccctgaggaatcgccacactgacttccacaatggttgaactagtttacagtcccaccaacagtgtaaaagtgttcctatttctccacatcctctccagcacctgttgtttcctgactttttaatgattgccattctaactggtgtgagatggtatctcattgtggttttgatttgcatttctctgatggccagtgatgatgagcattttttcatgtgttttttgactgcataaatgtcttcttttgagaagtgtctgttcatgtccttcgcccactttttgatggggttgtttgtttttttcttgtaaatttgtttgagttcattgtagattctggatattagccctttgtcagatgagtaggttgcaaaaattttctcccattttgtaggttgcctgttcactctgatggtagtttcttttgctgtacagaagctctttagtttaattagatcccatttgtcaattttgtcttttgttgccattgcttttggtgttttagacatgaagtccttgcccatgcctatgtcctgaatggtattgcctaggttttcttctagggtttttatggttttaggtctaacgtttaagtctttaattcatcttgaattaatttttgtataaggtgtaaggaagggatccagtttcagctttctacatatggctagccagttttccaagcaccatttattaaatagggaatcctttccccattgcttgtttttctcaggtttgtcaaagatcagatagttgtagatatgtggcgttatttctgagggctctgttctgttccattgatctatatctctgttttggtaccagtaccatgctgttttggttactgtagccttgtagtatagtttgaagtcagatagtgtgatgcctccagctttgttcttttggcttaggattgacttggcgatgcgggctctttttttgttccatatgaactttaaagtagttttttccaattctgtgaagaaagtcactggtagcttgatggggatggcattgaatctgtaaattaccttgggcagtatggccattttcacgatattgattcttcctacccatgagcatggaatgttcttccatttgtttgtatcctcttttatttcattgagcagtggtttgtagttcttcttgaagaggtccttcacatcccttgtaagttggattcgtaggtattttattctctttgaagcaattgtgaatgggagttcactcatgatttggctctctgtttgtctgttgttggtgtataacaatgcttgtgatttttgtacattgattttgtatcctgagactttgctgaagttgcttatcagcttaaggagattttgggctgagacaatggggttttctagatatacaatcatgtcgtctgcaaagagggacaatttgacttcctcttttcctaattgaataccctttatttccttctcctgcctaattgccctggccagaacttccaacactatgttgaataggagtggtgagagagggcatccctgtcttgtgccagttttcaaagggaatgcttccagtttttgcccattcagtatgatattggctgtgggtttgtcatagatagctcttattattttgaaatacatcccatcaatacctaatttattgagagtttttagcatgaaggcttgttgaattttgtcaaaggccttttctgcatctattgagataatcatgtggtttttgtctttggctctgtttatatgctggattacatttattgatttgcgtatattgaaccagccttgcatcccagggatgaagcccacttgatcatggtggataagctttttgatgtgctgctggattcgttttgccagtattttattgaggatttttgcatcaatgttcatcaaggatattggtctaaaattctcttttttggttgtgtctctctgccaggctttggtatcagaatgatgctggcctcatcaaatgagttagggaggattccctctttttctagtgattggaatagtttcagaaggaatggtaccagttcctccttgtacctctggtagaattcggctgtgaatccatctggtcctggactctttttggttggtaagctattgattattgccacaatttcagatcctgttattggtctattcagagattcaacttcttcctggtttagtcttgggagagtgtatgtgtcgaggaatttatccatttcttctagattttctagtttatttgcgtagaggtgtttgtagtattctctgatggtagtttgtatttctgtgggatcggtggtgatatcccctttatcattttttattgcatctatttgattcttctctctttttttctttattagtcttgctagcggtctatctattttgttgatcctttcaaaaaaccagctcctggattcattaattttttgaagggttttttgtgtctctatttccttcagttctgctctgattttagttatttcttgccttctgctagcttttgaatggtaacacagtatctttaaggataatttcaaacgtcctgttgtagttgcaacattgtcattattcaaaggagaatagtttcctcttcaaagcaatgctactgtrtataccctagacttttcaaaaagaggttggcttttaagatgttagagctattttctcaaatagatcattagtagaagctataatactatagaatttaagtgcattatatcttatttccctttaaaacctgacacattattcatcaaaggctcctagaaagttgagtacaccaaggagttggtctagaaaaactaaattgcttctgtcatttattactcacagcagtaaaagagccctaaaaacagattgtgcttggatgataaggaaaaaaattaagtatgtttttatgtttattattttatatttttaccataggtacatctaatttaaaatgagggcttttaaagtagggcttgagaagaaagaattgtatttatagaaagtccaatattttaaaaatatgtcatgtagtcactgtcatttccaagttaatttatgtctttatttatttcaagtccaaatcctaggtattttcatctggaatggcaaactagaagcccgcagacatattttctctggcaacatgttgggtttctacatccttttctaaaattaatgtaactaggcagctgttttaataccagcagctcagccgtgactttgacttaggccatcccctcattatgtgtgtgtgtgtgcatgtggcatggtgtgtgcttgcgtgtgtgtgtgtgtgtagagagaaagagaatgaaatggaaacctagataaattaattgtctgtgggtacccagccagtcagtgacagaggctaggaaacccaagtgtcctgactcttaactggtaaatgacttcaatacctgctggtattggtggcaataatattgctagtaatagtagtattaacagtagaaagaataacaatggaataattagttaccgttttatgattacctgatacatgctagtagccttgcttattatctaattaatttcacatctgtcctgtaagaaagatcattttttaatttatgaatctcagtctcagagagttggactaacatatttgtttcctactactattttcccactacactatcacaaaaaataatatccaccttttatggagtgtgtaccatatacctagacatataatatgaattttgggccaagcacggtggctcacgcctgtaatcttagtattttgggagcctcagttggatggatcatgaggtcaggagttccagatcagcctggccaatatggtgaaaccccttctctactaaaaatacaaaaaaaaagttagccaggcgtggtgtcacacgcctctagttccagctactcaggaggctgaggcagaagaatcgcttgaatctgggaggcagaggttgcagtgagccaagatcgtgccactgcactccagcctgggtgacaagagtgagactccgtctccaaaaaaaatacgcattttgacattattttatttttatccttaaagtactcctatgagataagtattattatacttattttacagatgaggaaagtgaagctcagagaattcaagcaaattgtccactatataattgaaggaacactaaaattcttcttcatcccatgtaaaaactacatctaagtaaatttaaaatctaagcaataacacaaagtaacaaaatgcattaaaataaatgttaggagaatatatagatagtattgtggtcagaattattacttgtaataaaatacaaattctagaaaatataaagtaaaagatctattctaaataaaattaaatatttctgtgtggcaaaatatatgataaagttaaaatacaattggtgggaggaatattgacacacattaacaaaaagggtaaatgttatagttgcttaaagtatttctacaaattagtaagaaaagataacccaaaagaatcttggtcaaagcttataaataaaaataatcagagaaaaaaatacaaaagccagtaaataagtcaaaagccagtaaataaagtgacaggtgcctattcacatttgtaggatgtaaatcaaaacagcacagtatcattcttgacatagagcagcaaaaactgagctaacattctattctggtgaccatgttgagaaatgaactctgtattacttgctgtttggactgtaaactgctatgttttagaaagtaggttagtaaaatctacaaaaaggtaaaaatacactaaaaaaaaaggaactagaaaggaaggaaaattttaaaatcaaaaagaaatggggctgagtgcagtagctcgtgcctgttgttccagctactcaggaggctgaggccagaggatagcttgagcccaggaggttgaggctgcagtgagctatgatgacaccactgcactccagcctgggcaacagagctagaccctatctcttagagagagagagagagaaagagagagagagaacacaaatgaagagttaaaaagagaaattgacaaatatcaaaaacagacaaaaaagattagacatacagataatagaagtcccttcagaagaaaatcaaaggaacagaacaagtaagaaaaacaatgatttttttaaactctcctgaaataaaaagttgatttgaagctacatattggaagaacacaccatgtaaacacaccatgtacctgagaaattgaccctgaacaatcaacatcaggacatattcttgtaaaattacaagactttaaagaatttctttaaaaacactttggatttctggacagaaagaacaacttacttaacaaaatgaaaactgagttatcattggaccctttaacaggaatggtttatgctggaagaaaatgatgtgtgtagcattttaatacactcaaggaaaaacatgtgagtcagatttttatatccagaaaaactgactttcaagtataaaacatacaaactgttataagcatggatgaacgcaggaaatattgattccatgaacacattctgagaaatgtactagacaatgagctctaaacaaccaaaatgaccagacataagaactacagatgctcctctacttacaacgggattacatccctgatagacccattgtgagttgaaaataccttaagtcaaaaatgggcattttgtaaacatggtgggatgtgaaaacaaaacaaaaaaaccccacaatatccaaaaaacactggcaacacagtacactttggagtatcagttgtttacccttgtaattgcatggctgagcacctacccagaatctcgagagaatactataccacatatcaatagcccagaaaaagatctaaactcaaaattcaaagtacagtttctactgaatgcatatcaatcttgtatcatcataaagcagaaaaatcataagtcatggaccacctgtagcggcaaacattaaacacaattatttgtagaactaagactaaatgagcgttcactggttggggagcataatacgtttatttgctctgacaatgtaaatatagcacaactatgtaaaaatgagaaaagaatagagggaccacatgtaaaataaaattgtttgctctttaatcatatgtgggcaggggtagtactgataatgttttctgtgcatatactatgggttaaagcaaatggatagttatagaatattccaattccatcatctcccatgtccttgagaaccaagattcttagtatggaataaagatctaagaataaacatatatagaagaggttacataagaaccctatagtatttatatcctagttcttctcactgaaaaggcctaagaacaatgattaacccagtagcaatgacaatatatctccctagtacccagattgtgttcttgtaataccatttcccactaaaaaaagaaagggctttttggaaacatactgattccaggactgggcaggaaaggtttaagttgagtttagaataccttgtcataccagatatcaaagaagttctcaaagattactactttcatgtcaaaaagacccccaaaccaacctaaaaggctcccactgaccaaagatgggacaaatttaagttcattaaggataattatttcaattgacttaaaaccatcaaatatttttaaatctatgagttaatgtgatattttttaaaaatcgattacatatggaatataagagagaacaaatttatcttgaaaattagtaaataaagaagacaaatcaagcatttatcctaccattctatatgaactaaatcattaagtaaacaagtaatgtgaaagagaatattccaactagtagttataaaagtaattatagaatattgcattttgcagctcccaaggattaacaaatctagacattgagcatagataactcctaacaacatagaagagagacaaactagacataatgtgcctcctgatgaaataaacacatggcctctagccttgccaaaaagattgaacctgaagctgatcaaatctctgaatctggattccaattttcaggcaatacaaaatgcagaggaacatgatgaactccaccatgagtatgaaatcagcaaaacccagactatgggaacctctatggggcaaacaatctagatgctcaatagataagtcaaaataagtgtatgttaaaggtgaattttaaagtgtatcagatttttaaaatgggtaagactaactagagcccagggatgcacgcttgggtgaaataaaacataaagaaatgcacaaaagtgaacgcaataaaactcagggtactagttaagcactattagagggagagtggagattgtgaatatgggggcatgtggagggcttctagggtgtccagaaaagttttgcttcttgatctgggtagtggttccaggatgtttgccttattataattcattaagttctatatttattttgtatggttttctgtatctgtgtataatgaaaataaaaggataaaagggaatgaagaagaattctgttaagaatataagtttagccaggagccgtagttcacacctgtaatcccagcattttgggaggtggaggtgggaggatggtttgagaccgggagtttgagagaccagcctgggaaacatggggaaaccctgtctctccaaaaaaaaaaaaaaaagccaggcgtggtggtgcgtacctgtggtcccagctatccaggaaaatgagtcgggaggattgcttgaggctacagtaagccttgttcgtgccactgcactccaccctgggtgacagagcaagaacctatctcaaaaaaagaaaagaatataagtttaacctagagggttaagtaaaaaaccaacaagttgcagaattatatttactatatgattcaagttttatacaaagtagaagaggggacatatatacttatctggaaagataatcatccgagtttaatggttgttaccttgacagaaatattttgctatctctttgtaaagtttggcatgttgattaaaaggggaaaaatgaataaattatatacrtatacatatattatatatatgtctatatatacacccatacatttgcagatgtatatagacatacacacatatatatttgctttatttttggctttgaaataattgcaaccttaaaaaagagtcacacatgtaatacaaagactcctgtatatccttgacccagattgaaatgtatggattgttgagattttggctcacttgctcactctttgtctctcttgctccatttgatagttgcagatacattcctttacctctaaatgtgtgtccatgtatttctttaaaaacaaggatatatagagatataactttctaatatggacacatatagttattagcctggaaaatatgcagggatttcacataacaaattagataaagactgtgaaaatagcatttttaaactgtaaagaattcttattaaaaagtgtatgtctctttctattgatatgccttaaggtaattggtcacttttatctgaagtttaaagaaattagtcattactggagcacaacttcagataatacaaaatgaggagacagccaaaaattgtaatagttttcagtaagtattcaaaacgtaattgtagtttaatttgttaaattctcggtgcctcatgaatttgatattaggaaaatagagataagatgtcctggaaggtaacagaaaattgagaaatgctcccaaatctctagcaagtcaactaaaaagtgagaagttgactggaacatctagtcaggaatattttttcttaagtggggctcaaacctaatgtaagttatatacaggaggaatataaatcaataaaaacttattcgtcaaaaaaagagggcccccatttcaaagatttttttccaattacgccaaatatttctgtagcaaatttttttaaaatacattaataaacaatttatgaatcttatcaggttttttgttgttgttgtttgtttgttgagacaagatctctctctgttgcccaggctggaatgcagtggtgcaatcaggccttactgcagcctcgacctcctgggctgaagtgatcctcctgccacagcctcccaaagtgctgggtaataggtgcgagccacaacagtcagcccatatgggctttttataaagaagactgaaacttgtaaatagtttgaaaatcttgatggtgcttttcaagattttgacatatctgagtttagtctatttttgtgcaaaacgtgagtatcttgccagaaaatatagggcatgtttccataccttgcactaaattaagcttaacactgaaattatttgacaaactagtcacttcaaaaggcactgtaaaaatactcgtttctaaaatgtttgtgctaaaaagtgataccaaaatacatgaactctgacaatggactggtaaaattcttctccaagtttgcctttataaataagaatgtcatgcgttggaataagccccacatttccttgcgttctacaaacggtgcccttttttctttaaaatgtaatcacggctggtggtggtagctcatgcctgtaatcccagcactttgggaggcccaggcgggtggatcacttgaggtcaggagttcgagaccagcctggccaacacggtgaaaccctgtctctactaaaaatacaagaaaaaaaaagtaatctattgtttggaattataagcggatgccattcaattatagcctgtaacagaaaggaaataaaatgcatttgagcttaatctaaccagacgctgctttttcttctggggattgaagttcgcagatgcttggagaggttgatcctccaccaggtggaggcgagtgtcacaacgcctgtgtctgcccgcaggtgagcgagayggaagtgaacgggcagttcgagtccgtgtgcgagtccgtgttcagcgagctggagtcgcaggccgtggaagcgctggacctgcccatgcccggctgcttccgcatgcggagccacagctatgtgcgggccattgagaaaggctgctcccaggacgacgagtgcgtgtccctgaggtcgtcctcgccgccrcgcaccaccaccaccgttaggaccatccagagcagcacgggtgagtgcgcgggccctcagccagcctggcccctgtgctggctatggcacgactgtccccaaagactgtgcccttgctgtcaacacacatagttgccaggaacargataccacccatgtcctacaaaccaaaggttttccttccctatctgcctctatccccgcctctggccactctcccacacctctttcccatctctatctctggcatccacaggggaaactgcaacaacggcaccatgagggagggacagcacagcccagaggggagggacttccaagatccccacacaggtcctaggagccgatccccgccagctcctactcccaataattaggctcggccttttagggctgtgaccctaaatgaccagacaccctgcttatgacccatcacagaattgaaatgactgttttattccaagatagccacaaagtgactatcccaaaagacctgaaatatcactgtgagaaaataagaagaaacggatgacccagtaatattggtcgcacattttatgagttttattttaacagaaagcagatttatttcactattttaaaacttcgatctatcctgtataaatagcacctccttttcccactaaactgtatttaagtgtgtgtgtggttaaactgtatttttgtcagtagattttaggcacggagacacagaaaagcttaacgagtttctgtgacactggaacctgcataataatatagccgtgggctatatatgacaatgtgtgcatatgaaacatatatataccrtgggctatatatgacaatgcgtgcatatgaaacatgtatatatatatatatatatatatatataacatttgcgttccaaaaagaaaatcccactgtctaactaggcttaactttatgattgaactcagcataacttcaatatagagtattctacaagaagatcatcaaacttagagtcaagataaataatgatgaataaattggaaagaaaagcctgtgtcagaatattgtatcactccattttagtgctaggtgcatcaaatgtcagtaattatcattcagtctagaacttccrcaggcttaagagttwaaaggtcctcaaatccaagttaaaatccttctaactagatatatggaattgaggtgataattttatttaaaataaatatatgggttaaacaagaggagttcattcttgaccaccgcagactgaaatctcagtgttaggagaagagatgcttccagaccttgcgttggccaagcagctcagcagggagcccagcagctcagaccctggctggctacctccagaccagagatggtagatgtccgtatattcttgctcactaggaaattctccaagaacaaccacaggttaataaattaaatgagagttatttatgaagagaaaaatatatatwtttttgaaaaatcaaccatgagcatgtttgtatgtgtttgcattcatgcagtaagtgtgatttggaaggtctgccctgtccctgtagcttatcactatgtcttttggtgtgtcccattttcaccacccccacccaacacacaacccgttcccagtgtctggtccattcttctgtatgatgaactcattgcctgccagctgaaatcgctccttaaatatgtaaaatgcagatcctggcccagaagtcacaaggggtgctctcaggagaacagtcgggaaggaaagggctggtggctcactccttccgcctcaggaaacggtgttgcagataaagtagcaagagacttggaatggtttttctcttctcacctgtcagatttgcgtgtttttgtcattttacttacacttcctgcatcagcgcctgtcccatgctcttcactccaaacacacatggggtctgccctcctaagacacttctcagatactctggaggctcccagagctcaagcaatagagttgccaaataaaatccaggtcgtccagttaaatttcaatttcaggtaaagagtgaataattctgctggataggtatatcccaaatattgcatgagaaacacttatactacagaactatttgtcatgtttgtagtatttttctaaaatccaacaagcctatcagggcaggagatgaatgagccctgggagggtgtctcatgttgttccatttttaatctaagttgaatctaaagggctttaaccagaaatgctatgtgggaaaacacccaaaacggggagaagggaatcaacctgcacagaggggatcgcatttgctccttcttggactctatgaatcttatcctaagtacgagccacctccaccttcwactctcttggggaaggctccaggcttggctgcccctgcaaggatttaagggcagaaaggtgtgacttgcccctggggttggtgatgcataaaatgccaagtgtttgcacagggcagctgtacttcacccagaatcattaaaccaaacataatgtatcatctttacaggtgtggaaaaataaacagtttaagtactaaaccattatagtagattctaactaagtaagcacataggatatttttccaatattacctttcacagtttctctgtgacatggatttgttctttaaaaattctttattttatgatatgataagggtctatgcccttcattctgcccctcctactactcctgtgtgctatttatctctctctctctctctctcacacacacaccccacacacgcatttccttctctttttctcacatgatctcaatactgtcatattcattttcttcctgtagtttcctttttacattgaatcaagtataatttcctgtagaaaaatgcagaaaattgattttcttacaggacctaataatttttgaaagaatacactcatctatgaaaattgagaaatgactttgctctaattttattgatttccccacatgcacgggtcagatgcacatctcggtttagtaggacttgatgtagatttgtccttttctctcttcctttgctcattattttcagatactcacaacagatkttgtttttcctaaacttaccctttgtcctaaaaaaattcctcattttgtcaactgcacttattaggtagaacttctctccacagcaatccacattctaaatctttgacattcgggtcagcccattttaattgctcacattttcagcaaaatatgctattaaatctttctcttccagccttgttctttattcgtattcataaaatgaaatcacagacaagagtctgatgccacaagagagaattatgaagatgggctcagctctaggtggctgcagggatcctctaggtattagtrggtgagcaaggatgaatggagatayctcagcaaatcaggaaaaattaaggatgaagttacggaacttaaagttatgcttccttgggcttattgacttcttggcttgtctaactatggtagaatcttaggttctttcagcctgtaatctacttcaagcacccagatttctctccatccaatagactcaacaagttttcatataaaccacagtgcctgggactattagattaatattagaggaggaaatattagagcagttaatattacagtaggaatatyagggtaggaaagtagaatgcaaacatgattcagttaatatcatgactgaaaaaacaagaacccttgcctcaatcatctaaaatatttyaggtaacagtagaacttgatgctggaaatacacccagacctccacttcagaggattggattaaacctgcctctgaaggaatataccaatgcaattctatgtgtttaaggggaagtttttgttttacttcctgtgctgaatatttcctaggacctatcaaaaggcattatcacattgtagctaggcagacttgtatctggtgataccaatagtctaaataggcagaaacattgtctaataatcatatgtggtgatctaattattgtctaataatcasacatccggccaaatacaggcacacactcgtaaatgtacagaaaaaacttcaaaaaggacacaaagtaaatcatttgcagtggtttcccagaaagtagtaggtggggagaggcagatggtaaagagatagggaggtattaaaaataagtatttaagactttttgtgattttaatgccaaatataacatttgaatagaaataatgctccttgacagaagtaggcaagctatcatgatatatattctctggtgggtttttctgtttggttgggttttttttttttttgagacagagtttccctgtgtcacctaggctggagtgcagtggtatgattataacttactgcagcctccagctcctggactgcgatcctccacctcagcctcctgaactcaggtagctgggaatacaggtgcacatcaccacgcctggctaatttttttttcattttttgagatgggatcttgctctgtcacccaggctggagtgcaatggtgcaatcatggctcactgcaacctccgcctcaagtgatcctcccacctcagcctcctgagtagctgggattacaggcacatgccaccacacccggataattttttgtatttttggtagagatggggtttcaccatgttggccaggctggtctcaaactcctgggctccagtgatccacccgccttggcctcccaaagttctgagattacaggcatgagccaccacacccaacagattctctggtcttttaagaaaattcttcactttgaaattccaaagaagctttgtgtagcaataatacaagttttataaagagtaaataggttcatttgccacactgttactcttaaagtttggcctgtgtgctatattttgctctgttgcccaggctgcagtgcagtggtgtgattatggctcactgcagccttaacctcccagacccaagtgatcctctcacctcaacctctagagtagctgggaccacaggcacatgccactgtgcccggctaatttttaaaaaacaatttgtagaggtagagacgaagacttgctatgttgctcaggctggtctcaaactccagagttcaagtgatcctcccacctcaacatcccaaagtgctaggattacaggtgtgagccactatgccccaccaatactctaattctcttattagaggaatttattaaacaatgatggagttgaactgttctcctctccttcacatagttcaggaaggggagtaagaacctagggtacagtgtcccccatgggaaagcagtgcttaccctcttggatgtagcttgggaccacagtaacagaagtatttacagtttgatttttgtaacaggagaaatcatattttcctctaagttgagacacattcttccatcttcctaccttacaccctcccccattcctggcagctctgaaacacttgctcaagccttgcttaatatagcaaaagcagctaatctgttgatcatctgaggtcagaactaacattcagaaagttctcctaagggtttgggtcttcattccaagtcagtcatcctacccaggagaccacacctcacccaccttcatgcactccacactccaatcccacacaccttgctccccactcccccmccacacaaaccctaaaccctaagcagaatgacattaagataataatttgtaattgcaatacacacagcaggcattcaaaaatggaagaagaaaggaaaagctgcagaaaaatctttaagtactccacaaactgcacaagccacagacgattgaataatcaagctgactttcctagggaaaatagcattgctattaaaacaagctgagtcatcaaatattagcagttataaacaaacttctacatcatccagtctagtggtctgcaaacataccctatggaccaagtccaacctgctgcctgtttttgtaaattaactgtcatcaggcataactcacacccatttgtttacctgctatctgtaaacagaagtttcagcgaatagttccctcttttraaagcagagttgaatagttcctgcagagtagtctctgcaggaatgttttggcccacaaagccaaatacatttatgatgtggccctttacagagaaagtctgctgcacctatctaattcatcaaacccattcaaargtaaggaaactaaggcccaaagtggtgaacctccaacaggaggcaaagtcagaataagaagctcaggtcyctcagtaaacagccctttgttccttcggtgcccggctctacaaattatttattgcttgagtatgaagttaatctgaacttcagtttcttcatgtataaaatgagattacaatgctgatcctcttcccagcattaatgaccatttttggagaattcttagagttcggggaaagctcagttctttctgccaagcaccaagttaattaatagatccttgttataaagcagggaggcaaaggttcagaagtcaaagggacagatatcaatcagaagctttctgaacaaagcacctttcttttctattcaagataaaatcaaataataaatattcagatattgcctggactggttccttgtccctctgctaatgagttttccttctttgaatctctccaagtggaactggagacatcgcgtacttccacccttgcaggctcagacgaaagaaaaaagagcaagatttatgacacaacctactccttttgtgaggcaacttatccttgtctgctgttacattgaaggaaactgacagtgatgatttgcaggagacttttggttataacttctcctttcttctgtggggcactcgaggtaggattcctctataatattaggaagtcataaaaatgcaaaagtcctatcaggcacagagcaagatttaaaatctgaagaataccatgtgcttccatctcctgcagttgttttgaagtacataaatcacctcttgggaacggagtgccaaccttgaggggctatgcctcacagacagccaacaagcaagtccacctttgcccacattcggggttattgcatggcaaacagtgaaggggcttccagggttttctggcacactggccttaaaggctgttgtaaggttcacatgagatcattcacaaggaagcattatgcaaattacaaattagaatgcyctactttggctttgattttaaatctctcaatgtggcttagtttaataataatgataatagctaacytttaagcacttattatttgacaagcatacaaacagctgcatacattgtctaatgtaaccgtaatgaatactctatgacttgcacatgatattatcatttaaatcaaacagagaaaaaaaaatgtaagacttagagaggttacacaacttgaccaggccacacagctagtaagtgaaattctctctgtaatcaccaataaatgccttggaaactatggtataatctgaaataatttaatacaaatccatttatagaataaaaggcctaggagcttttttctttcattctttcctctcgcaaatatgcatttagcttcctgccatatttgaaatctgtattttctatatcagtttctaaaaaattctcttttttaaagaaacatttgttcacatattattgacatggcctctcatgttggtttgtctgtgaaatatctgtttaaagaaaaagatgaaaaaaactagactgaaattaaatttttttaaaagcctatgaaaagaaaatactctctgggtttaaaatttcctgttacacttagtcgttttcacattatgcggatttggaagatcaaatatccaatcccctgatctagtcatggtgttgtcagacagcactaaatggagaaaataatttttgccaactcatgcgtaaattaagcaggtggcamattctgttttgaggctgatgaagtggtcagatgtctgtgcccttgggttaagtaaaaaaatactaaactaatgtaattctgatctgactggtctcttgcttgaactgtagagcaaagatgtgaacaatagcaactcagttacaaaggtcaatcagaaaacacaaactagaaaaacaggctctctcaatgtgaatctttatcattcacttttgtctttatgatacctccacagacacctttttttttctggaggcagagtctcactctgccactcaggctagagtacagtggtgcaatcccagctcactgcagcctcaacatcctgtgctcgagcaatccagtaatcctctcaactcagcccccagtatagctgagattataccaggcccagctaatttttttttttttttttttttgtagagacaaggtcttagtatgttgcccaggctgatctcaaactcctgggctaaaccagtcctcctgcctcagcctcccaaagtgctaggattataggtataagccactgtgcctggcccataagcacttttatgatggaagaaactgccatttaaaaaagccttcataatccagagttgtctgatccagttcatattaaatgttaacaaatatagcaaactaatagcggttggaaattgtccatgtaattaacactggcagttggacaatgctgcaaagccactttaagagcaacattattcagctccaggtggtaaatccaagacctgaagttttgcatttctgtctacacctactgccactgactttctgtcaagttttcagggcaaaactttcctgctgccaagtgtccttgattaaaaatagagaagaccaaaatgaatagtaccatgattttactataacggcatttgaaacagtctcacatttattttaatgacaaatcaatgatcatgtaactatcaacattttgaaagctttctttgccatctgctggtgtcctactgacatgcaatttccaccaacatacaagagaatttttattttgttttacctttttcttccaattatcaatattactgagaatactaattctaattctataacttctaattaaacttatggaagaagataactagtctaagttatctctaatatatgacaaactgtcaaagtttaattagcttttatccctagaatattctgtggtttcaaaagggtacataatattattacacttgacattgrttaaccagtttcatgctgtagagatgtatgtctgacaagaagtatcagatctaatcaagacggaagttcatcctgaatttctggataagactgccatcctgtctctcttcaaatccaaccttaaatgtctttttcacctaactttcttattccattacatatttgtcccataatgaaattttaaaatttatgaaaattggtgagtccatctcatccactatgttgcttttgaaaacctttctcttttctaaaatgttgattatggccagagaatcacaatgatactttgatgtttgcttttatcattttcaagaaacttctttcaattgtcttttatttttatcttgttaattagaaacaattatagatttataggaaattacaaagatagtacatagaggtccctgtacccctcacacagtttccccaacagttacatctcaacaatatcaaaaccaagacattgacattgttacaatgtgcatgaatagttctttctttcttttttttttttttttttttttgagacagagtcttgctctgtcgcccaggctggagtgcagtggcgcgctctcagctcactgcaagctctgcctcccaggttcatgccattctcctgcctcagcctcctagtagctgggattacaggtgcccgccaccacacccggctaattttttgtatttttagtagagacagggttttgctgtatcaggtcttgatctcctgacctcgtgatccrcccaccccggcctcccaaagtgctgggattacaggtgcgagccaccgcacctggccaaatagtccataattttatcacgtgtagatttctgtatccaccactataatcaagatgtagaaccattccatcaccacaaagatctcctagtatccacattttgccagttggatgaagtatagaaaccttacctcccttcaagtctctttgccctctccaacttaaaattatcttaaatatttcctacacatacatgaagagttacatcacacaatgttatactttctgcttcaaatgtcaaatataatttagaaacttttagagaaggaaagtctattggatttgcttgtatttttttcccaaattgccaaatttgagaaattttcagccattatttcttttttttttttttttttcagacaaagtctcactctcgtcccccaggctggagtgcagtggcgcaatctcggctcactgcaacctccacctcccgggttcaagagattctcctgcctcagcctcctgartagctgggattacaggcacctgccaccacacccagctaatttttgtatttttactagagacagggtttcaccatgttggccaggctggtctcgaactcctgacctcaggcgatccacccgcctcgaccccccaaagtgctgggattacaggcgtgagccaccgtgcctggccattttcagtcattatttctgtggctactttttcatcctcctccttctgagattccagtgacacaaatggccacaattctgtcagtgggggttttgggcaaggcggtttccttagaggcggatagttgggcaggcactgtttcatctccatcatataacatcatctgcttgttgaatacaaaaaatatttcttccacgcatcctagaaatgcccccatcaaacatgacccaactttcacatggacagtcacaaaggggagaccagtcaaagttacactgagccactgtacccagcacacagtgcctcttattgatataagaccactcctggctaatttttgtatttttaatagagacggggtttcaccatcttggccaggctggtctcgagctcctgacctcgtgatccgcccacctcagcctcccaaagtgctgggattataggcatgagccgctgcaccgggccttttctggttttattaatrgtgcatttgctatatccctttaaataaaaagaatgttgacataaatccaggttaaactgacacaaattaaagcaactttctttttatttaaaaattggtaacctgaaacatgaagagctgttctygttctcagaaaaagagaacgagaaactcacaatccaaaagcccataacactttctaaattagttaaataaataggatgcaagcacttgactttggcacgtagcagtcttgaagttcctacttcctaccactctaatataagatctcagctactaccttgtgaccctacaaggagttaaagactttaaataccagtcactttgtagctttgcagtggttcagcaattagccatctaaacacaaaatctatagttcttgtacatagaatttgccccatgaatatctgttaattgagaggtgagaacataagatttcctctggaaatttgctgctccagtgaacgctgtagctttctgggatgactctgatgtctccacagaagcataaaattctttactgttttttcagtcacctgaaaataaaccacttcatttcagagacagtggggtggtcacatgtcaccccaaaccactttgaggaacaaagtttcaataacttcttacttggaaaaaaaagaacctctagaaatgggtgatagcaagaatccaagagactggtaagtgctaacttctgcagagaaagccttccttttctttctcaggctgttcatccacttcgtgttctttctctgcactttcttgtccaaagccccgtggaggtgaaattcctacccacccttctttcctgttccctctcttacctgtgataactaagtggggctaatacaaccttggtactaacctggtctcaaatctctgtctataaacatctaactaaagagatttcatggactgctgatcacatttctagagtgaatataaaactatgagaaaatctatagaggatttgcatcaacatatattctttctatttttttctagttttcttttgaaatgcagcatattccaaaaggcttacaagatagtataaagctgctgggatggaggtctcttccttgttttgaatttccactaaaaaaaaaaaaaaaaaaaaaaaggcaaactcaccctctttgcaccgctccaagccataagaaacaacccactctctaaaaaaatttttaaatttttatagagacggcacctctctatgttgcccaggctggtcttgaactcctggcctcaagcaatccgcccacctccgcctcccaaagtgctgggattaaaggcacgagctactgcacccagccacaaatgttttaaaaaagtttataataatatgggaaaggagaggactttggtattatattaaactagaaatccacaggacatgggaacagtatccaaaatagtgtgtttttgtacatacacacataactcagaatgtgtcaagaatttttgctcaggaaaaaaaaaatactagaaggaaatgcactagaatgttaaagtgattatctttgatattggaaccaaaatggttttgtttttctccttatactttagttttcaaatgttctgaggtgtgcatgtttcgcttttataataaaagaaaaaaaaatttgagacagggtctcactgtgtcacccaggctggagtgcagtgatgcaatcacagctcactgcagcatcagcctcctgggctcaggcaatcctcccacttcagccccctgagtagctaggaccacaggcacaagccaccatgcccagataattttaaaaattttttctagagacaaggtctcactatattgcccaggctggtctcaagcagtcctcccaccttagcctcccaaaatgctgggattacaggaatgagccaccatatccagccaagaaactatttttaataaagaaatagctagtgtttcattggtttggtcctactggaagcaatagtacatctcatgtcagcatatccttcaggtttcaccttttttatattagttttcttgactaaatgaaatcttttggattcagtgattgggcaggatcattggagatgatctccagaaaggtgctgctatgctattgttatttatctaagtatataacatcttctagtaaagaattctttttaaaaatcaatactaaatttttaaaaaatattctttcccttgctttcctttaccctcatactggtagcaagtgaggttttgtagatttttgtagggcttttttccccctcttcagatgtcagaggcagttaatttgcaaaccacagttgcaggtggtttttgaagtggagggagtttaggacaaaggaataaagctacataaaaccagttcatggkgtctttaaaaatataaatccatgcctttgtagtccttactctaacaaaagctcagctctcaagggcatgctttcagttgtacctgtgttccagccagaaaaactccccaagcaattatggtaagaaaaaaaggtttctgtcacagccacgacctaatataatagtgtaaaccatctgtgttttcagaaagggaaagtgctctcgaaaataggaaaagtgaagtgctgggtggaattgtgaagagtcatggcaaatcatcatcatcgttatccattcagagagaaagtgatattgacaaacctacgctaaaagaggattaagaaaccttgcattgtgagctgtgtcaaagcaatgaaacaaaggataatgctttctcgtacacctgtacacctcagtgcagcacygtgcaagctctagtaggaatagtgctactgagttagctggtgacattcrttgcagcctgtgcctttcccttctccaacctcttccttgacttttcctttgccttccctttttcttgctcttttccagagagagctcaaaggcatttgtccatttctcacccattccaacagctctaggggaaactttaggaaaagtaaaaacagccatgctcaccagttctctcttttctgacccatgttcttctggaactctctgtttgagggaatgtggcaggaatgagaacctagaaataagcagttgagcttcttccattcatatggttacactgccttggacaagagtaccaaaggctggtaattcccaacccatattttgtaggacaagttacttcaaagcattgtgaagccttcatctaaaagaaagagaaactacatctgcagtgttgtctgcggaattttaaaaccttactgggcgtggtggctcacacctgtaatcccagcactttgggaagcagaggcaggcaaatcaccttgaggtcaggagttcgagaccagcctggccaacatggcgaaaccccgtctctactaaaaaatacaaaaattagccaggcgtggtggcacgtgcctataatcccagctactcggggaggctgaggcaggagaatctcttgaacctgggaggtggaggtctcagtgagccaagatcacaccattgcatgacagagcgagactccctctaaaaaaaaaaaaaaaaaaaaaaaaaccacgtaatcagctaattcttttaaacctattaktatgctgtggcagtcaagctgaatgtgtgcaacaggaggctttcaacccaagatgatgagcaaaccaaagctgattttcagcctagtgcttaggttttgtcatgaacattaataggaactgtacgtgttatccagagcctcccatttgggggtgcatctccatccttgtggggttgtaccgtcatcccttctgggattgtatttccatcccttctggggctatacatccatctactcatgcacaacctatggctgtgtttgagaaacaatggactattcaaaacagcatgtagtttgtagtgattctttccaaaaacgactcttctagatttcagctgcatagcagaaaaccctaaactgtcttagaaaatcatacgttgttttgctttgcttccatggaaagtcttcataggattatatgactgaacaggacacccatatctgtctcccctggaattaatttcgaatcaaaattgtttttttaaaaaaggggattaagaaacttgtggtgcttagataaaattctttcctaagaaattgtttctgatgttaacaccgtacctccagaagcattggaacagaattggttgatcaagtcggcttcccagggcacatcctcggacgatgctgtgaggatatgtgggtgtttcagaatagggcggaatcctgacagtgtccccacttggctgcctgttttcctatgtaatccaacatggtaaatcatcctcaaaaccttttatttttggatttcccatatgttcaaatgtgagtactctgcacagcagtcccaccgtggacacccactgaacatctgcagtgcgccaggctctcctgagtgctctgtgtcataaacatgtttctttctatcacacaagtgtcacgcttcatatcagaggaaggaccaccaaatacttatgattactgaagatacaatcaagtggaagacctaaagcaaattctgaaaatagaagtataagcaaaggcataattcatcaatgtgccgcttattgcttctgcctccactgagcatacttctatcttataccatatgccttaatttgatcccaaacagcaatttgcacatgctcattcttctaactactaacaagccactgtaacatttactcatttccccttttagactgaagcctcccccacatgcacaaatctttccaattactgtaaaaacttcagttatctgagcgatgtgtccacaggccttcaacgccatccatcttggattgaccttgtcctcattcttatcattctttgctcctaatctcctcagttgtggggttaatatctcttttgtagattatggcaccaattgcatgttctggaaaaggcaactgggagtccaatcagttgcagctgtgcaaactgtagctcagctgatccggctgtgaacagcagcaaagaagcagggaaacagagaaacggtagaatggtcctgagtccacacgaacccaggctgtacttgttggtggttcagggtctatcctgtgtatatagatctcccaatagtctgcatstggwttttgcaccaaggcagggtttgatgaggattgattgaaaagaataacagctttaaaggccagtactagagcttttgcaaatattcactgtgtcctgccccatccttctgaacacatctgaaggataactctgtaaaggaaacagtaccagtagaacaacttcactcccacgaatttgcctttccaactgggtaagtcagttaggagtgaattgattccgcttctatcttttcggtgcacttgcttaaacttatagtcctgctagctacagaaagtagtaacttaagcactttaactaaaacttgtgattgcctccttcattttcccatatgcactgtgggaaagccccatgacgtcagctgcaataagccaaggaatgattagcaggccagttctgtggcttgacaagctccccagtaattagccccctgacaccactgccatttcacgcaccatattgtctccctgtaatgggcctgcttaaaatcagagcttattcgctacttggagaaaataacactatgggtccctattagctcttaataactgaggttaaataattccatgaggtgttctgtaaggagtgccttgtgggagttaacaggtacaggtgagaagcatgagccccaggtgagactttccagtgggaaaccctgggtatctaggcctcggccaagtgctacagagaccctgcgtgcccagtagggagggtcaggacagagacgggtgagctgctgggagtgcaagccccgcggcaaacgctgctcttgctcccgaagtccacccctgctcactaccacactgatgctgggctgacccccactacagtccaggctgttttccacctcttctagaacactcaagaaataaaggtggggctgcayttctcaaggagaattgagaaggcaaaaagtgcagtgagatccccactcagtaagtgtgtgttctgggtttgcagcctcagccttcaggagcagaaagaaaacccaaacttctagccattaacaggccatgctccccccatgccaccccaccggggtcagtgtgatcgtcacaaaaatacctctagccagaacccaggaatagtttgttaggactcatgcctccttatacatttctgtatgcctcccttcccacagcccatccccacactccccatccctaaaccacaacctcatactccgatgcatttctgtcttcctttttttatttttttctttttctttctttttgagacaaggtctcactctgttgcccagactggagtgcagtggcatgatcatggctcacaacagccttgawctcccgggctcaagcragcctcccacctgagcctcccaagtagctgggaccacaggtggtgccactgagccagctaatattttaattttctttgtagagatggagctttgctgtgttgcccaggctggtctcagactcctgggctcaagtgatcctcctgcctcagcctcccaaagtgccggcattagaagcatgagccaccacacccggctggatttctgtcttattcctcaccacagtcaacacagctgatgatctgggtgggatacgtgagccacttttaggtgattgaagttgaagttgtctcacctaggtgggtatttttattttttgttttacattctatttttgttccaatagactaattgggcatatacattttataaacaggtcgatttacctggctattctttaacacaatttttatcattcatagtgatatgatctgattcacttgcatgatgaaagcattgatcactggagtcattacagaaggggcatcaagctgtagcttttattctctccagttatcaagttcttatcagatttaaatgcctgaaacaacaaggatatgcccttggctttgtttttacttccctttgtgctgccctcttacactctgtggctgagatcatcgtgtttatagccaagtctctgccagaccttgcccagggcggcccctcctggctctctgacttcctctgtcgtgtttctggactcttctgttgcagacgcactggccttcttcttgccctcactcccgtgtttccctagccctgccctctgacctctgtgtgccaccttctcaggaacacctgttacttattagacactcaccagggaaccatgacccacacatggagagctctgaccttctggaacccagcgagcttgttcctgccttagggctctggcgctgcttccacccaccccctacacccgtgcctggagtccttcctccacctcccaactccatgttcacatctctgtctcatggccacttggctctgccccaagtcaatctcttgtcctttgcaatgcttactttttcttcatgacacttactgccacatgaaattaaatattcacttgtgtatttgtcatctcaattccagccaaaaaatttttctgtcttgttcactactatgcctccagctcttagaacagtgacatctatagtgaatgctttaaaaatatatatggaataaataagtaaaagagggctgtgctttcctctccacagtcattgacaccgtccttgacgggagcttttctgggaacagtggggagaacattagaccagagtctttaaccttctaaacctatacctcttcttgataaactaacaaacaaacaaaaattcaaattcatgtccctctgcagagcctgaagctgggtgtggaggagaaagggygggggatgamgtagggcccctatcaaaaatctgcaggggcaggtgagaattttttatcacaaggagtcttgagtcccagcccctcaaatcattttccctaaatattccttccttttggtaggagtaggataagagtgtgtgagaagtgttccgttttggtagcttgtctttcctagtgtaaaatgaaagaccattgggtatttatggagagagcccactgcacagagaagcataaatccatccatgtcccaagctatatgtgctaaacgtagccacacargaagaatcacttcctccactacagaaaatagcagctccctattttaaatgtgcttctcattggctgtaggagtagcagtaattcatcttctatagacctgagttttagttttgtgaactgatgtataaaggaaaccaggtttgggcctgtcctgggctccttagatctcagaggcaggagatcatacccttatgcccatgctgtctacttctaattccagtattaactgggcatggcaacggtaggaatgcagagaaaagaggaatatcaagtattattgaatccttcagtcccgcaaacactgaacacttctctgtgccaaaccccgggtgcagggctgggggaaatcgtgcctgccctggaggggttcacagtcttgcatggaaacctactttttccattgacttttcatgtcaataccatgtgctaaatcttcaatttctgcactgctgctttacagtragtctctaggacccagtgcaaatgtacatgttctgcacagactgaaaaaatgttgaaaagcctggtgtactgtctccctaaatgaccaagggattgtatacagtkgacatgtgcaattactttcaactctactggtacgttgttgagaactcaacttcaggtcaaacatgctaacagttcagctcacattcgaacaaagcttatcagatcaaaggagctggcacaatactgctctgtggtttactggtgtatagtgaagcattcttaaaatacattcttcagtcttaggaaggctcctaaaggggtgtcttcggtaaatatttggaggcagattgggccagcacagagtgaaggaaggtgtgtagggggttggagtgcatgtcaggttgcacggcagctttctcattttatttaggcccaggacttgggttcttctatgtagtttttcttcatagcacttgccatcatttgcaagtgtatatttataggagcactttgaaggaaggactatgttttttccacggttgtataaccagtatctggcatataataaatactcagtaratatttgttgaataaattaactaaacaaatagactttgtaaatttttttctgtcccagtctttttggagagtggattcaaccaaactgtaggcttttgaagaggtgtraggcatctcaaaggcagacagagatttccctgaaaaatctgtttttaaagaaacctggtcctctctcccttcttccttccacctaatgtgcacctgggagagaagcttcrgaaagtcatatctgagtcacaatgaggagtctctttacgcgtactgtcaagtacgctcttacaatttattttctccaagaaaaagctaattcaggtccttttgtatccttttccttcattaccatttccaagctttagcttacttacgattgtgcttacttaagcttttaaattcttgttgtagagtgtgccccaaaatttaaagccacttaagtccagatgcccatcgcaaacagattccctcatcctccacccttcctgaaggtgctcttggagaggaagaggcaggaaacggagcagaaatgagacacttgtattgtcctttgcagggagccttgacaagaagctggaatcctgggcgctagggtaggaagacatgactcctccacccctgataccactcaggcaaaatgggtaaagatcaccccatatgaacttcaacttggtgaattcacagctctcacaataaaaaacattttgttttacaacggtcagatgtgtgttcttgctcagataggaattacagctgggcacagtggctcatgcctgtaattccaaaactttgggaggctgaggcaggtggatcacttgaagtcaagcattcaagaccagcctggccaacatggtgaaatcccgtctctmctgaaaagtacaaaaattagctgggtgtggtggtgcacacctgtagtcccagctattctggaggttgaggtgggaggattgcttgagccccggaggtggaggttgcagtgagctggggtcacgccactgcactccagcctgggtgacagagtgagaccctgtctcaaaaaaaaaaaaaggaattacaaaggatgagttgtatgcagttttttgccattttctcatggatgaaacaatgtcattctgaatttcaaaagagattgcagacctggccaagaagaggttccttctgtggtagtcctctgctcctaagcaccaagtcacccagtggccccaacatcccttctttagaagaactttattcctgtgcccgtttaatgtgaccaaagagctccaagaagcccctttcaatcaggcagacataatccttgccttcatagaaactgatttctaccttccaggaacgcagcaccaatgcaggaaaacagacaaatatatccacgattacagtgtagtattctaagcgcaatgaaaagacatgcacaagataatctagggtctgttttcttttttttttttttctttgagatggagtctcactcactctgtcacccaggctggagtgcagtggcgtgatctcggctcactgcaacctctgcctcccagattcaagcaattctcctgtctcagcctcctgagcagctgggattacaggcacgcaccaccacatctggctaatatttttgtacttttagtagagatgggttttcaccattttggccaggctgatctcaaactgctgacctccagtgatccacccacctcggccttctaaagtgctgggattacaggcatgagccactgcaccccgtctagggtccattttcttctgcttccatcaaaagcatgagaagtagttctcttccaaagatagagatcttcacaccaccgtctttctccctttcttttcttagagcgtagaggtacaatgagagaacttgcaagagtcatgaaatattaagatataaactgtattcagataggtgggttcaggtgggtaaataagagataagcaaacaaatactagatcttggcttactaattaatcagtcccttaacaacccatttctccattatattctccatgtaacccacaattgcatgcgtaatactttgatgtcattcagttctcccttgctgaactcagttcttctcttaaattccatattaaaattccttttccgcccattcccaaactcagtggcactgatatcttgtagatgttggtattcttttgaatacctctttgtcaagttctcatttggggaaacttttttctaccaggacgtattagtttagggctgtgtgctttcctgaagtttcttgcttacttgcccctagtaagtcaacatacccttctggctggagtcgcctctctgtggtctgtatcagatcattctgtcatctcttcagtttctctctgcatccagatcacaatgttgctcaacacatcactgacgtcactcagagtctcacatgtgcaagccttcgataagctccatctccaacatcaacatttatgcttgcagactaacattacgttttcatacctacaagctttggtgagaaagctttgggtaagaaaatttatatcctattttccagctccttggccttttatttttgcccgggagctgttgatgcttgctctttgcaggaaggctgaagggaaggagtcagcctgtcctcattaagcacatcaatgctgttcctgagtgtggagacacaatggcccttatgtgtccatcaccctgcaagcttcagggctggtattaaatgcatgctggccatttattgtatcttccaaactgagtgtgaaaaatgcaccatttgccaggcgtggtggctcacgcctgtaatcccaacagtttgggaggccgaggtgggtggatcacttgaggttaggagtttaagaccagcctggccaatatggtgaaaacttgtctctactaaaaatacaaaaagttaaccaggcatggtggtgagtgcctgtaatcccagttacttgggaagctgaggcaggagaatcacttgaaccccaaggcagaggttgcagtgagcagagattgcgcctgggcaatccagcctgggcgatccagcctgggcgacagagtgagtgagattccatctcaaaaaaaaaaaaaaaaaatgcaccattaataattatactgggggccgagcgcggtggctcacgcctgtaatcccagcactttgggaggccaagcagggaggatcacctgaggccaggagttcgagaccagcctggccaacatggtgaaacctcatctctactaaaaatacaaaaattagctgcgcgtggtagcacaggcctgtgatcccagctactagggaggctaaggcaggagaatcacttgaacccaggaggcagaggttgtagtgagccgagatcgagccactgcactccagcctgggcaacagagcaagactctgtctcaaaaataataataataataataattactattattattattatactgggatatatggtcaccttagttaaaatgacattttgagtctggaattgtgtttaagtcctgggcccttggtgaaacaatattttaatgctccttggggtctgatggtttgggcagagtagccttttatgaagaattatactgcgactaaatcagtatgatatgtttagctccatattttccagcaaatttttaagggataaatacagataactcattgcaactataatactgcaccatacaagcacaatgctgttgacaaggaggtatacagagcaaagcaaaactgcattctaaccccctgaagtttcctggaaaaaaaaaaaaaaaagtagcctgaaaagttgaaaatgtttctttccacaaaataaactggaataatcccttcatttattttagagtcctttcagatagccttgcagatggttcgctgaagtcatcatgccaacaaaattcgtttgactcaaaaatttaaatagccctaccaaattatgygtgtttctcttctaataaaaaactgaatgtcttatttctatctgctaagcttattccactctgcagtttgtgaactgaactacagaaataactccttagagatgcacacttttgtcctctattacccaattctggaatccccaaatatagtgttataaatgctgacttttctcatttgcttttgcatgtattcatgtcttgtctctttacacaagactgctatccaaaayatccaaaaggcattaaatactaatattatggaatcataaaggtgttctttcttcttctaattgcatgcattcctgccagtctctatgaccacagctgagtgacagataaagcccaaattaaaaatacttccctcttggcaagatacctccaacccagtgggctgctcagttggaaagctgggaagtggagagrcatgagtcactgtgttctctcagacattttaattcagagttgtttaagaagatttaaaaaaaaaaatcaagcaatggacccccaaaatraccatttctcactaagtcatgaaatttaattttttcttttycttttttttttagatggagtctcgctgtgtcacccaggctggagtctggagtgcagtggtgcagtctcggctcactgcaacctctgcctcccgggttcaagcgattctcctgcctcagcctcccgagtagctgggattactggcgcctgccaccacaccagctaatttttgtatttttagtagagacagggtttcaccatgttgtccaggctggtctcgaactcctgacctcaagtaatccacctgcctcgacctcccaaagtgctgggattacaggcatgagccaccacacccggtcaattttttctttaatgtgggaaacagaattgccacctctccctgcaacacctgaaaggaagcatggtctctaggcaaagccattcttgccaacctctggggtccctggcatgtggcactcagcccttcccgtgggccccgcagagcatcctcctaggggctaggatgtggagaaatgcagtgaggtgactcagctgctgtgtcctttctgctgtcactgctgtcttgtttttacattttttaaagtatctgttcttgggtgcttatggttttacaaagcagccctaatgttcccaatggtataattgcctgatatagccatgactgctgctctgggaactgtcaagattagaagccctgcctgtgaaggggaacgtggggaggaatttgtatcatgtagggtgcagtaatctccaaggaaattctcttcgcaaaaaccgtgtgtggaaagtctccctctggcggctgctgaggtgtgttcataggggaaagaatgcatgtcaaccgtaaatggagtctgtgaagctgcaactaaaatgtttccagaaaagagggcatttggttgcatcttcgggaggaaaataagaaacaattcttttctagaattaaaaaacaaaaacaaaaaacaaaaaagaacgaaaagagaagaagaatgcagagaatgtgtccatatctagtgaactttcaaatatccctccgtcttctaaaaagaaacaagtggacaacagccrctcgctctcctctgaacacacatcctcctcacactcctccttctacagagatcagggccactgcactttcgtgcttgaagcagttctgggaatttctgtcctctattttctgtgtctgtctagttcactaccagtctcatttatttgtcctttatagtatttctttatgatacttctcatgttttcttgcccttcctattaatttctccagcctatgcatggacaactgcccagtggcatttggagtaaatgcaataaaattcagagcacgtgaatcaaaggctctcagttggcaagttcaggtcttttgtcaggacagcgccacattccatcccaaggaccagctatatccggtgatcctgagacacaatcttgacaccacttcaaagattctggaatttggaattcaggacctctagtgccatcatgtgcctgggtccccatcctccttcctaacccttgttttccctgaatggcctcatgacctgttggcaccatcaggctccacatcttaaccagctctgggctgatcctgccttcacagaattgagaacactccagagacccttgcttgcctttgtcctagcaagtaagctttcatgtcaatttctaagacaaagtctccrtcttatactcctttctgggacttggatccctgtcctctctcttctccctctgtcccttactgcttcctggatgaactgcctgtacctgagtggctgcaggagcgagcctgtcattctcctcaaccccactggtaaggggcctgccactgggctgccctgacttttcagttgttacttattcctcatccagcagctgtctccttccagatctgagccctctggctccccacagagatttacttaaagtcttccagctgtgtgatttgctaagatgccagctaccttgttgtatctgattacttctaagatgatacatataggatcccatagcctgcctcgctcccctgtctctcaaacccagggaagggtctaggaagaagcccaggatcctagggcgcctgcatgcaggaagtccacaaccctgccaggctctcccctaggggtctgttgctgcctctcttgggaacttgtctattgccatcccatagaaaggtagcaatttatgccttcctggttttgataacatttcccaaacatgtttactcctgtgaagcatatccarttgagcaccatgaagcacacctgctattttaaaattcaaggtagacgtcaggagyggcttacgcctgtaatcccagcactttgggaagccgaggtgggcggatcacctgaggtcaggagttcgagaccaacctagccaacatggtgaaacttcatgccgggcgtggtggcagacgcctgtaatcccagctacttgggaggctgaggcaggagaatcgcttgaacccgggaggcaaaggttgcattgagccgagattgtgccattgccctccagcatgggggacaagtatgagactctgtctcaaaagtaaataaataattaatttaattaattaaaataaaggtagtgtcagggtactcatacatagagaataacataaatgtatacatctcaaccttaccccgatatcttggcacacatttgaaatcttaaacagtcacttcaagaactccctatgtctctccgtctctcacacacacagagcccctcctacgactcttctcactcttgactcttgaggtcatcttgtsttatctctctctatgtccatctgccagatcgcagcagaattacctcaattcatcctagagaaacaggtccctctttgctctgaacccaaaatataccaacccagcttcagatggtatcttctctcttctttatcacccaaagtccaaacagtctcctggactcagcccacagagcttctctgcaccaacctcttctctactttagacccaaatggactccttggccatattctctgctgctttagctgaaaccacagattctccaacaacttctaatctctcagattcctcagctcaactagctggcaccaaatttatcacataagcatgkgtcgaatccttctgctttgcccggcttttttctttgatgttgcagcactgtcattctcctaatcacatattattattttaacattcttcagcaaccaggattctcaatgatttgtagggagggacgtgattgcttttggaggccccaacacagggtcattgctttcccttctcacccttaacgggaacaccacacatagacactacagaatgaagaatagctgaagaaggctttcaccctggatccggactgtttggttmtttcttcttgagtcatgtggcatttggctcctctgatgagatcattagtacacttaaaaagccatcatcaggccaggtgctgtgggtcacacctatagtcccagcactttgggaggccgagcctggaagatcatttgagccaggaattcaagaccagcctgggtaacatagcacaaccccacctcaacaaaaaatttaaaacttagcctggtatggcagagtgcactcctgtagtcctagctactaaggaggctgaagcaggaggatcacgtaagcccaggaggtcaaggctgcagtaagctatgatcccactactgcattccagcctgggcaacaaagtcggctgggcgtgatggctcacccctgtaattccaccattttgggaggccgaggtgggcggatcatgaggtcaagagacagagaccatcctggctaaaacggtgaaaccccgtctttaccaaaagtacaaaaaattagcygggcgtggtggtgggcgcctgtagtcccagctactcgggaggctgaggcaggagaatggcrtgaacctgggaggtagagcttgcagtgagctgagatcacaccactgcactccagcctgggcaacagacagagactctgtctcaaaaaacaattaaaattttaaaaaaataaaataaaatgctaggyggctggcaagatggctgaataggaacagctccagtctgcagctcccagtgagatcaacacagaaggcaggtgatttctgcatttccagctgaggtacacggcccatctcactgggactggttagayagtgggtatagcccacagagggcgagctgaagcagggtggggttttgccttactcgggaagcacaagggsttgaggaacttcctcccctagccgaaggaagccttgagggactgtgctgtgaggaacagtgcgttccggctcagatactatgcttttcccatggtcttcacagcccgcaaamcaggagattcccttgggtgcctacaccaccagggccctgggtttcaagcacaaaaactggstggctatttagacagacacctagctagctgcgggagttttttcataccccagtggtgcctggaacaccagcgagacagaatctttcactaccctggaaagggggctgaagccagggagccaagtggtctagctcagcggatcccacccccagagagcctagcaagctaagatccactggcttgaaattctcattgccagaacagcagcctgaagtccacctgggacgcttgagcttggtcaggggmggggcgtccaccattgctgaggcttgagtaggcagttttcccttcacagtgtaaacaaagccatggggaagtttgaaccgcagctcagcaaagccactgtagccagactgcctctctagcttcctcctctctgggcagggcatctctgaaagaaasgcagcagccccagtcaggggcctataagtaaaactcccatctccctgggacagagcacctgggggaaggggcagctatggagacagcttcagcaggcttaaacgtttctgtctgacagctctgaagagagcagtggatctcccagcacagtgctcaagctctgctaagggacactctgcttcctcaagtgggtccctgacccccatgcctcctgactgggagatacctcccagcaggagtcaacagacaccacatacaggagagctctggctgtcatctggcagatgcccctctgggatgaagcttccagaggaaagaacagcaatctttgctgttctgcagcctccgctggtgatacccaggcaacaggatctggagcggacctccagaaaactccagcagacctayagcagagggcaggttagaaggaaaactaacaaacagaaaggaatagcatcaacatcaacaaaaaggacatccacacaaaaaccccatctgaaagtcaccaacatcaaagaccaaaggtagataaatccacgaagatgaggaaaaaccagtgcaaaaaggctgaaaattccgaaaaccagaatgcctcttctcctccaaaggatcacaactcctcgccagcaagggaacaaaactggatggagaatgagtttgacgaattgatggaagtaggcttcagaagttgggtaataacaaactcctccgagcaaaaggagcgtgttctaacccaatgcaaggaagctaagaaccttgaaaaaaggttagaggaattgatagctagaataaccagattagagaagaacataaatgacctgatgtagctgagaaacacagcacgaggacttcgtgaagcatacacaagtatcaatagccaaatcgatcaagcggaagaaaggatatcagagattgaagatcaacttaatgaaataaagcatgaagacaagattagagaagaaagaatgaaaaggaatgaacaaagcctccaagaaatatgggactatgtgaaaagaccaaacttatgtttgattggtgtacctgaaagtgatggggagaaaggaaccaagttggaaaacgttcttcaggatattacccaggagaacttccctaacctagcaagacaggccaacattcaaattcaggaaatacagagaacactacaaagatactcctcaagaagagcaaccccaagacacataatcatcagaragaaaggtcrggttacccacaaagggaagyccatcagactaacagcagatctctctgcagaaaccctacaagccagaagacagtggaggctaatattcaacattcttaaagaaaggaattttcaacccagaatttcatatccagccaaactaagcttcttaagtgaagaagaaataaaatcctttacagacaagcaaatgctgagagatttttgtcaccaccaggcctgccttacaagagctcctggaggaagcactaaagatggaaaggaaaaaccagtaccagccactgcagaaacatatcaaattgtaaagaccattgacactatgaagaaactgcttcaactaatgggcaaaataaccaggaaacatcataatgacaggatcaaattcacacaaacagtattaaccttaaatttgaacaggctaaatgccccaattaaaagacacagagtggcaaattggataaagagtcaaggcccagcggtgtgctgtattcaggagaccaaactcatgtgcaaagacacacataggctcaaaataaagggatggaggaatatttaccaagcaaatggaaagcaagaaaaaagcaggrgttgcaatcctagtctctgataaaacagactttaagccaataaagatcaaaaaagactaagaagggcattacataatggttaaggagtcaatgcaacaagaagagctaactmtcctaaatatatatgcatctaatataggagcacccagattcataaagcaagttcttagagacctacaaagagacttaggcttccacacaataatagtgggagacttaaacacccctctgtcaatattagacagatcaatgagacagaaaattaacaaggaaattcaggacttggtctattaggaccaagtggacctaatagacatctacggaactctcccactctgaatcaacagaatatacattcttctcagcaacacatcacacttattctaaaattgaccacataatcgaaagtaaaacactcctcagcaaatgcaaaataacagaaatcataacagtctcttagagcacagtgcaatcaaattagaactcaggattaagaaactcactcaaaaccacaagactacatggaaactgaacaacctgctcctgaatgactactgggtaaataatgaaattaaggaagaaataaataagttatttgaagccaatgagaacaaagacacaacgtaccagaatctctgggacacagctaaagaagygtttagagggaaatttatagcactaaatgcccagaggagaatgcrggaaagacgtaaaatcaacaccctaacatcacaattaaaagaactaaagaagcaagagcaaacaaatgcaaaagctagcagaagacaagaaatagatcagagcagaactgaaggagatagagacacaaaaaacccttcaaaaaaaaatcaatgaatccaggagctggttttttgaaaagattaacaaaatagaccactagccagactaataaagaagaaagacagaagaatcaaatagacacaataaaaaatgataaaggggatctcaccactgattccacagaaatacaaactaccatgagagaatactataaacacctctacgcaaataaactagaaaatctagaagaaactgataaattcctagacacatacatcctcccaagactaaaccaggaaaaagtcgaatccctgaatagaccaataacaagttctgaaattgaggcagtaattaatagcctaccaaccaaaacagtccaggaccagacagattcacagctgaattctaccagaggtacaaagaggagctggtaccatttcttctgaaactattccaaacaatacaaaaagagggactcctccctaactcactttatgaggccagcatcatcctgataccaaaacctggcagagacasaacaaaaaaagaaaatttcaggccaatatccctgacaaacatcaatacagaaatcctcaataaaatactggcaaaccgaaccaagtgtcacttcaaaaagcttatccaccacgatcaagtaggcttcrtccctgggatgtaaggctggttcaacatacgcaaatcagtaaacgtaattcatcacataaacagaaccaatgacaaaaaacacacgattatttcaatwgatgcagaaaaggccttcaataaaattcaacaccacttcacactaaaaactctcaataaactatgtattgatgaaatgtatctcaaaataataagagctatttatgacaaacccacagccaatatcatactgaatgggcacaagctggaggcattccctttgaaaacyggcacaagacaaggatgccctctctcaccastcctattcaacatagtattggaagttctggccagggcaatcaggcaagagaaagaaataaagcgtattcaaataggaagaggggaagtcaaattgtctctgtttgcagatgacatgattgtatatttggaaaaccccatcgtctcagcccaaaatctccttaagctgataagcaatttcagcaaagactcaggatacaaaatcaatatgcaaaaatcacaagcattcttatacaccagtaatagacagagagccaaatcatgagtgaactctcattcacaattgctacaaagagaataaaatatctagaaatacaacttacaagggatgtgaaggacctcttcaaggagaactacaaaccactgctcaaggaagtaagagaggacacaaacaaatagaaaaacattccatgcttatggataggaagaatcaatatcatgaaaatggccatattgcccaaagtaatttatagattaaatgctatccccatcaagccaccactgactttcttcacagaattagaaaaaactattttaaatttcatatggaaccaaaaaagagcccatatagccaagacaattctaagcaaaaagaacaaagctggaggcatcacactacctgacttcaaactacactgcaaggctacagtaaccaaaacagcatggtatgggtaccaaaacagatatatagaccaatggaacacaacagaagcctcagaaataatgccacacatctataaccatctgatctttgacaaacctgacaaaaacaagcaatggggaaaggattccctgtttaataaatggtgctgggaaaactggctagccatatgcagagaactgaaactggaccccttccttacaccttatacaaaaattaactcaagatggattaaagacttaaacataagacctaaaaccgtaaaaactctagaagaaaacctagtcaataccattcaggacataggcatgggcaaagacttcatgactaaaacaccaaaagcaggccaggsttggtggctcatgcctgtaatcccagcattttgggaggctgaaacgggtggaccatgaggtcaggggatagagaccatcctgactaacacggtgaaaccccatctctactaaaaaaatacagaaaaaaattagccgggcataatggtgggtgcctgtagtcccagctactcgggaggctgaggcaggagaatggcatgaacccaggaggcggagcttgcagtgagccaagagcacgccaccgcactccagtctggggcgacagaacaagactctgtctcaaaaaaaaacaaaaaaaacaaaaaaaacaccaaaagcartagggacaaaagccaaaattgacaaatgggatctaattaaactaaagagctcctgcacagcaaaagaaactcatcagagtgagcagacaacctacagaatgggagaaaatttttgcaatctatccatctgacaaagggctaatatccagaatctacaaggaacttaagcaaatttacaagaaaaaaacaactccatcaaaaagtgggcaaaggatgtgcacagacacttctcaaaagaagacatttatgcagccaacaaacgtatgaaaaaatgttcatcatcacttgtcattagagaaatgcaaaccaaaaccacaatgagataccatctcatgccagttacaatggcgatcattaaaaagtcaggaaacaacatatgctggagaggatgtggagaaataggaatgcttttaccctgttggtgggattgtaaattagttcaaccattgtggaagacagtgtagatcctcaaggatctagaaccagaaataccatttgacccagcaatcccattactgagtatataccaaaggattataaatcattctactataaagacacatgcacacatatgtttattgcagcactattcacaatagcaaagaatgggaaccaacccaaatgcccatcaatgatagactggataaagaaaatgtagcacatatttaccatggaatactatgcagccataaaaatggatgcgttcgtgtcctttgcagggacacagatgaagctggacaccatcattctcagcaaactaacacaggaagagaaaaccaaacacaacatgttcttactcataagtgggagttgaacaatgagaacacrtggacacagggaggggaacgtcacactctggggcctgttgggggctgaggggggggtggctaggggagggatagcattaggagaaatacctaatgtagacaatgggttgatgggtgcagctaaccaccatggcacatggatacctatgtaacaaacctgcacgttctgcacatgtatcccagaacttaaaactataataaaaaaaaatgccatcatcagcttacatcagccactgatacaaacagtgcaacatcagacactgatcatgacactgagatgctgagactaaatgctcctctagcagcttcctagcccaatmtggattcccttttgtcctttkcaataaacagattttcagcagagaataatacttccattttaagtgtattggggtcgtcttacttcagctgtgaaatcatagagaatttatggtcctcagtataattatatgccaaatkgcactgagtcaattacccctggatgtgtgagtttctcttttctttttaatcatcttcagcaggaagctgtaccactaatctgactggcacacatctctgcagtgattgccttcacattaatatccgttttctaacatgtttctgcccatgcagtataattaaatattttgcatttcttcaacatgcagattagtgtacatggaaggagaaaatcaaatgttagaagatgtagtttgtggccagacactatggctgatgcctgtaatcccagcactttgggaggctggcaggttgagatggaagaatcacttgagcccaagagttcaagaccagcctgagcaacatagggagaccccaatctctacaaaaaaaaaaaatttaaataagtgagacatggtagggtacacctgaagtcccagctattcaagacgctgaggcaggaggatcgctkgagcccaggagttcgaggctgcagtagctatgatggcaccactgcactccagcctgagcgacatagactctgtctctgaaaaagaaaatatagtttgcctcacatttgttccttgacattagcagtgcaaagaaatgtaatggcttttatactgaaaaagccagaataccttaagccaagagttaaagagctttcagtgatccagggtgcctgcttcatgatagtcatgctgcgtggctttcatcggcatgagcagagccttgaagctccaagtccagaattactaacctaggtcccagctctgtgttggcttcagrcccacctcatttgctagttctggaacactagagaagttgtttgaatttccagggacagagcttcttgatttcctaatgtggaatgagaaaagttaataacagaagttgtttcaggaggataattctaagataatatccctctcccaaggagtatatgtgaactcagtaacaggagagtgctttgaatctttaaagtactgagtagctagcaaagagctgccatatgcagatctcaaccagacctgaccatttggccctcgcttgcagaaacagggttaacttcccaagacctgaaccactgccagtgtaaataaatgggaagaggtattgaacaaccttgaagagcttatgcctccccatcctgctgtaaattgggagtgaaggtaggccattgtgtacattgtcacaagacactctgatgcctggtaaaaggataaactactaattaaaatgataaaattacatttgaactctggagaccatgagaactttataattgactcataatatgcyttggctgcacatacacagctattaatggtttgtagaggggaaagtccatttcattttgtattaacaaaaaaaacactccaaaaaatacacataatggaaatgattacttctctcctctggtaagaggcacttaacctttgatcttgtgctaagttacattaccagaggtagctcaccagcggccaggaatttgtttcccttggtattgttctgaggatatgttaaaataattagtaaatttttcaaagtcctcctaaggatagctctttcttgattaagatgaactaaagaaaacattgacttaagcaaatacagtgaaaaatacaaaccaccattacgtggattcaagattttctatttttccttccttatatgaagtattaaatgaactaattcctcaacctttttttattttttttatttttattttttgagacagggtcttgctctgtcacccagacaggaatgcagtggcatgatctcggctcactgtaacctccacctcccaggctcaagcagtctgcccatctcagcctcccaaatagctggtactacagatgcatgcccgccaccactctcagctaactctttttttctttttctgtagagatggtttttcaccatgttgcccaggctgttcttgagcttctgggctcaagtgatcctcctgtcttggcctcccaaagtgttgtgattacaggtgtaagccactgttcctggcctcctcaattcttttttaaaatgtttggtggaattataaaggacttcttttgtttttcttttgggtttgtatttatctttatattgttacaataacaaatgtaaatacaggcccataaatgtaaagatataataaaaaagcttacttgctggaagtcatacacatgttcatttaacttttctgagtaatttttttttttttttggagacagagtcttgctctatcgcccaggctggaatgcagtggcgcgatgtagctcactgcaacctccatctcccaggttcaagggattcttctgcctcagcctccccagtagctaggattacagatgttcaccatcacgcagtggagatgggatttcactgtgttggccaggctggtcttaaactcctgacctcaggtgatccacccgcctccacctcccaaagtgctgggattacaggcatgaccccctgcacctgccctttttctgagtaattgatgttcatcctacttatgatttttcgaattagcatatcaactacggaaatcacctggcctgagaaaaaaagggagtcagacccctttgtcaggaatggtctttatgtgagtgtctccactaaaccagacccttatatacaccttccacctataccaaatactgttttgcatggcaggccaatactgtaccrttttccaaacttgtatttatttcttcagcacatgattagaagttatatttatttcttcagcacatgattagaagcctgctaccgccagcatgtctgaatcataagtcttggcctcagtgattagcagcatgagatgtagagcctaattctgttggtggtggtgaaaaagactaataaattaggaagctggaggaaaaaactacagtatatgaaaacaaaaaaagaatagacattacaargaatttctcctttaaagaaatactcgaggaagaaatagggaagcgaaaagactaatcacttcctttccttattcctttttaaaaattactctcttctctaaatgtgttatttcagcctgtacttcctctgggcactttcatcactttattgctctggcaggtgattccaggccagtatgaggtcttggggcttcagaatcaatcaagggccccagctcgtctttggatatcccaaagatgactccaagtcattggaatccccaaaggctttttcaggagctaaaccaaggcaaggaaaatctctccttccttgatattgtttaaaaatacccttgccctgggttggtagctcacacctgtaatttcaacactttgagaggccgtaggggacagatcgcttgagcccaggaatttgagactagcctgagcaacatggcaagaccccaactctacaamaaatacaaaaattagccgggcttcatgacacatgcctgcagtcccaactacttggaagactgaagtgggaggatcacttaagcccaggagttcragtccgcagtgagctgtgattgcaccagagggcaacagagtgaaacactgtcaaaaaaaaaaaaaaaaaaaaamacctcacccagcccgcagggtactgttaataatcctgaagttcagaaattctcaacaatgcttaggaattccacaaaaaaaaaatgggaatcaagggggaggcttgctggcctttccaaactatatgccaggattttatgaggtgttctagaaataaatttaaaaacaataaaagtatatcttaccctagttacaggttgtaaacctcttaagaaatcacagtgcttattaacatatcgaggactctaagaaaccctacaatcaagaaacctctttaattctaattgatccagaattttccaaattaaccacaaattttttttttcttaagacatacttttatatctctcagaactggtcttccaaggcatacaatttgggagatacttgaacaacaattatggcacattggcctagttatatttgtgtgggtcctagacctagacacatggaaatatacctttaaatccatcattcatgttctgatttgctgaggtgggtagcaattctccacacatatcagcttcccactgaaatggctgattaccttctcttcttgatgatatttagagaagggaaaagataggtctgcttaaaaaaaaggatacaatgataccgtttgtctgatacatacaaggctagagattatttttcagacattcccagtgtcaccaaaatgagggcaacctgaccctggatgatggggtatctaaaattacattcctgaaacccattaacggtcaaacagagaggagagtttatttggcagccaggtttttaactttgttgctctagctgatgaaaaggtttgttgtttgaggtcagcaattacagtttgaggtttaggagtcctttggttttaacatgagcagagagataagtgactttaaattcttccagaaaccacagatcctgcattgcaagtaatacaataaataatacaaagaatcttcttcaaatattattttttaacttagtaaacgttcattcagtgctttagtgtgcaaaaacattgtgcctggaggagacagagcacaggggtagggccttatagtctttctagagaggcagacatgcataaatagatcaggaatgcatgaaaccagatccgctaaaggtaaactgagtgtgaatgagctaagcccagggttctccatgacagcattcccagtatcaaatctgtttcttattaacatgtccctgcagtggagtcgacagtaaagggcctcggagggttctggagaccagaaaggaggccggatgaaagaggccagtctcatgcatcatcagacattcctgcaaatgtgtaaagaatccacgaggagggagggggagggcaagcattgccagatgtctccaagccaaccctttaacccattcctttacctgcttcccaccttcaagttttgtttcttatttttggtagggtktgtgtgtgtgtgtgtgtgtgtgtgtgtgtgtgtgtgtgtgtctttttttaatacctagaatatatcttaaactgatgggaaaaaagcaaatattatcaacagtaacattctgaagtttgttctgagacattgtagtagtcacacatgaacaggcatttcacatttttcttttgtttttttttaataatttttcagcatttcactgatctttcccttagggtgccaagatgcctcaagggttgcatcccttccatctttgaaggtaactgccctctgcttccctttagagggctggatttctactttgtatctcacatctttgtctggttttaagtcatacagattctttcatatgaatcaagaaattcacatttgataaccattaactatatccattttagatgagaaagaattatcttgtgattaaattttaaaacagtctctgggccgggtgcggtggctcacacctgtaatcccagcactttgggaggccgaggccgttggatcccctgaggtcagaaattcaagaccagcctggccaacatggtgaaaccgcgtctctactaaaacaaaatacaaaaattagctgggcgtggtggtgcatgcctgtaattccagctactcrggaggctgaggcaggagaatcagttgaacctggaaggcagaggttgcagtgagccgtgatcgcaccactgcactccagcctgggtgacagagcgagaccctgtctcaaaaaaaaaaaaaaaaaaacagtctctgaggattgggataattatactcattattataaagctattgtttggtcagaatttctctttcaatgttatagsttggtcatttgtttacttcggccctttttacattctatatacatactgcacttcctggtataaaatttgttttgcttatttttttggcattgagttctgagttttttctaygaaagtcctgtatacacttttgcaagttattgtttttaagttcatagctatatcttcaagtatttctgaaagtacttttccattgtgatgactatatataattagttaataaagcttcatatattaagacttagttcttcattttaaagagtaaatgttcttcaaaattctcaaggattttaaatttgtaagccaatttcttgtcagatctgataagatcatcatcatgtttataaagtaattaatgaagagctatatcaaagcaagtcaacattttattatgttgttggcgtatgcttacattattggtattatcgttaattcttttacaccatctgtccatttcatgaagctaattcagagaaaactagatcatataatcagaaaagcctcctacctgggcacccacaggctgaagcacctcaaagtgaactgaatacaaaagtgtaagagagagtgcctgtattcacttcttatggctgctgtaataaacttggtgacttagatgaacacatatttatcatcttggaattctgaaatgtcagaagtccgatrcaggtctcaccaggctaaaattaagatgtcagcaggactctgctccttctggaatctcttgggaagaatccatttccttgtcttttccagtttctagaggccacccacattccttggctgttggccccttccatcttcaaagccagcaatggttcactgagtctttcttagcctgcaacactctgactccccctccacttacaaggaccccatgatgacattaggcccaccctaataatccgggataatctcaccacctcaggatccttaatcagttctgcaaagaccctttggccagataagataatatttataggttccaggattagaacttatgtatctctgggggaggggcattattctgcctcccacagagcctctgacatctgttctagaacatctgttctatgtgcaggatcccaccttcctactcactcttggagggcatgtggtatgcaccctactttatagattttaaaagtcaactgagaacctgaccaatgatttctttgatctaggctagatctcttcacttcctggggcaactaaagtctcttgttcaatagtgaaaatgcacaagacaaaagaaaaaatctcaggaaagaaacatctttgtacagagcccccattgctatgcacagcattgatataagggaacactgtctttgccctacaatatataaactgaataaaaatatgcaatatttattattatcataaccaacatagtctttaaataatgctgttaattctrttaacagtgtgctttgctacagttctcaaaacaagagctgtctaaacaaccttcccccatgattccttaattgaaggaatctgttagggattcctagtgctttttgaaagggtgtcatacttgatcaaarcagtcaggtttccaagaaatacccttacacagcattctctttctattttcattttatttatttattttagtttattctgtttgtttgtttgtttgtttgttttgaaatggagtctcctctgtcacccaggctggagtgtagtggcacaatctcagctcacagcaacattgcctcctgggttcacatgattctcctgcctcagcctcccaagtagctgggattacaggcacgtgccaccatgcccaattaaatttttctgtatttttagtagagacgggctctcatcatgttggccaggctggtctcgaactcctgacatcaggtgatcctcctgccttggcctcccaaagtgctgggattccaggcatgagccactgcctccggcctacagcattccctttctaaattttgctactgtatcattatatgatggcacgggccttgaagagcaattgtgtttgattatacaatgtgctcctaggtttcttggtttattcttgtcttataatgaggatttaaagggtagcatcttgggctgggcacagtggctcatggcattcccagcactttggggagccaatgcaggaggattgcttaaggccagaagtttgagaccagcctggtcaacacagtgagatccccatctctacaaaataaataaataattaaagggtaccgtctctggattttttttttttttttttttgagacggaatctcgctctgtcgcccaggctggagtgcagtggcgcaatctcggctcactgcaagttctgcctcccgggttcacgccattctcctgcctcagcctcccaagtagctgggaccataggtgcccgccaccacacccggctaattttttgtattttttagtagagacggggtttcactgtgttagccaggatggtctcgatctcctgacctcaagtggtccacccgccttggcctcccaaagtgctgggattataggcatgagccaccacaccaggccccatctttggatttttaccatgagacacttaatactagagaaagacaccttgctccatgtcgtgctcctttctcttggttgctgatatatcatgcttaaatccactttttaccatgtgatacatttaccaaaaaaccttattaaggcaataactaaaatcaagaagcatggaagataygctyattttttacaaggtaatgcaggcttctcagcaatactcaatatttttattccaaatgtttacaggggaaaattagcgctttataaataatgccaaacattaagttgtggctactaaaaggaatacccaatacaggattactgttttcagcttttcatttgaacaatccttagaaaattttcactgtatgcaaatccttgtttgactttatcaaataagttactaaactatgctgccttccctccttacacgattttggttgcaatgttgatggctaatgatgaccttttacatacaggtgtggtctaagwgacattttttttcctgtttcatcagaatctctgcaatttttctcctgtagagaaagaccctccctcccrggttttgcctagtctctgtcagtgaacaccgcaactgccctgaaggggtgccccaaccccgttgtcttttcttctttcacttcttatagaggattagttcctatagcattggaatagtagaatcttgggtgaatygcttttcctgttgtgaatgattcatgcaatgaaagtggaagatcactaattttcaaagcagtatggcttaaataaaaacatcttggccaggtgtggtggctcacatctttcatcccagcactttgggaggctgaggcaggaggattacccgagctcaagagttcragaccagcctgggcaatatagcaggactccatctgtgctaaaaaaaaaaaaaaaaaaaaaaattagcyaggcatggtggtgcatccttgtagtcccaactactcaggagtctgaggtgggagaattgcttgagcccgagaggatgaggctgcagtgagctgtgattgcaccactgcactccctcctgggggacagagtgagaccttgtctcaaaaagaaaaggaaaaaaawttttaattaaaaaaaaamttacccaatcatattataartatatggtactttaacgagctgtcatctctcctagagtgcattttttgtatcagtgatagaatacagctatttaactagctggatcaaacatcaccttgtttctgttcctgaataacaataggcaccacttactgacggcttaatgtctcagaaccagttctctgtgcccttatttaatcctcgtgtccccccagtgagggagatattacttgctccatcttaagagcaagatgaaattttttcattaagatgaaaaaattaagaatcttgaagmgtaagtgatttcccaaaaaacatacctctagtaagagatcgcaataccacactccctcccaaacactaaytgtatttcctttcctttttcttaccatcatttctcaacaatactgctaacgatgtttgccttttacagtcttacaagtgttctgagatgatttaatactctttaattatttgcttaatgcctcatttcctctctatgatgataatcctttgtctgagcctcattactgctgcacatccctcatatagggaaaacagcagctatatttatttctagcccacttgagcacttattatttcatycttggtttttagctggttctctgaaactgaaatgcatcgtctatcatmccaaatagagattttaaaaaaaaagtttctctcttgatagatttggaggctttctaagtctaatcttttctctgtaaaacttcaggctaggttttaataaagctatttttacaggattgtatcagaacagttcttgcttatatattgttgrtatttttggtttgggttgtttattataaagagatactaaattgatctcttgatgtgttctacatctcttgatgtgttctcttgatgtttgaccttttctcacctgatttcatctaccatcagctccttctctgtaactgatcagtaagrgcactcagtaggaaacataccactcaatggattttcttcctcaaagttttggatatggcygggtgcggtggctcacacctgtaatcccaacattttgggaggctgaggcgggtggatcatgaggtcaggagttcgagaccagcctggccaacatggtgaaacccccaactctactaaaaatacaaaagttagccaggcgtgagggcacgcgcctgtaatcccacctactcaagaggctgagacaggagaattgcttgaactgggaggcagaggttgccgtgagctgagatcatgccactgtactccagcctgagcaacagaacaagactccatctcagaaaaaaaaaaaaaagaaagaaagaaaacaagctttggatactagtcttcaatcaatcaaataatkcttataaataatgaggatgctctaggagtcctgtgttatcagtgctttccctagaacccagttagaggccagtgcctacaccccacaccagtcctcagagggctacagccgacaggaactttgagttcatctagagtagctgcctcactacagattacacaactaagaccaaaataacttaaccatagccaaacaccttcttagagagagtcaggacttgaatctaggccttctgactcataaatgaatagcatctttataaaaatcagaaacagagagaggatcgggcccaacttcttttctcgtgtattttctgtaccacacatctaaacctctggcctcagactttatatctagagcttttccaaaaaggccatgtgtattagtccattctcacattgttataaaggaatacttgagactgggtaatttatgaagaagagaagtttaattgactcttggttctgcaggctgaacaggaagcatgatgctggcatctgcttagcttctggggaggcctcaggaaacttacaatcatgatggaaggtgaagagggggcaggtgcatcacatggccagagcaggagcaagggagtgtgaggtgtgagggggaggtgccacacacttttattttatttagttaattagttagttcgttcgttatttttatttttattttattttttttttttttgagacagggtctcgcctgtcacccaggctggagtgcagtggtgcaatatcagctcactgcaacttctgcttcccaggttcaagcaattctcctgcctcagcctcccaagtagctgggattacaggcatgtgccaccatacccagctaatttttgtatttttagtagagacagggtttcaccatgttggccaggctggtctcaaccttctgacctcaagtgatccacccacctcagcctcccaaagtgctgggagccactgcgcccagccaccacacacttttaaatgaccagatctcacacgaattcactcactatcatgaggacaatatcaagaagggatagtgctaarctattcacgagaaaccatccccatgaccaaatcactccccacaaggccccaccttcaacattggggattacaactaagcatgagatttggagggggacacagatccaaaccatgtgacttggtctcttagtaatcacacagctggctttttggggaagaaagttacttatttcatrtgaacccaagcataaggaatctgcagatttttttccagcaatatcgatttatgtaaatactttatattccattcttggaggagacaagcatttcatttagtcattgttttcaatcatataaggtaactagagatcaaagttctttgaagaagatggttataagaaaatacccttgaattttaaaatgccttacacttttattagcatcacacaatgaatatttgtcattctgtggactgtaagcatagttttctctctgaaaatcctggcaagggaaatccttttttattgattctcctggtcacaaattattatgagaaatgcccttttttagacattatctctgactctaagaaactaaatgacaaaaagtgagaggacagtactgttttcaagtccacttaarccacttgaaatttctctaggatgatgccaattcatagccccactctagtgttggaaacagtcattgaactgaactctcatcagcctccattttgtgttgaagatgtgcgtgcctgtaaactgagatgatttctcagcacaattatctcaccctttttcatatctcaccagatcaactgggatttcagacttaccatcatcccattgggaggaagccttcttagccttctttcttcatctttcacgaggcttgtggaaaccagagtttgcagcatagattcaggcttcttcattcttcctaggcccaagtgtgcaaatgatagcatttgtttgtgaaaaacactaccatgagtcatgagtcaaacagtatttttcctccttttttttttttttttttttgagacggagtctcgctctgtcttccaggctggagtgcagtggcgcgatctcggcttactgcaagctccgcctcccgggttcaygccattctcctgcctcagcctcccaagtagctgggactacaggtgcccrccatcacgcccagctaatttttttgtatttttagtagagacaggggtttcaccatgttagccaggatggtcttgatctcctgactccrtgatctgcccacctcagcctcccaaagtgctgggattacaggcgtgagccascacgcccggcctccaaattttcaatggctaagcattgaggrttaaagaacagaacatgtctgacaacagaatagattaggtaaaatcatgactttctcagaaagctgagactctgtgatcactgtactcacctgtaccccttccttctgccctcaggcctgtggctgccactgctccttctccaggtccccacactctgtggatgccctgaggacagagttcatagctgctcttcctgtggcttccttcaattaaccctaagcaatttggaatgacttttggttttgtttcgctcccttctgaggtcccaaccataacagagatgacagatggagatgtccagccaggctgtcctgtcacctactggcctatcaccattttgccaaccgttagagagaggagggccacacagattctacaacctcgaccaagacccctggtgaagaatggccatgctattctcttgagaaatggttcacatttcatgctattctcgtgggaaatagctccaccacctagtaagaaacccatggctgggcatggtggctcacgtctgtaatcccaacactttgggaggctgaagtgggaagaccatttgagtccaggagttcaagaccagcctgaacaacatagcaagaacccatctctatttaaaaaaaaaagaaagaaagaaagaaagaaaagaaaaagaaaaccataatgatacttcatgtccctttgttgtctttctttcttttctttagcaacacggtctcactacattgcccagtctggtctcaaactcctgggctcaacaatcctcccacctcagcctcccaaagtgctgggattataggtgtgagccacttgtgcctggcctgttgtctttcttagagccaaactaccacggagctcatcggccctatctagtagcccatatactctctattgcctgctgcctgtgtgttgcagtgacccataagaggtaggccactggggtggctgaacagaaggggatgatgaaaactgcaggtgatcatcaagtgctcattgctggtagtctgtacttagtcattcttggcgcggctacacatgttcagtgtattcaagctagagctgtgttttttgggaagtcaaagttgctattcattctcgcaacagaaagaatgctgacaagtagtgtcatgtcacacaagtagtttcataattacagagacttcactgttttttatgttggaaaaccaactagtacagaattaaggrataattataagagaatggaggtcaacaagagcttttctgaaaagataaaaaatccatgggggtgggagtagggggtggggagggaaaatgagaaaccaatatttgctgcaaagacacgggggccttgttgatcaagaacacagccaggcacagtggcatgcgcctgtaatcccagctacttgggaggctaaggcaggaagattgcttgagcccaggagtgtgagctcagcctgggcaacataacaagatccagtctctaaaaataattaattaactggttttttaaaaagaagaagaagaagaaccagtgatagttatagctgttcctcttcattcactatcctctgtgagctaagaatttccccccaacatatataaatgcaggacacatcccacacatgcatttgccatataaacatcccatgtattgcgatgcatagcagaaacaagtgttcacaccttcttttactggagctttgttttatatttgggtagaaaagaataatttctgtaataactaggggagggaaaaatcctattctgcatttctataaaatttgagaattaagttgygtggtataataacctatcagaacattgtaatgtttattttgccctattttgctttctgatccttgttygttcttggaaaagaaattgtaaatgtattttatccaaagccataaagcaattatttaatgtaatggggactctaagaacaaatacaagcatcctcaagaagttcagcctattaggaagataagacacaaaaacaacgatcatattaagcagaacatgctttgctttataaaataagtaagcaaacacaacggtaaaggagagatggggaaatgagagaaaacgtgaaggagatgtgatttgagctgggtcttaaagaatctatgggaattcaataggcagagatagagagakaattccaagcagaaggaatcatcaaacaaatgacctggaggtgggaaagkccaaggtatgttaaaacaagagcaagtaggctgggcacactggcacacgcctgtaatcccaacactttgggaggctaaggcaggcagatcactggaggtcaggagttcaagaccagcctggccaacatggtgaaaccctgtctctactaaaaatacaaaaattagccaggtatggtagcacacacctgtcttcccagctactcgggaggctgaggcaggagaatcgcttgaacctgggaaatggaggttgcagtgagccaagattgcaccattgcactccagcctgggcgacagagctagactccatctcaaaaaaaaaaaaaaaaaacccaccgggcacagtggctcacgcctgtaatcccagcactttgggaggctgaggcaggcagatcacttgaggtcaggagttcgagaccagcctggccaacatggtgaaacctcatctctactaaaaatacaaaaattagccgggcatggtggcaagcacctgtagttccagctacttgggaggctgagacaggagaattgcttcaacccgggagacagaggttgcagtgagccaagatcgtgctattgcactccagcctgggcgacagagtgagactccgtttcaaataaaaaaaagaaaaaagaaaaagagagcaagtagctggatgtggctgagcactggatccctgaagtggatggtcataggcacgctagaaacatggayctctgtctatttagctgagaattctggattaaattcctagaaagccgctgaaggcttttaagcacaaaaatgtcttcagaactgctgcaggaatatacagtacaggtaatgagtaattttagaatggatataactggtagggaagaggacagagaattctcttgttggaatggctagttttgagggtgtgggtcaggttaagacaataaatgaaaccagtagagagctgattcactggggcaaaatggagccaggctagtgttcacaaatggccctatggcagattcagtggacgtgaaggagtgattacggtgtaggataaagggatagttatcaaaggagttcttgactcttccataatttagaaatggaactggtggttcaattcctcaactggtggttgaggaactggagataaagagtcttgaagctggggaaatttgtgagaccataaacatgaatgttgaaatctcagaggatgggatagaaagcccaatgaaacgggctgaagtcgctacagaagatattccaggaatatcctggaagttagtagataatagagaaaactgtatgagtggaattagcctcaaaataagagtttaaagggtggtggcaacmgaaaatgcatccataaagggcaakgggaaagaaaaagtatgtcaatacacatgaaaactgagaacattgattgcattcagggagagaaatctggtgattggaaacgcagataggagagagagttttcagtgactaccctgttgaatttgggattttaaaccatgaaaatgctttaaattaattagaagagtactttttctaattaatyggttaatgtttgtttgtttgtgtatactgacctcacaatttcttctaaaaaaaaaaacaggagaagtagcctcaaattggcaaggtcttgagggtaatggtattaycaaggaaaaatccttggttcccttaaggcagaggtgtgaaagaaggaagttgctcattgtaaaaggggtttttgtaggaccttgaagccagcttatactgaagctgctacattgtctggagtaaatacccagggtttgtcatctcgcrgcaggaaaatttaggacatggacactcatgaggagtttaggagyggaagtttaacaggcaaaagaaggaggaagaaaaagaaaggaaaacagctctctctagtgagagaagggtcttccgagaggacctgccagtggtggatgtgccagattttatagtcaggtttgaggaggcggtgtctgatttacataatgctcacagattggttcaattaagtgtgacatttacatagcgggcagggaaggctggttgccccaccctaatcttattacgcaaataaactttctccttgggctgcgccatcttgtctgctccttgctgtacacgcggctggcagaggaaagatgggactgccattttgaacatgattggcacaactgccggcatctatgtctgcagcttgatcttacaggctgctgtttgttagaaaggaaaatagtttggggctgcttttcattaaaaggaaaacaaatagtttggggctgcttttcattcaaaggaaaacattaccaaggacttccgtaccctcactatctgcctaagtaatttcttcttaactcctstatcaataytggctcatgagagctgactatgaaagttttaataattttttcagctggttgacatcaagttggttggtacaaaaaaaagtcatgtggcagtatttacaccatggaaaacagcaaatgctacaaaggagaaatcccctctgcccctcttcagagagcctgttgttaaacatttaccagcacaccactgcaaaggccttaatggaaagccctgttagagggcacattatggagtgggtcagatggaggtggggatgggtggcatggatgagtcagctggaggrtgaggccgctggagtggatgaagtgagcaaaggtgataggaatgcgrgaaacaaaactgtagggtaccactgcagtagcttattagcaacagatctttggagaygaaaattcagactcygaggccagagggccccaagttagaatccaaacacttccacccaaagctgtgccatcaaacagatgttgctggatctgagtgtcagttttctcatatttaatcgtgttgtagagatggaatgagacaatgcatatagaacagctaaccctggctgggtacggtggagcacacctgtaatcctagcactttgggaggctgaggcyggcggattacctgaggtcaggggttcaagaccactctggacaaccaacatagtgaaatcccgtctctactaaaaacacaaaacttagccaggcgtggtggagcatgtctgtaatcccagctacttgggaggctgaggcaggataatcgcttgaaccaggaggcaaagattgcagcgagccgagatcgcaccactgcactccaccctgggtgacaaagtgagactccatctcaaaaaaaaaccagctaacccactgcgtggtacttggcagtgctctgcctatgctaatgaatgggggtgatgattgtggtggactcggtactgatagtggaggtgaatgggggtgatgattgtggtggactcggtactgatagtggaggtgaatgggggtgatgattgtggtggactcggtactgatagtggaggtgaatgggggtgatgattgtggtggactcggtactgatagtggaggtgaatgggggtgatgattgtggtggactcggtactgatagtggaggtgagaagagtagagttggacgtggtataggtgatgacagtggggtggtgatagtaggggtggaagtgattatagtagaggtagtggggtggtaaaggtggtagtggtggtggcaggtttttattattattatttattacagatagggtcttgctctgtcacccaggctggagtgccatggcacaatcatggctagctgcagccttgaactcctgggctcaagtgatcctcccacctcagcctcatgagtagctgggatcacaagtatgcaccagtgcgcccagctgatttttttatttttttgtagagataggagctcattttgttgtgcaggctagtctcaaactcctggcctcaaatgattgtctcaccgcagcctcccaaagtgctggaattataggcatgagccaccacacttggccatggcagcattttttaaaatatacatatatatatatatatatatatatatatataaatattatagagacaagatctcactctgttgcccaggctgttctcaaactcctggcctcaagagatcctcccacctctgcttcccaaagtgctgggattacaggcatgcgccaccatgcctggcaatggcagcagttttaagagtagcaatcggccaggcatggtggctcactcttgtcctcccagcactttgggaggccaaggcaggtggataacttagggtcagaagttcaagaccagcctggccaacatggtgaaaccctgtctctgctaaaatataaaaattagctgggtgtggtggtgggtgcctgtaatcccagctactcgggaagctgaggcaggagaatcgcttgaacccaggaggcggaggtcgcagtgagctgagatcgcaccactgcactccagcctgggcaacagagtgagactccctctcaaaagaaaaaaaaaaggctgggtacagkggctcactcctgtaatccsagcactttgggaggccgaggcaggctgatcacctgaggtcaggagtttgagaccagcgtggccaacatggtgaaaccccgtctctactaaaaataaaaaattagctgggcatggtggcgcatgcctgtagtcccagctgctcgggaagctgaggcaggagaatagcttgaacccaggagtcgaaggttgcagtgagccgagttcatgccactgcactccagcctgggcgaagagtgagactccatccaaaaaaaagagttgcaatcatcctcctctcattcacagcagcaattgtgtgctaacaatagttattaaaatagctgtttactagaatagctctctgctatgagtatcctatcaaccatggctttctatcaattagtgcttctaaagagtgacagtacacgataaccaatgggagcaatgctttagtaaaccagacaggtcgctgagggcaacaggaatatgaacaattacaatgccatccagtaagggccataatasagatatgcaaagtgttaaaagaatgcagtagagggataggtttgtgccgcaggaggaccagggaggcatcactatcaaagacagtgaattgagccctgaatgtgaaaagaaactggggaggggctccccaggcacgcacagaggtgtggaggcaagtaagtacaaggcatgtgaagtaaaagagcgaagccaaagaatagggcctggggaaccacggaagacagagttgaatctagactaagrtagaccttgaactttatccttttgccagtaggaagtaatcggtgtcttagagtatcattcactttaaygtagaayaaattaaagaggcaaaagactgaagacacaaaaaccagttggaatacaacaggcaagaggagataaggacttgccccaggcatggcactggggatggagaggaaagaacaggtgtaggaatccaccaggggaggtggccagggagaaagtagaactacagtgaaaggaggaggcagactagcttggttcttgccagctagtctgccttgatgccrgacatgtgctcgccaccactattgatgaatggttgaaactgatacaacaagattagggagaacmcgataactttaagaggaatacaaagtaagaactagaacttagttgtgagtagtctctaaaagtcttaaacactccygggtttatctacctgtttctcattaacttttttttttttttttttttttttttgagatagagttttgctcttgttgcccaggctggagtgcaatggcgagatcttggctcaccgcaacctctgcctcccaggttcaagcgattctccagcctcagcctccagagtacctgggattacaggcatgtgccaccacacccagctgattttgtatttttagtagagatgacgtttctccatattgcccaggctggtctcgaactcctgacctcaggtgatccgccctcctcagcctcccaaagtgctgggattgcaggcgtgaaccaccgttccctgctcttgttaactttcaagaaatagataagtagaagccaaagagcaaattcttgcctctgtgtgtgtgtgtgtgtgtgtgtgtgtgtgtgtgtgtctaatcagcagttgaatgattagtaataatcacattttctcccattgaaaaaaacttctaaaagaaatcccatcttcataacttattttcaatgattaaaaaaacagaatattaacttttcaaatctgctttctgaatgtccytctttcctttttaataatgcttttgtttttcctgaacaaatatctcattgcagaaaattgtaaagaaaaaaacacgaaatatacaaataacatgaattatgcaggactctgttggcaattggaaggatttggcttctactctgagtgaaatatgatcatttccaggttttgcccaagggggtgcatgatcctggcttttaagaaattattattcctgctctgctgagaataaactacatgagggcaggggtaaaataatctatgactatttccttaaaatarattatttaaaatggaattacttcatcaagactatatttgcttaggttctcttaaagatcatactcccattatttgtgaatgagtatgtgtgggagaatatatctgtttcaaaagtacttaaggartacaaatgcaaaatctgktttcaacctttatgaaaacaactggctccatcttagtcttaaataatcaacctcttgtggcatggttgacatttctgctcaagtgcagccatgaagcaggaaaacatgcattgccaatttaagagtcaggtggaactacgaatcccttcccttatttaacaagcatttayggagcacctaacgtgtgccaggcaccaggctgctcctgaggatacagcaataacactgacccagcctctgctctgacttcaaaagcaaataatctgagagctttttttcttgtagtgtttatacataaaatgtttacagttgctacaagtactgtaaagagagagagagataggggtgttatgatcctaggcaaccatgagctgtgtgatcaaagaaaataaactgcttcttcctcaaggaagtctgacttgaattccaggtggaaaaaaaaaaaaaagcagcaaagagcaaaggccagaagcaggaatgaatataaaattttgagtaattaaaagaaggctagagtgactggaacacagagatggaggggaggggagggaaggtgggaaaaaraaagaagggatgggagtgatccaagacaaaactagaagtaataccggctcaggtagcccagaatgttgtaagccacattaaggattttgacagttttgcgaagagcagtggragattattaagcagtttcaatcaagggccaagcaagctaaacttttctgatattcttaataaggtaaactaaaataaaactaacagattgaccttgatctcagtgtgcttagttatgggacagttaatgttagatgatttgccaaccaaagaaagcaggttttgcttaaatgacagcaaacattaatttcaggatatggttaatacaagcaggtataatcagaattgtgacttacatttaagcacactgaactagacattaattagaaatttctcataaagataccacaatattatgcttgattgcayctgtagaaaacaaacccttgaattttcactttaggcttagagaataatcaccattcttccaaatcctttgccaaatgaaaatgaaaacttctaagatgaatttctttctgcagggtagagattacactcatgtaaagatttagctgacaattaccaaaaaagaattgggggaataaatgggagagacagctgtccaggaagttatcagttgccagatttgcttgtaatgcagagaaattcccrggaagtcaaaaagtgttcattggtgattgcacgtcttttgaaatcgcatcagaggtctccattttctaacctcttctcttgaaaatgaatatatgtttccagtctcccacaggatgtataattttgcatgattgttagtagctattggcaccatttatctctctagtcatccactgttccattttgtattaagtctgaatatgctttgcacacacttacacttcaaaagacggtagttaaaacgatctcacttcgatcgtcttactccagcaatacaatttttaggggtttgttttgttttgttttgttgtaaaacaatatactcttttcctatcgtyataatgaaatgggaaaggttcccttgttcccatcgcacaccctatgtggctcacttcttcagtgcctcactacgcatacctctaggggagcatacaaacaggcaggctgtagggctcccaccccacggcagtgtctaggggtgaatgtttacagctgaagccccartggtcgtgtgtcgcagggtgttcttttagtttagccctataggcagcttgtgttagttcacttagatccgcttcctcatcacaaggacagaggactttctgtatccgggttcttgccttggtgcaccggaagaactggatcacatgggggcttggataatgagtggaaagttttactgagtagaagtagttctcagccattgaggaagccagaaggaagatggccttcccctagagttgggccacccgctgcccggctctcctctgactgccccggaccaactcyccctcattccgcaggtcgcgggtcgatggcatcgatccatgtgcgggagtctatcgatgtgctcttccgcagacatgctctctaatgaccagacacataaccactcgtgtcttcttctgccgatgtgtttcccaacacgtccagccgcttgtgtctctttccttactagggtctcgaatttttataggcccaggttgggggtgtggtgggccaaggtggtcttggaaaatgcaacatttgggcaggaaggcaggagtgcctgtcctcgcctaggtccgtgggggtagagccctagccagggaccacgccctcctcwacccagcacttcccttcccctcttccgtatcatttaaaggcatcacgctcttcccttcccagcactccttatcaataatacgcaagattttaaagatgcagtgcaaaataagaaaaacatctggaaggtctggaaccctaawaccagtctgcgttgtctttcttaaagactgaaattgtacaacatttattttcatttaacaaacacttatcacttgtatttgtcagcctttgttcaaagatgctgtacgaatattaacatgtcaaatattatgtagatcattctattgctttttaatttatttatttatttattttgagacagagtctcactcggtcgcccaggccggagtgcagtggcgcgatctcggctcattgcaagctccgcctcccaggttcaaacgatctcctacctcaacctcccaagtagcacctgccacctcacccagctaatttttgtatttttagtagagacggggtttcaccatgttgcccaggatggcctcgaactcctggccttaggtgatctgcctgcctcggcctcccaaagtgctgggattccatgcgtgagccagtgcactgggccaagcattctatttctcatttatggtgcgtctatttgccaccactgcttcgactgaggatagcttggcacaagatgtgaagcttgttttgaaggcctgagcagagatttttttttgcacagtggagtccagtattttgccaaaggcacagaagaaggtacggaagatgaaaaacttttccccagcctgggcaacacagtgagacccccatctctacaaaaatttgcaaattaaaaaaattagctgggtgtggtggcatgtgcctgtagtcctagctacttggaggctgaggggggaggatcacttgagctcaggactttgaggctgcagtgagctatgatcacaccactgcactccagcctggatgacagtgtgagaccctgtctctagaaaacatggaaggaaggaaagaagaaacgaaggaaggaaaaactgttcctttaccctcttaagttcagtgttttgggggctgcaaaagaaaagacaggcttctgttcattatgtatgggagttctcaggaaaatatgcctcaagggggcacttacaatttggggcttatgtgccatctgaacaagagaaggggaggaggagaagggcacttaaggaaaaataaattacttttaagaaagatcatgggcctttaggagaatagatgggagatgatagttttgtgacaatgcctgtttaggtgtgctgtgggcttctctttggtattagagtcaactttctctggttgcagaaaaatctgtgggaagggatttatgacaattgagttttgggaggaggttctgctttggggcagataaggagtttaraaataagcctcttatcaaatgccttcagctcaaaatcatttttatgccacagtggcatattctagaggaacctgggccaaggaagaccacccttggccttactcctggagtcattccggctctggcctagccttgggggtggaactctgccctggtgtggacaagaatggaccctctcaggccccagcatattctcagaggtccagtcacaccgacctggaagtgtcagagatgtacttaattctaggtttgcactgaggccaggtagaaaccgcagtacctggagcatttctttgtgttttggggttttaatagacttggccaggaaccaagtccaagccctttcaacatcacagaatgttttttaatcttccctagtccaccggagtggaaaactcacatagttctcatcattcacaaacacttaaagggtgtttactaggtactagatggtatatgctactattatcagcctcattttgtaagtggaggagacaaagaaaggttaagagggttttccaagttcacatggatggtaagcagcacagtcaatatttgttgactgtgaggccgaggcaggtggatcgttcgaggtcaggagtttgagaccagcctggccaacatggtaaaaccccgcctctactaaaagtacaaaaataagctgggtggtggtggcgcatgtctgtaatctcagctactcagaaggctgaggcaagagaatcgcttgagtctgggaggtggaggttgcagtgagctgagatgcaccactgcactccagcctgggcaacagagtgagaccctgactccaaaaaaaaaaaaaattgacaaattagcaaccgggcacagtggctcaggcctgtaatcccagagctttgggaagccaaagcaggaggatcacttgaggtcaggagtaccagcctggacaacacagtgagacctcatctctaaaacaaaacaaaaaaatttaaaaataagaaaattagcagggtgtagtggtgggcgcctgtagttgcagctactacggaggctgaggcaggaggctcccttgagcctaggagttcaagattgcagtgagctatgattgcaccactgcactgcagcttgaatgacacagcaagaccctatctctaaaacaaatttaaaaattgtttaaaaaaaaackttttaaattgacagattagaatctgatcagtttctttccagagctacttgaacatctcaggagattctgctaaggatggaaaaggaaggagttttaatttcaaagtttcattccatgtcttgtcaaaccaagtctagatttgccatttagaactgcattctctgatcctgtgttttaagagaggtttctccatgtagatgaaaccaggagctgcatccttcctcggattggtaggtgttccatgggctttatctgtgcggcgtaatgacagcacacaaacgccagggggcaatgcagtttcaccgaagaatcctaggaaactcgggtctggctttgactaagaacattggcaggatcctggggcaaaggtggaaatccttactaaaaagagttccgccaaggaaaaaatatgtttaaaaatcctttctttgaaagcttcctgcattgtcatcaaaattgcccttcagtatttgtgcacagctggaagttttgtgatattatttgcaaaagatttacttttcgttttttctcaatgcggctgcctagtctttcctggaaggtttcctgggtctttctgcgtaggaaggattattctaaccagctctcgggtagcctggatcacattgttaggactctgttgcgtcctctgcctgaccgcggggctctcttcccccggtgcccattcagcgcttccagctgcctctgcggttggagccgggctccctttaaggtaattccagtctgggcctgtgttttgtttccagctcggcagccgccaggtgtctgccctcccttaacctccaaggatgagagatcaaaggtgcccctrcatctgcctcctgcccagctctttaatctgttacatgttcaaaagggacaaatgcagtattgtgcactcagggagggaggacaaatcagagaagtggaaatgggcagagcctcagaatgtgttaacttacataaatgatacggaatatgcctgtcgacatattagccctgccactgtagaggtgttttcttcttaaaagagcaagaatattatgcagaaatggaaatcytcttttctccctttggaagcctactaaacccatttaatgaaatatcgtacacagacccatttggaggtcactattagaaatataacgaggtaaaacaaaatattttttaaatttatgaaatggaaattacaagggcacttgtagagacctgagcttattttatatgtggcaaaaatgataaactaatctttaagcagagcagatatattttaagaaagactattyccagcggagcatgtattttccatatccgtagagctaagtaggggaatgcattttaaaacagtaggaattcagattaggtattaagaaaataatactgagagcaatggttatggaaggtacagaattttcctaacagcactaaggaagcagcaattatttcttccatttttagaggaaggggttggggggagggggaagagctcctgatctagtaacaaattgtttctaaacttaaatttagaaacattttaaacagtttgagcatccacgattttctttagacttttaggagagctccctaatttccaactaaagacataaaygtgaacaggcactaattacttttttctctatgcattcctgcgcccacacacccagaggctctcttgtgcttcctcttccccagcggttacaaaaaggaactccagcaacttcagttgtgcttagctgccgtcacagacaatagcawagtaggaccagtggcctcatattaagtcacagtctttcccagttacaatggctgagaacccagattttcacaaggtgcaaagaaaagaatattgacatggttattaaaagctatggtgagaagggagtctttatcagctgcttcaaatatttcattcaccttcttaacaaatatttattctgcacttactatgtccagacatggtgctgaactcggggaattcactggtgatcaaaagcagtcttaccctttgttctcatggagtttaccatctaggggtagagactagcgtcaatcaaataatcacagagataactgcgctgaaagaaagagacagttcttgtgggaggatctattgtaacaaagggactaatctagaggctcagggagaacttccctgagaaaatcctcattagctaagagtcaaaggatcaagaagggtgagggatggcacgtgctaattctgcattcaatattagtagaactgaaagggtgatgtggctggagtaccaagagctaagggacagggcacatgtgtagtcagaaaatgtatgcacagctgactatgtctgtcatctgttgctacataccttattaccccaatgtggagcagctgaaaaacaatcattatattataccttatgattttgaatcaggaatttaggcagggttcagctgggcaattcttctgttccacattcagctagaagttggtgtattagtcagagttctccagagaagtagtatatccgtgtgtgtgtgtgtgtgtgggtgtgtgtgtgtgtgtgtgtgtgtgtgtgtgtatactgacccataattatggaggctgagaagtcccaagatctgcagtcagcaagcaagcttgaaacccaggasagccaatggtatagttccaatctgggtccaaagacctgagaacatggagaacaattgtgtaagttccagttcaagtcgaagtccaaagggaagagaagactgatgtcccagcagagacagagaattctctcttactttgtctttttgttctattcaggacttcaactcattggacaagacccacccaccttaggaagggaagtctgctgtactcaatgaactgatccaaatgttaatctcatccagaaacaccttcacacacactcgaaataatgtttgttcaaatctctgggcacctcatggcccagtcaagttgacacacaaactaaccatcacagttgggctggtcttgagagtccaagacagcattattcacatgcctggcaccttcatttcaatggctgggagtgtgggctcctgatcagtagcaatatggtaactgttgactagagcacctgtaattggcacctccagccttgyggcttcaagactccttacatgtcagttcagggcttccagagacagttcctatacaagagataggaaatcttaaggtcttaaggtctgagcccagatactggcagagcatcttttccttcatattcttggtgacggccaaagcagtccacaagcccactcagaccaaagggaataacraagatgccacttctcaataggaagagtttcaaataatctgtggtcatcgttagtcatccatgcttcagcctctggacacaaattattcacatcttctgtaaggcaaaatatactcaccccttctaaagacttcaaaaaccttatctcaagctcaagtttgagattcaggttctttttttttttagggggagtcttgctctccttgcccaggctgaagtacaatggcatgatctcggctcactacaacctccacctcccagattcaagcatttctccttcctcagcctcccaagtagctgggattacaggcatgcaccaccacacccggctaattttgtatttttagtagagacggggtttcaccatgttggtcaggctgatctcgaactcctgacctcagaatatccacccatcttggcctcccaaagtgctgggattacaggcgtgagccacggcacccagccgagattcaggttcttaccatctaaataaggttcagttgctgatggggcccatttgatgctgttgtcttatacaatttctctcaatatgaagacctctcaatatgaaaaagrtatttgcctcatatatgtccaacgtatactgataatacagggatgggataagtgcttgggatattcccactcaaagagtggataaacagctataygccagrcattaccatagcaagtctgaaatccacatgctgccagttccttggctggagggccgagtcctgctctctggaatgattctctgcrgctcttggatccaccctccagactcttgttgcaccttctgagttgtcccctttccataagaaatagcactttcagctgaataatcttctcagcttatgtctcacccataaaagtctgggggctctaaggactctttgcactttacctctgcctgctttgtccaagctgattatgtgtccactaatacacttctctcataatctttgtgggcatcctttgaatcttactgggtttctttctgttaaatgaaacacatacctacaattctcttcaagatagtcccttttttggtctgggbtcagagttgggtgctgtgggacaatacccttaggattcttaaaagcctttttgtctattttggaaactctatgaggtacatccttaaatatttctacagtcatwaaaaggtattttacagccaccccctaggagtgttaaaacaatttttgttttgttttgttttgtttttactcaacacattctagctctttattgtctccaaattttgtttgaaaactgaacagttcttttttgactcatctttctctacctgcaccttttaytgtgtgtagctttaaaaaaaattttttttttaaatttttaaatggcactttaagcattctgcctagaagttttcttactaaaatccgtgggttccttgggtatattttctattttccacattactacaagtgataatgttagcaaattctctgccactacattaatagagttaccttttctccaggctccagtgacaattttcagtcctcccagccttcaccagcagtcttctcaagaccttacagctggccrggagcagtggctaactcctgtaatcctagcactttgggaggccaagatgagcggattgcctgagctcaggagttcgagaccagcctgagcaacatggtgaaaccccatctctgctaaaatacaaaaaaaaaaatcatccaggcatggtggcaggcgcctgtaatcccagctacgtgggaggctgaggcatgagaattgcttgaacccaggaggcggaggttgcagtgagccaaggccgtgccactgcactccagcctgggcaacaaagtgaaactctgtctcaaaaaaaaaaaaaaaaaaaaaaagaccttacagcttcttccctctgcctaaacttgacacttaggctcagctgatgtttatgagtgtctgcatgtggcctttccatcaggaccgtctcaggacttgtaacctgctgtctcaggcttcccggagggagtggtccatgacaccagaggggaagctgcctgtttcatgagatctgggcagacagcatcatttcctctgtattctaatggtcaaagcagccacagagcttacccagattcaaggagaggagacatagcctccacctgtctgtgggaggagtgtggaagaatktgtggccatttttattcacctataagtgacatcatagagggttttgcagtcatgttaaggctttttgtcttaagaatttcactgggcactctggtacatgccgataatctcagctacttggaagtctgaggcaggaggatcacttgagcacagcagtttgagaccagcctaagaaacatagtgaaacttcatctaaaaaataaatgaataaaataagagttggaaggctgtcacatgatcttttgaaaaagtctctccacctgcagcatgggaataacttagaaaaaggatattaaaggctgaagttcttttttagttcctctttctctattgtgccttatcatacagtttcctgtgaacattgctgtcataatttggcccagggtgatgacagttgagacaagagaactgcagattattgaggtatttgaatataaagttagttaactaatatttcttgaagtccatttagggcgtaattttgtctccaagtagccaataaacttacttgtcagataccttgccaatattggaaccctaaaacacctaaatatttactgcaagttatatgtattcactctgcacatagattttgactaactccctataaagaacagcctctgagtagaaatagacagtggtcaatataatgaaatctcagtactcagctcaataacatccataattgaaataacgtatttgaagtacatttgctgggattgataagatcctccttgaggatactcgggaatgatcaccttttcattcagtaaatattttttgtgtgtttgctctatgctacaaatttctgggcagaggagttacagcagcaaacaaaacagaccaggttcctgctctccttctgattatattctaatgaggaggacagaggtaaacaaggacgcagatgtgaaatcaatgagataactgcaaacagtgaaaagtgctatttttaaaaaataaaagaaagccagttgtggtgacaggtacctgtagtccctgctacttgggagtctgaggctggaggattgcttgaaatcagaagttcaaggccaggctggccaacaaagtgagacccccacccccaatccttttaaaaaataaaaattaagtaaacaaataaataaataagagcaatgggatagagttatttctggcctgctctaaatatagtaatcaaggaagactctctgaggaagttatatttgaagtcaaatgtgaacaaaagaaaagagctggttataggaagattgggcagtttagggcagcaggcaagagggagcgagccgcaagtacaccagccaagggcagaaaggaaatagcattgcaaagcacagaaagaaaccatgtggctaatgggtccggaataaggggaaaagtcatgtgagatgaagtagaagaaatagggaaataggccgggcgcggtggctcatgcgtgtaatcccagcactttgggaggccgaggcaggcggatcatgaggtcaagagatcaagaccatcctggccaacatggtgaaaccctgtctctactaaaaatacgaaacttagctgggtgtggtcaggcgtgcctgtagtcccagctactcgggacgctgaggtaggagaatcgcttgaagctgggaggcggaggttgcagtgagccgagattgcaccactgcactccagcctgggcgacagagggagattctgtctcaaaaaataagaaaaaaaaaaaaagatattgagctgagagaaaaacagttgagtttgttttttgttgttgttttcaattgtattttcaaacacttctgcagactatgaaaaagaaaccgggggtgggggcggcggggggtggtagcatccgtgtgtgtgtgtgtgtgtgtgtgtgtgtgtgtgtgtgtgtataaatgtatgtgttacggcttaccctgaattccaggcaatgtcaatgtcagccacacaccagataatgtctattgtgtgtcctggaagtcagcagtgctatgtgtagctttttaatatcaacatcaatcccttcttaaatattcaaaatttttaaaaacatttacattttaagataaatgatctttcccactcgttgtacaattttgtgtatcatgttaatataaggtatctaactagatatagctaattctaaattttcactgtaacatagttacttcccaatataaaggcctaccttactatacagaataatttgacttggggtttaaaaatataagagaagtctatttggagctagtgaatcacacgtttttcttaaaacaatgttgataattacagatctaatttttgtttgtatttgagcttaccttgtttccccaactcagtaaatgatgattgggctctccttcactgccacccctgtcttccctgatgatttgtttaaattttcttgttttcttgcatgaactctgtttctacatactgatcagagcncattgttgtcttttcagttgaatgacatttgctgacaccatgattatactcaaaaatgaatatggctgaaaaacttgatattctgatgtatataagaattctactctgaaaagatgaggtcattgcttaataagtcaattacttgtacctgaccttgcgttttggtttagttgcctgaccaaaagaatgtcaaatccatttatattgtgattatactagttgattgtcaatgactgttatctctaaggtgatgtatgtatagtttatttttgcaatgaaaggcttcacaggttttgaaataactggcaaaaaataatagcaaatcctaagtttacttccatttgtcttgttcaattaaatgattaccccctttatgaagatctcaggaagtattctgaagttcaaggtcttccctgggcctgacacaaggaagcatcagttatggcagtggtgccctaaagcgggttcataccagcttgcaagagccagacgttacagtttcagacattttggaagcccattattacaaattaaattgtgtaacttacaattagataaattatatcaaaaacaaaagttataaacatttaaaactcatcatttcctagtcatgtttctatccatgctcttgaggttacattctaccatacccgtatggtggaaatactacatgctggtgtgatcactgcacatctctgcccaactttatgtacagtgacaaatatgccatggtatgggtactgacatagtattgaagctgaaagaggcttatttaataaaaataacttatatcacataaaagatataataatagtaagtttgttgggaaaagggcaaactgagatgcaactgaatgaatgattgtctgatcatggttgaactgctggctacagatacaagagtttggccaagatgaacaaaagaattccatgggagccgggcgcggtggctcaagcctgtaatcccagcactttgggaggccgaggcgggcggatcacgaggtcaggagatcgagaccatcctggctaacacggtgaaaccccgtctctactaaaaatacaaaaaaaattagccgggtgcggtggcgggcrcctgtagtaccagctattcgggaggctgaggcaggagaatggcgtgaacccgggaggcggagcttgcagtgagccgagatcgcgccactgcactccagcctgggcaacagagcaagactccgtctcaaaaaaaaaaaaaaaaagaattccatgggaaccaattcactatatggaatttgccataaagaatactgtatatttcattgttacttatagactgtgtgccacatatctttcgtatcagcaaaatttataataaacatatggacatgtatatgcatacttcctcccctatagtgtttcttactcaacgttggaccagacaccattggttatgcaggaaagatgaaattcaataggaaacaaacttaaaagcagcttttccagaaagtcataaggaagagcaatgtgaacataatctgttaaaaatcagtgtatgttcatacagataccaatttgatttaccagtattgaaaagaattttgtttgcaaactcctccagtttgaaagagaaccaggacttcaaccgaatgaaactgcagacatttttgttcagcctaaatgatcatgactattgcgtaagattagataatattatttatttttaactatgacttataaaaagtgctctttaaatcaaatgattgttatcaggtctaatttatcttagtttggtattttcacctttaaattcaccgaaaagccaaatgtggtggctcacgcctgtaatcccagcactttgggaggctgaggcgggcggatcacaaggtcaggagatcgagaccatcctgactaatacagtgaaaccatgtttctactaaaaatacaaaaaattagccgggcgtgctggcgggcgcctgtagtcccagccactcgggaggctgaggcaggagaatggcgtccacccaggaggcagaggttgcagtgagccaagatccgagatccgagattgcgccactgcactccagcctgggtgacagagcgagactctgtctcaaaaaaaaaaaaaattcactgcaaaggtgcataaatatcagtcaagggtactgacttgcttcatgaacaacttgacttgctcagataacccgttcactctctgacttgagggagctgaaatctaaacccatcagaccaagaaamgggctctggcccaaccaccccagagaagaaagttaccagatcacaccatggtttttaaccacctgttacatgtttcaacagaaactctgtcctaacatgcatcagatgatctctagatrcagtatcaaagaggaagtgctggtccctagcatcctattgtgtgaacttttattgatccataatctggtataatttatacacagaaatagtcactcaggcagacttggcctttgtcccatccaaaaacatgtttgatcccatttttagtgaaaaatttccccaaatggttttagtgggggaaaagaagacatccatgagacctagttaagactaaaaattattttatttttgaagttgatatttgtttagttacgttcttgcaatgccagcagaaaaagaaaaatccaaatctgaagcatgcgtgtgttatgagaagcctggaaaaggcgatttgggtccattatataactgccactttttgtttttattcaaggtgtcataaaactgagttctgcagttgaaggtatgtttttacaaccacaaaatcartaatgttttgcttaaaggttgcatagcgtggcttgtagctaaaaagcttctgtggcagtggtgtttgacgccatgtgcgaattgccagctattgccattgcatctgtgtttctccttgttctggtcattttatgctgcaaagctctcagccctcctcaagtggcatttgcactgacctgagagggcagcaccaacatgtctgtttctgtctcctgatgtgactgcctcggagccggtgctcgtcagcgagcctgggctcttctgtggccttatttgaggctggacatagtcttgtcaggaacctttgccctggatctttcagcagagcctggtctagagcgtcctttatcccaacagagcagacatgtttgcccaggaagtatgtgagcaagaagagtcatttaagcttcttcctgatgagacaatgagatggttaaggcatttgccggtctcattgcgggttcctcctgggcagtgtgacccaccactatgaggcatagtgaagaccaagttcctttactgttgtccgtgtcagtgagtggcagttcccttcagtcatacrttcaaaaagccgagaagaaaaggaagaagaatttaaggaaagtacaaaagagacgtccaagcaaagtgttttgctgagtaaccccaagaatattaaaatgacytcattttctgaaatgatttattggtataaaattgatctccttagccccataggagtttcacaaatcaaaagtagagaatgtgtcattttcttcttttgtgagtttctgtgtttgttttgggggggtgtgtgttctcgtttattgggagtttgtcggccatgctttggaggtttcttcatcctcacttaatcaggggaggctgcatggaagaggtagtgggctttcgggtgagttttcaacttaaagggagatgtggctggcttggtgaatgggcaatgcatggaggtggggagtgggaaattgcagtgggggttggagtggtgaggccgttcagggggctggagtttcaaggttgggaggtgggagagtagtaggtcagttatgtacccatgggactggcaaatccaaagtaagggtgctttatccctttggcggatttagtaccattacattttacaaaaccaagttgaaaaggcagtatttgtggcattcgtggcagaaagtatgatgctactctaaactcagcaaaaggtgcaggcagcggtgtttcagagtggagagaaaaagaccttctcacckcgaggagaaagtgcatgttgcaggcctgtggtaggccaagcagaaattcaagttcgctttgcgcatcaaagtggaattttactgaaggacaatccaagttcctccctgcctaaaacgatataagagacacagaaacaaaatcaagcagcaccatgagaatgaccttggctgcagaaactcccagtagcaatttgagcactgagtttcagttaattatctgttgaattacagataacagttggttcactctgggccgttttgatgttttatcaaggaatggctttgaagtcatagttttacattgcctgcttggtttgagtgcagtattccacttgccaacaaaaggatacagtgacaaaatacaattttcattttaaaagtcagaaagtcaagagagcattaagtaattttaaaactattgttttgctagaggttattagtgggtgtcatggctkgtctacacccccaggacagggttttgttttctccagaaagatgagagtttgagggaaaacaaaggcaggaagcagagtgactgcttggggctagtccggcagcctctggccaccttcctcatcactcagcctcctctgagtccctggggctcacaggaagttctctggagtggctgcggataccagaagtcaggcccactgcgactgttgcttgagcatctttttgggcagcttattgtctgaggctcgggagcatgctgtgttgtaaccgtgttagaatatatgtgtgcaggggcaatttgggagtgcggttgttgggctggggggacgtgtgttccatgcatgcattctcagtgcatctgaaacgtggaactcttacaagcatgctcagtggcacgtgtgtcggacactatctcttgatgagaaatcaaacctcagatggtcggccttgccactgcttagctaattaccgtacttgcaactttccatctgcagaatgaattcaaggcagcttcgtgcagcttttcatgtcaaagagtgtgcacatcagtggaagaaatccactgtcagaaatgaaaccgctttccttttttwaaaaaaagagactctgctctatattatcctagagctctgaaactagtattaatattttaggtagattctcttattcttttcaaggaaaaataattgtcaaagtcctaagagaaaaacaaaccaagattccatttgccactccctaccaagtgtctatggcaggcagttttgtttcttcttttctggagcaggggtgccctcttccgcactgtgcagcttcatagcagctttttaaatcagcaaaaagaaaaacccattttgtgtctcatgaatgctaaggttaaaggtggaatgtcctttgaatttaaacagaaacactcatcaatgctttgattattttgcnatgaggaaaaataagtgaatagggaaaaagttcagtttgaaagaaataattgcaaagtcttatcgataacactgatgaattctcacctctgattttagattgataatcccaaactccgagaaaattggggtcagagagaaacatctagacagcaatttgacggaagggggaaacagtcgcaccaatggcagggaaggaaaaaccactcacagcaagaattccacaagagtcttctaaatatttctctgaataaggtcttttctcttgaaactggagcagggagatagatgttaggtctacatattttcaccagtagggccaaaacattggccttatcaaggagaagtgggaacacaggtcatggaagagctgagtcacccctgagtcagaatgactctgatattctataggcagctatttatttccagggaaggaggggccacccgagcyggaaactcttggtccaaccgaagtggtgtattcagacatggggagtgggagtgttccagcaggcacaggcctggagggacaagatgagccagccgtggtggcaggctgatgcaagtctttgccagtgataagcagcatgtgttctgtgttgagacttgtctgcaaggcgatttgtttatacctcataggtgagaatctaaaacaccaaaaggacatcacattcttttgaaagcccgtatgaaaaaaatgaaggttgtcttctttggaaaagttccacatttctaaatataggaacagatgagcctctctgaagaaatcaaataaatgagggctgggtgcggtggttcacacctgtaatcccagcactctgggagggcgaggcaggaaaatagcttgaggccaggtattcaaagttcaagacggccgtgagccacagagcgagtccccctcatctctacaaaaaatattttgtaaaagttagctggttgtggtggcatacacctgtagtcctagctacttgggagtctgaagtggcaggaccagttgagctcaagagtttgaggctacagtgagctatgactgcgccactgcactccagcctggtcaacagagcragaccctgtctctaaaataaaaactttttaaggaaattctgttgttcatagtatgacaagccaggtgtccaaaaacaccccaaagggatttaatgtattaaaaatattcctaatgtattgatgtcattccctctgtaggtgaactctgcctttgtcattgtgtctttctttcttttctttttttttttttttttgatacagagtctcgctctgtcgcccaggctggagtgcagtgttgtgatctcggctcacagcaacctccacctcccaggttcaagcaattctcgtgcctcagccccctgagtagctggaactacaggcgcgcgccaccacgcccggctaacttttgctttttgttttttgttgttgttgttgttgttgttgtgtttgagacagtcttgctctgtctcccaggctggagcgcagtggcgtgatctcggctcgctgcaacctccgcctcctgggctcaagtgattctcctgcctcagcctcccgagtagctgggattacaggygcccgccaccacgcccggctattttgtatttatagtagagacagggtttcaccatgttagccaggctggtctcgaactcctgacctcaagagatccacccacctcggcctcccaaagtgctgggattacaggcgtgagccactgcacycggcctcccaaagtgctgggattacaggcgtgarccactgcacccggcttaatttttgtatttttagtggagacgggggttcgccttgttggccaggctggtctcaaactcctggcctcaagtgatctgaccgccttggcctcccaaagtgctggaattacaggcatgagccaccttgcccagctgaatctttctatttttagagcaaagccatgtgctcagcgtgtcaaggtagactgtggtaaatcctttaataaacagatgctgatggayttaccaccagtagtaaactgagaatgaagtttcaactttttgtttgtttgtttgtttttgttttttaggcagagtcttgctctatcgccaggctagagtgcagtggcacattgtcggctccctgcaacctccacctcctgggttcaagcgattctcctgcctcagcctcccaagtagccgggattacaggcgcctgccaccatgcccagctaatttttgtatttttagtagagagggggtttcaccatgttggccaggatggtctcgatctcctgacctcatgatccgcccacctcagcctcccaaagtgctgggattccaggcgtgagccaccgtgcccagccaactttgtttttttgagacagagtctggctctgtcgccaggctggagtgcagtggtgtgatctcggctcactgcaacatccaactccctggttcaagcaattgtcctgcctcagcctcccgaatagctgggattccaggcacgcatgaccacacccagctaatttttgtattttaatagagacagggtttcaccatgttggccaggatggtctccaactcctgacctcrtgatccgcccaccttggcctcccaaagtgctgggattacaggcgtgagcagccatgcctggccagtttcaacatttttactaccggaaatcaaaatgttagtcagataactgacagagataggatagagctatctcccagaaggagttccttccttccttccaccagcgtggtaggtggcagtgtgtcaggaatactaaatggaatattatagaaactgagaacaaaactcaagaaacttgtttctgcaaagaaacccagacatcctgtttataaaaatgacgtggaggctggagcaccacastaaacaaacgaatgttctcttctcagatgtatctttacttgtcattatacttttggctaaacgtttcttttttctttctttcttttgtagagacagggtctctctatgttgcccagggtagtgttgaactgctggcctcaagctgtcctcctgccttagcctctgcatccagccaaaatattcctatgaaatataaatgtttcaaccaggcacggtgactcacaactgtaatcccagcactttgggaggctgaagcaggagcatcacttgaggtcaggagttcaagatcagcatggccaacatggtgaaactctgtctctactaaaaatacaaaaaattagccaggcatgatggcaggtgcctgtagtcccagctactcaggaggatgagcgggagaatcgcttgaatccaggaggtggaggttgcggtgagccgagattgtgcaactgcattccagcctgggtgacagagcaagatcctgtttccaaaaaaaataaaaaaayaaaaaacagtaatgtctctgggagcattgagagtttcccaaatagcttcctaagacgaggaccctcctgaaatggcagagrtggagccacgtgacccagaaactggaagatgtgtggaaagaaatttccaagggttagccatttgtcrtcttgtgattaccctcacctcagataaagttgacctcaaatgaccaaccattgacctcatctcagagctctctcacatttatctttttacttttttttttaagtttatcttttcccctctttgtttccctctccctcctcctcttttccaactgcccttttctatttctgcacagtgtagaagaaagtttaagggggaccctaggcaacagaaagccaaccagtggctggaagggtctggcaaggagccgctatttgcctcagtgtcctagccaataaaataaagacttctcttggggcagttgcagagactaaactagatgctagagagaaagccttaacacagtgtacggaaggcagtaggtgctctccttcccgctttcctctttccartgtctaatgatcatttctactagaatcatggtgtagcacactgctgagagtttcattttcggcaaagccacaaacagagccagyttataaatccttgcttctcccctttgagagtccttagagggaagcgactcctcgtgttggatagagctctctgatcacctttctgggacctgtggcatctgccaggggcaagtcacagccccagtttggagtgttcgattcagatgagattgtcccccagtctgttytttgagtcctggaaggtggggaggagaggaaaggttttcaggcaacaaacaagtgctgactgaagactgatttcatcaatattaattgtgttttattacaaaagagtttatactggcacagtgttcctgagcaagccatttgtcaccactcatcaacgatatgaaagtttttgaataaggagaaccaaagtaaatacaaccacagctatccagagaggaacttttcataaatctttgaactgtatagccaaaaactaatcaaatctrtgctgaataagcggccttgagcacttaacaacaaattagcataacccagaagacagtgtgcatcccaagcaccataacctacccttcaccctcctccctggggcaggaagtaggcatttacaaatcaaaggcaagctgcaaacgataatctgccacttgtcactgatttattttccctcttttctttttgtttttcaagagtataagtttcaatgtctgtgtatttgtttttgttattttggcagtctagtgaaagttttcaatgtaaacaaaactcttactcttaaagaacaagcaactctattacattgcataagaaggcagttcttaaagacaatggtctaattagcagtctttgaagccaattcaatagtaatatcaaagccacttctagtatttcaagcccraatttagaaaatggccttgatattttcagtctaaaactatagtctgaccttactattaattttrgaacacaccataatgtagacaactgctgaaatcacttgatgttatgaacccggaaatcacaccctcttaaacgatacatcacacccattaaaattaactgtaaaatccattttgtattgattttgtttgaatttggtattcaactaagatgctttacatgcgtaaatattgccacagctgtatatacaacggttttgttgaatccattgatgctttaagttgaaagagcatacgttatgggttttgtttggtttcactgagaagaaggccaaaggatttttctagcaatgtttcaacaaaatgcaaaattagatgccagtccagaagccttaaggatgtgaaatgttttgaaaatacagattttcagctatttcctagctttaaccgacatgtgtgcttaagtgaaggcagaaggaaacctggtacacttctgctgagtacagtgtttcttaaacatgcacctgttaagagatagagargcaaatttaatttcctttttagccttctatatcccattgttgattttatacmtgccctccttaaatatgaactcctaaaattgtgtttggaacacatattggaagaaagtrtagaacagtatataggacagtcctaggttcaaacttcgtagccataacttcctggctgtrttgtaatctggagcaagttactccgtctgtaccacactttcctcatctgtaaaatggggtaatgctacttagcactccagttgattaagaagcttaaatagaccgggcgtggtggctcacacctgtaatcccagcactttgagaggccaaggagggccatcacctgaggtcaggagtttgagaccagcctggtcaacatggtgaaaccccatctctactaaaaatacaaaaattagccaggcgtggtggcacacacctgtagtcccaggtactcgggaggctaaggcaggagaatcgcttgaaccccagaagcrgaggttgcagtgagccaagatcgtgccattacacttcagcctgggtgacagagcaagtctcggtttaaaaaaaaaaaaaaggagcttaaataaaatcagataatgttgaagtacctagtaaactgtttagcatgtaggcattcaatatattttagatatttatttatagttttgttatcgtttttgtttttatgggctcaaaaattaaattataaaaaattcatatgctgctacttttgcttgatgttattatatatatagacatgtatatttttatttatttatttatttattttgagatggattttcactcttgttgcccaggctggagtgcaatggcacaatctcagctcactccaacctgcgcctcccaggttcaagcgattctcctgactcagcctccctagtagctgggattaccgccataagccaccatacctatgcctggctaattttttgtatttagtagaaacagggtttcaccgtgttggtcaggctggtctggaactcctgacctcagatgatccacccacctcagcctctcaaagtgctgagattacaggcgtgagccaccgcacccggtgatgttacaatagatatattttatttatttatttatttattttgagatggagtctcgccctgttgcccaggctgaagtgcagtagttcgatcttggctcactgcaagctccgcctcccgggttcaagccattctcctgcttcagcctcccgagtagctgggactacaggcgcccaccaccacgcccggctaattttttgtattttttagtagagacgaggtttcaccgtgttagccaggatggtctcaatctcctgacctcgtgatctgcccgcctcggcctcccacagtgctgggattacaggcatgagccaccgtgcccggctgttacaatattttttaaagagcaatgatcatgtgtctaaataacatgaatttgttttttactaaattaaatattattttattacatgtaatctaatggcaatctaactaatgagcttgatgcaatcaaaaccactcaagaaaaatgattagaattctctacacaactgtttccttttctttatctgattatggttttggtttaagtatggagggttttatttgttttcttttcctatctttttctttttctttttttggaaacaggatcttgcccaggctagagcgcagtgatacaatctcagctcactgtagccttgacctcctgggcttaagtgatcctccatctcagcctcccgagtagctgggatcacaggtgtgtgccatcacgctcggctaactttttatttttgtagagatgaggtctcattatattgcccaggctggtctcaaactcctgggttcaagctatcttccagccttagcctcctaaactgctgggattacaggcatgagccaccacacctggcctccttttttaaaaatattgttttggagtagcattagttgagtgaatactcatcacattaaaaataagacgtttgaaaactaccaccgtcaaatgatttagggcataccagtctcatatagagtatttgtaaggcacgatgatgtaaaggattcaggctgctgaggtctgtggcaggaagcacagaaagactgtttccaaacatgacatattatactctattgcttcatgcttattaatctgtttatgacaaaactcatgaataaagttaataaatgcccttactactatttcatgccctatcccaggccatggggacagaaagatggaaagatgagccagacatggttcttctatctagagaaggcagcatacgtgtgaacaggccattatgacttaatataatgaatgcaatggcaggaatatataaaaggaattatgtgaacatagaagtcagcctaggaactctgcctgggtagatcagaaggatgccccagtgcacatgtctaggttttgcaagctatgcagaggcaaacaggaaggggagggctcattgagggagacctaagcctgcacacagacagaaggatgaaaaacgcctagccctccaggagtcagatgtgactgcagctccatgcccacaagggaaaacatccaggcrtgaagttgggaatgctggttggaaatacattttcaaagttcctacaggcaatacatagccagaaaaggatgttatttatttatttattttcattttctgtattaaaaaaatatatatatattcacatagctcaacaattgaaatatggcagcctggaccacatgtgaaaccctgtctctacaagaaatacaaaaattagccaggtgtggtggtatgcacctgtagtcccagctactcgggaggctcaggtgatcctctcacctgggaagtcgaggctgcagtgagctgtgattcctccactgcactccagcctgggctatagagtgasaccctgtctcaaaaaagaaaaacaaaaaaattaaaatacgagggaaaaatgcattgactcaatacacagttcccattccccttaacaggtaacctaccatgaccaattttcttttttctacatagatgtatgctttttgcatatttaaacattatgagtatgtgttttccccttttttacccaaaggatagtacactatgtacactattgtacagcttgcttttttcacttaacaatatgtcttagtaatatttccatatttccatagagaactttctagttatgttttgcagctacatagtattctactatatggatatattacaatttacataaccagtttcttctttgccacacatttaattagtcccaatatttagctttctcatacagtgctttaataaataaataataggctggccgcagtggctcacgcctgtaatcccagcactttgggaggccgaggcgggtggatcatctgaggtcaggagttcgagaccagcctggccgacatggtgcaacctcatctctactaaatatataaaaaaattagccgggaatggtggtgagcgcctgtaatcccagctattcaggaggctgaggcaggagaatcacttgaacccgggaggcggaggttgcagtgagccaagatcgcgccattacactccagcctgggcaacaagagcaaaactccgtctcaataaataaataaataaataaataaataaaataaaatagtattgtaaacatataattttgtcctaatatgtcttcaggataaatccctgaagtggagttacgaggtcaaagattgtattaatgaggttacgttttgctacaataacaaacaactctcaaatctgtcaataaacataccaaaaatattccaacccctagtacatgtcctgtgatgttcgttttgcaggagattcctgctccacacagtctctcagagacccaggcttgggtcttgtgcctgcaccatctggaacccacagccttcacagtcattgccgcaggggagagacaaccttgaaccaaaagtgacaaacattatttccacttatattttattggctagaactagtcacatggccctgccaaacttcaggaaggccaagaagtacagtttttgtgtgtgtttctggtaggagaagagagtacaatatgggtgagcactaattatatctatcagaaagcatgcatgcttttttcattggcaaaagtctgccaaattaccctccgtaggctttcccagtggacaccactaggagtgccaccagcactgttgaaagcgcctgtttctccacagtttcatcaacgtactctttcatcaaacttttgggttttccatttgtaatactcttattatgagcaatgttgaacctatatttgagtcatttgtatttccttttcaatgaactgtcatgtcatatccttcagcatttttttttttttttttttttttgagatggagtctcgctctgtcacccaggctggagtgcagtggcgcgatctcagctcactgcaacctctgcctcccgggttcacgccattctcctgcctcagcctcccaagtagctggaactacaggcgcctgccaccacgcccggctaattttttgtatttttagtagagacgaggtttcaccgtgttagccaggatggtctcgatctcctgacctcgtgatccgcccatctctgcctcccaaagtgctaggattataggcgtgagccactgcacctggcctccttcagcattttttagatgactgttagtctttttcttactgagttgttggagttatatattagagagaatacccctttggttttgatttactttttctttctctctttctttctttcctttcttctttcttctttctttctttttctttcatctgtcctcccgtttctacgtatacaaaaggtggcatattatacactctctttgcttttcaaaattctgtagtatattctggaaatcattcattttattaaaatcttcttccttctttgctagggttgcatggtagtctattgggtgattgtaccataattcactcacacaatcttctatggatgtgcagtttatttccaatattttgctatagcaaataatgccacaatgaataacttgagtctagttgtttcatatgtggggaggcatatcttcagataaactcctagaggttgaattgttgggtgaaagtgtcgaagagtagctggtttgactagacattgccatatccccctcccwaggggctgtaccttttgtactcccaccagcagtatattaaaatgcttagctctggggtgtgctttttaagttctggacaaagaatgtatcttatcaagaagatatgaagrcttatgatacaaagagctaacatttgttgagcactttataatacgttcataattatagtaagcaaaggcaaggcgtatgttatctcattaatacttcacagtaactcagtagccactcttattatcccttgatttgtagaggagaaaaccaaaaaaggcatggaaaaggtactagcttaaggtcataaagtttcaaatgcaggactgagtgagtaataattgaatccttgaagtcatccacagtaataccctccttttcagtatacctatctccagatagggctaaaagcagtttaaactatctgagggagatggtgcatagtgaaatctcacatttacatatgccaggtaagcatcccaaattcaaacatctgaaatcgaaaatgctccaaaatctgaaactttttgagcactgaaatgatgcccaaaggaagtattcactggatcattttggattttggattttcagatttgggatgctcaacgagtaagaataatgcaaagattccaatccaattcaaaaagatctgaaatccaaaacagtctggtctcaagcattttggataagggatagtcaacctgcagtaccaatgcttccaggcacaatctaatgagatggggtgagggagtagcggaggagtgtttgtggataatgacaatggacttcaggtaaatgaacataatttagcacgtgtgtccacagtgacaggcactggtctatgaaacactgtttaagaaggggacccaggtgttagtggagacagatccctgaagacagaacagaagcagcactgtcccacagagaccggttagagatttagcgtccaaaggcatttaactaaatttttattagttttcatgttgcagttttctgttcatggtttagagccagtgactcttttttcaagactcaaacatttgtatcctcttgaaaggctcataagcctaggcccagcatctatagtacatatgagacaaccacctgttctatgcccttacaggactgctatgtggctaagtgagatgatgaggtgaaaggactttcaaactgtagagtgaaatataagtatttgttatgaatttattacagaaaaaccaatctactattgttrccatagaggacagtattatatactgtgtgtgtctgtgtgtgtgtgtgtgtgtgtgtgtgtatatatatatgtgtacattgtcttatgttctttttttttttttttttttgagacggagttttgctcctgctgcccaggctggagtgcaatggtgccatctcagctcaccgcaacctcctcctcccgggttcaagcgattctcctgcctcagcctcccgagtagctgggattacaggtgcccgccaccacacccagctaatttttgtatttttagtagagacgggatttcctyatgttggtcaggctcccagcctcaggtgatccgcctgccttggcctcccaaatttctgggattacaggcatgagccagtgcgcccggcctcttgtcttattttcaatggaatgactgccctgagaatccttcataatatacattaattaataattatgtattaatatatgatatataatactagttatatgtaattaagtaataaatgttcatacacacatatagtattacatataatacattgtcttacttgtatggaatactagtgtactcttgtttgctgtgcctcatgaagaaaatgttttgtacagtgtagttgttaagaatttagttctagattctgactgcttggtttgaatcctggccttcctgcttagtagccatatgactgtgggcaaataaactgacttctctgtgcctctctttcctcattaaaaatttgaatgacaataatagtaaggattaaattgtataatacataataaggtcttaggacaatgtatggcacattgtgtgcactcaataaatggtgatagtacttgtaatagtaacagtagtcatattggcggagaaaggagattgagaatgattctggacataagcagacataagrtttgctgtaaagcacaggaaactgccgggttgctccgcttttggcattggtcatcacgtctttggccctcagctaggaaacatctttcatttgcaagcatggtataggaagagcacaggatcagattagatgaccccagggtcctgagtgcagcagtgggacactggggaaccacccctggggcytgacctgccggtgtctccacgtgcttggtttctcctcagtttgggagctttgttggtttccatcacttgttcaaccaagaattcatttccgacctgagctgagagcgcccgctgtctgtctcgctgtgtagcaggtcctgactttcctggttgctttgaagtgctttcgaagatggtatactattattgcatgttggaaacaattctggctttgctcctaagagtgtgccattctctgttgcttgggctatagatcaaggacttcagcacgtagtctggagtgagaagagaacaggacaacatrgtacttagcccacagcagtccttaagtaggacttttatgtcaagttacccctgtatttatttatatctattttttaaataaatatttattaagcatctatcacagggaagacactactatcctacgagctgtgagggatacggaaaaaaaataatgtaccctatctcactaggctaattaatttaaaaggcaactctggggccgggtgccgtggctcacgcctgtaatcccagcactttgggaggccgaggcaggcggatcacgaggtcaggagatcgagaccatcctggctaacacggtgaaaccctgtctctactaaaaatacaaaaaatcagccgggcgtggtgccgggcgcctgtagtcccagctgctccgaaggctgaggcaggagaatggcgtgaacccgggaggcggagcttgcagtgagccgagatcgcgccactgcactccagcctgggcgacagagcaagactctgtctcaaaaaaaaaaaaaaaaaaaaaaaaaggcaactctgcaggtagcaggagaacaattatgtccaatggtgtattatgttcaccagactgttacttcatcatcatctgcatcagagatttcagaggctttttgcctgagtcactgatatgccaagctggcccttcagaaacctcatctgtaatcagattttaagccaatgggctgtgattccttttaagccaatgggctgtgattcccatacaaaattctagccccgtgaccgccaatgccctgtgctatctccacaaagcatcagttcgtgctcttcctgtgcttctgtgcaggctcctctggacgctgctaatagcacccaggtcatggttcacagctttggggatttttcttttcttttcttttcttttcttttcttttcttttcttttctctttttgagatggagtctcgctgttgcccaggctggagtgcagtggcatgattttgactcactgaaacctccatctccagggttcaagccattctccagcctcagcctcccgagtagctgggactacaggcacccaccaccacgcctggctaacttttgtatttttagtacagacggggtttcaccatgttggccaggctggtctcaaactcctgacctcaaatgatccacctgccttggcctcccaaagtgctgggattacaggcgtgagccactgtgcctggccagatttttcctttcaaaaccgacgagggtaaaaagctatcttaggaaactgaaggcacagtgtagcattagttttggagttcttgtggatttatcactaagtgtggttagataaagtagatgaaaggaaatgagatttatacaacgattgcaaccttatctaatatccactttgatgccataagccaatgtgaccattttaggatcttattggactttgttataatcagactcatttagggttgttctcttgataatgtaggaatcaaatactaatggtatcaagtactgatgatattgaatgtttgcctgatgttaaaaacagaaagcacataatgcctcaagaatttgatattattcttaaaattttcacacttttaaaaatgtaagattaacagaatagtcactgtgatctttataaagtataaatatctcattaagatgtcatccaaggcagtaagatatacattaatgtgactgagggaagaaaaacaaaatataaaatcacaagatggggggagaaaagacagccatgttggctcacacctgtaatcccaacagtttgggaggctgaggtgggaggatcacttgaggccaggagttcaagaacagactgggcaatatcataagaccctatctttacaaaacaacttttaaaaactagccagkcatggcggtacaagtccatagtcctagacactcaggaggctgaggcaggaggatcacttgagctcaggaggtcaaggctacagtgagctatgattgcaccactgcactccagcctaggcaacagagtgaaacactgcctcaaaaaaaaaaaaaaaaaagggccgggcgcggtggctcacgcctgtaatcccagcactttgggaggcctaggtgggcggatcatgaggtcaggagatcaagaccatcctggctaacacggtgaaaccctgtctctactaaaaaatacaaaaaattagcctggcggggtggcgggcgcctgtactcccagctacccgggaggctgaggcaggagaatggcgggaacccgggaggcggagcttgcagtgagccaagatcatgccactgcattccagcctgggcaacagagccagactccgtctcaaaaaaaaaaaaaaaaaagctacctagcacaaaaacctacaatagtgataatgcaacaaaccatagagttatgaattgaaaatacattaggtgccaaagaaacgtaagtcaggcattagtctttctaatatatttggaattggataagttttaacaaaactctgtgtattatattgatataatatttaaataactagaattttttttttaatttttgagacagtatctcactttgttgcctaagctggattgcagtggcacaatcatggctcattgaagcctcgacctcccaggctcaatcaatcttctcaccttggtgtcttgagtagctgggactataggtgcatgccaccatgcccggctaatttttttttttttttttttttggtgggggagacagggttttgccatgttgcccaggctggtcttgaactcctgggctcaggcaatcctcccacctcagcctcccaaagtcctgggattacagttgtgaggcactgcgcctggcctagaaaaacatttttaaaagagcaaaatcgtagatataggaaagtgctaccaggagcgaagtgtgtctcctttaccaaataaactaaacgtgtttctagaaggcaaacaagaggagagcctcagatggagacttttctagggatttgcacgtatcattttatattaccagattgtgggtcttaaaattaggaagaaatgaaattccttgatcagcctttgcccctttcttgctcactcactatccctgcaaatatccataaacatacactgcaaaattttacaacaatcaaaaggatggggtatcactgttgcctattggataatcagggacatccaggggttcattttgtgatagttcagttttgttcttaggaaaagattgagtttccttagaaagacatatgaactcatttaagacatgtaaaagtggccgggcgcagtggctaacgcctgtaatcccagcattttgggatgccgaggcgggtggatcatgaggtcaggagatcgagaccatcctggccaacatggtgaaactccgtctctaytgaaaatacaaaaattagccaggtgtggtggtgtgcacctgtagtcccagctgcttgagaggctgaggcaggggaatcacttgaacctgggaggcggatgttgcagtgagcggagatcactcctctgcactccagcctgtcaagagagcaagatcccatctcaaaaaaaaaaaaaaaagatgtaaaagtggccgagcatggtggcttatgcctgtaatcccaacactttgggaggccgaggcgggtgaatcacttgagatcaggagtttgagaccagcctggccaacatagagtaatcccatctctactaaaaaaaaatacaaaatttagccatgcattgtggcgtgcgtctgtagtcccagctcctcgggaggctgaagcaggagaatcacttgaacccgggaggtggaggttacagtgagtcgagatagtgccactgcactccagcctagaagatagcgagactccgtctcaaaaaacaaaccaacaaaaattatatacaaaagtataattgaaaacaaattctattgaactgggcactctatagggtctggactcagaaatagtgaggacatgggttcttatctcttggggagacagaaatctataattagtkaatgaaaggtgtaaaagacagcctttaaaggctaagagagcatgaggacaaagcagataacctaggaaggcttcacaggagaggtgacagcacacctgaaggatgataggagttggccaggtaaagaaagggagrgtggaaactccaagcagaagggttgcaygtgtcaagtcagggaaacaggaccatacacatatctgagaaaagagcgaaaggtatgtggggagagaataggaagaggcagaagataaagggcccaactgtcaaaatcccctcaaggaatttgaatttcattctttaggaaatgaggagatattgaagatctttaagccagtgaatgaagtattgagttgctttcttcaaaatacaactcagaaggcatttcgaagagtgaattaggaagggtctggattagaggcagaaaatccagtgattattgaggaaggcctgtcaagaccaagtcatccatgggatgaggagattgaattcatggaattgctgactatttaaacatagttatgaggggaagaatgagggcttacaaattggatattgccagtttctttctttttgaagattagaattcaaagttagggggttacattccaagagagaattgggttaaacataaggaagttgttagcaagtaactgactgcaagacagagatggtggccatctgctggtgagtattctcattaaagtacatccccagcagcttccctggtccccaggaggttgtcctcagctagtcacagtagaggtcaccacacccactgctgcaagaatgaatgaatgagttggccaagaaggtggagctcctatttgctgacaaaaaaatgggacagacaggccgggcgcggtggytcacgcctgtaatcccagcactttgggaggccgaggaggtgggaggatcacaaggtcaggagatcgagaccatcctggctaacaaggtgaaaccccgtctctactaaaaatacaatacaaaaaaatcagccgggcgtggtggcgggcgcctgtagtcccagctactcgggaggctgaggcaggagaatggcgtgaacccgggaggcggagcttgcagtgagccgagatcccgccactgcactccagcctgggtgaaagagcgagactccctctcaaaaaaaaaaaaaaaatgggacagacaaccagactcttgactagtttgtatatgaaactttctgtggtcagtaagagagaacatctggacatttcatgtatcttctattgtagtgatttctatgtttattatacacacttccctgcttcattccaaaccctgctctaacaggagccagggaaaatgtctcttttctaatgttattcaacacgcctcatgtatgtcagataataaagttagaaaatttactctgcttaaaaaaattggatgtcattgagttgaaatatcaagtaggaaatttaatgtttggtaaagattagaattactttgttcaccttcgaataaattcatctgtacaaataaatgacagggagagtccttcagtcattcagagaccaaatcgttatgtaagaacatggtatctttccaattacctcatctcatgtggttgactataacagcataatttgaattaataatccatgaaccagtttgtattaaaatcacaaagtgtgtcttaaaaggacataaattaagtgaattcatatagaaatgaaggcaatattctcaatataatttacatctatctggattttattattataatgtcagggcattacacataaataagaaattgaaaacttgaagaagagaatcaaaagcaagatgatcaaccagtgatgagtcaagccaggatggaaagtccaaaaatgtctcttaacctttaggtaaacaaagaaggaaagggagatcaaagttttcagctacagaaaaggatctcacttgaatagcaataaatacaaagtcacttttttctttggagtagattataaataaaacattatgtattataaaaaagattcaccttttaattaatttgatttttttctttaatatatgcaaaaaaagtatacaaatttatagtggggggggatgttcaaagataacttattttaaagaaaaaagtctctataatactcatccagccgcattgtccaaatttcttgtgtattcttgtgtataatactcatccagccacattgtccaaaattcttgtgtattcagatattttctatacacatacacaaatggaatcataacatacataatatatatacacaaccaaaattattctaatatgctgggcaaattgctctttttacttgacattgtatctttagcatctatctatattggtaaatataaagttaccttctttttaatgtcttcataaaattctgttttcatgcatggccgtagttatttaactattcctttacttatggaaattcaagtagtattcagtatttttagagcttacgttcttacactgactccatgaatggactttagagggtctcttaaaccatttgaaattataataaaagtgtatacatgtgtgcatatgtgaattacctctggagaaaagtatctatagcttttagcacattatctaaggaatcacaaaatataaaggaacttcattacagaatttgtagaattgcaatttcagtgaaattttagaaaacaggactgaatacagttacagaatagtgtttctaaacttttaaaaaatccaagctaagtttttatatactgtacatacatatacataatcatccctggcagaaatccccaccttccactcttaattctgataaattcccctgagggaagcatgcaaagcactccccctccctatctattcagcttgatcttcagtttaggcttttttttttttttttttgagatgaagtctagctctgtcaccaggctggagtgcagtggcatgatctcagctcactgcaacctctgctttctgggttcaagcgattctcctgcctcagcctccagagtagctgggactacaggagcccgccaccatgcccagctgatttttttcttttgtatttttagtagagagggggtttcaccatgttggccaggatggtctcaatgtcttgaccgaatgatttgctcgccttggcctcccagagtgctgggattacaggcatgagccaccgtgcccagcccaatttaggctttgatggtacctagagtaggtagaagcagactttaaagcccaaaacttgcccaaggcgtagcctaataggaaaattctatcccataaacctggcaccccaaaaagattataccctaaaggtaaagatgagcaagtagtcattgccatatgatccactccccatctcaactcaaaacacaaaaacaaacacttgtcttggtactaaaattgggggttatccattcatgagaagttgtaaccatgagctctcattcaaacctcagcccaaatttacatcacctgaacggtccaaaaaacttcaagccatgaatgatatatttcaaatgataatcctctacagaaaaaaaaagactttttctaggccacatataaccttccaaaataagctcccaaggaaagtaatcttctcactgtcaaaaataaccaagcatacaaggaaacaaggcatcataaatgagagaaacaacccmccmaggattaagacgttggattataagaattaggatgggcatgatggctcacacctgtaatcgtagcactttgggaggccgaggcaggcagatcacctgaggtcaggagttcaagaccagcctggccaacatggtgaaaccccgtctctgcgaaaaatacacaaaattagctgggcctggtggcgtgagtctgtaatcccagctacttcggaggttgaggcaggagaatcgcttgaacctgggaggcggaggttgcagtgagcagagatcggtccactgcactccagcctgggcaacaaagagcaaaattccatctcaaaaaaaaaaaaagaaaagaaaaawtatttttccagaatgaagacaaawtaaagacaccctcaaatgaagactgcagaccaccgctaaaggaaattacaaatgatttattttatgtagaagaaaaatgatccctgatggaagatatgagatgcaggaagaatgaacagcaatacagtggttaataattaagtaaggacgcatgggcattgatagtgtaaaacaaagataacaacatcttgtgaggccaggcacagtggctcatgcctgtaaccccatctcttggggaagccgaggtgggaggatcacttgagccaggagttggaggccagcttgggcaacggagaacttgcctctacaaaaaataagaaaattcggtgtggtggcacacacctgtggtctcagctactcagaaggctgagataagatgatcgcttgagcctgggaggtcgaggttgcaatgaactatgatctcgccatttgcactccacagagcgagacctcgtcttgaaaaaataaaataaaaataacaaattacatcttgtgaattttatttaatttatttacttatttgagacaggatcttgctttgttgcccaggctggagtacagtggtgcaatcacggcttactgcagtttctacctctcaggctcaagcaattctcctgcctcagcctctcgagtagctgggactataggcacacgccaccatgcctagctaatatttttactatttgtagagtcaaggtctcactatgttgcccaggctggtcttgaactcggagctcaagtgatcctcctgcctcagcttcccaaagtgcaaagattacagacatgagccaccacaactgtccagaatattttttaaaagacagaattaaaaatacatataacccagtagaagtcaggagttaaagtgttttaagtaccytgtattttctaagaaaaggttaagggtattaagtctagatattagtaagttaaatatgtggattagaatttctagactaactcctaaagtcatataaaaagagtcagccaggcacggtggctcacacctgtaatgccagcactttggaaggccaaggtgggcagatcacctgaggtcaggagttcaaggctagcctgaccaacatggtgaaaccccatctctacttaaaaaaaaaaaaaaattaactgggcgtgctggcacatgcctgtagtcccagctacttgggaggctgagacaggagaattgcttgaacccagcaggcagaggatgcaatgagccgaaattgcaccactgcaccccagcctgggcgacagaaggagactcagtctcataaaaaaaataaaaataaaaaataaataaaaagattcaaaactgcaaattagaaaggtgtcaattcacttaaaactgatctataaatttaatgcaatatcaaccaaaaacctgaattttgttgttgttgttgtgttttagtttttgsaaagtgccacatacagccaagatactcttgaaaagcagcaaaattagaggatttgccctattgagcatcaagattcataattagcctatagtaataagacatggtgttagcacaaggacagggcagtagcccaacagaacagactacarattacagaaatagtcccgtgctcatatggaagcttgagaggcatctttgcaattcagtggggaagggacaatattcagtagatggtgctgtcactgaggagtatttatttggaaaaaaaataaaataaaattggactatacctttgtattagccagggttcttcagagacacagagacaacaggagagagagaaagacaaagatttattatagggaattggggcacacagttatagaggccgagaattcccaagatctcgagtcatcaagctgaggacccaggagacctgatgtgtacttccagcttgaatccaggagcctgagaaccaggagagctgatggatagtttcagtctgaggacctgcaggctcacaacccaaggaggaccaatgtttcagkccaagtctgaaggctggaaaaaaccgatgccccacttaaccgtcggacaggagaaattctctcatattcagtctttttattctattccggtcttcaattgattgaatgagcccaaccacactggggagacatctgctgtactccagtcttctgattcctaatttatacttctcacttggtagccaccttcacagacacaacacaggtataatattggccaaaagttctgggtaccacatggcccagtcaagttgacacataaaattaaccattacaactttatactccagccctcctaagcaattctagttgaatttaagacctaaatgtgaaaggccaaacaataaagcttcccaaaatgatatgggggtaggggaagtttctgaaataaaatatgaagagcatgaaaatttttaaaaagattgctacatttgcctattgtgttcaaactttgcccttcacaagaaagggacatcgaaatatcaaaacctgcaaaaagtgctcatctcattaggaatccaaaataagtaaattaaatccacagtgagataccaatacacacctaccaggttagcaaaaaattatttcattattttttatttatttttatttatttatttatttattttttgagacagagtctcactctgttgcccaggctggagtgcggtggcgcgatctcggctcactgcaagctccgcctcccgggttcacgccattctcctgcctcagcctcccgagtagctgggactacaggcgcccaccaacacgcccggctaatttttttgtatttttagtagagacagggtttcagcgtgttagccaggatggtctcgatctcctgacctcgtgatccgcccgcctcagcctcccaaagtgctgggattacagggttgagccaccgcgcccagcctattttttatttttatttatttgtttgtagacagagcctcactttgtcactcaagctggagtgcagtgccacaatcatggctcattgcagcctcaacctcccaggttcaagtgatcctcccacctcagctatttatttttttagagatggcgtcttgctgtgttacccaggctagtctcaaactcctgtcttggcctcccaaagtgctgggattgtaggtgtgagccactgtgcctggccacaaaaaattataaagtgtaacaatatcaaatgttggcaaagatatgcagcagcaataggaattctcatgcactgttatgggagtgtatgttgggacaatatccacatttttaaaaatattatttgacattatgaagaaactcatagcaaacaacccgaacattttctagaaaagtcttttacttgtgtgccaaatacaggacaggaatattcatggtggcattgttcaaataccaaaaaaaccctaaatatccatctatagtaaaatgtatttttattgtttatttccatgcaatgaaatggtattttcatatagcaatggaaattgacaagttgtatgtaattacaatataggtgaatcaacccacaacattaagtaaaagaagcaaaatacaaaagaatacatatatgtagtaagcttcttttaatttaaagttcaaaaccaggcataatcaagctatattgtttaggaatgcatgcagaaatactaaaggcaagaaaataatgacaaatatcagcagactagttacttctgggataggaggggtttgtaacagggaaaagatgcacggggaatgtgaactgcaggctcggaggcattctatagcttggcctacgtggtggtttcggaatcttcattttgtaattattctttaagaataggctgggcacastggctcatgcctgtaatcccagcactctgggaggctgaggtgggtggatcacttgaggtcaggagtacaagacccctggcggacatggtcaaacctcgtctctactgaaaatacaaaaatcgtctgagtgtgatggcacatggctataatcccacctacttgggaggctgaaataggagaatcgctcgaacccgggaggcagaggttacagcgagccaagatcacaccactgcactccagcctaggtgacagagcgagactccgtctcaaaaaaaaaaaaaaaaaaagaatatagcacaaggccaggcgcagtggctcacgcctgtaatcccaccactttgggaggccaaggcgggtggaccacttgaggtcaggagatcgagaccagcctggccaacatagtgaaagcccatctctactaaaaatacaaaaattagccaggtgtggtgcgcgcctgtaatcccagctactcgggaggctgtggcaggagaatcactggaaccrgggaggtgggaggttgcagtgagccgagatcgccccattgcactcyggcctggacaacagagcgagactccatctcaaaaaaaaaaaaaaaaaaaaggaaggaaggagggaggaagggagggaaggaaggaagaaagaaagaaaaaatagcggagggattaattagatgggcagtcccagctacttgggaggttaaggcaggaggatcacttgagcttaggaatttgaagttgcagtgagatgtgattacatcactgcactscagcctgggcaacagaggaagaccccatctctaaaaatatatatagcagagaaagaaggaatgccccacaactaaatattatattacaagacaaactactgtatgttttttcaaattacaaaaactacctgctcttcactgtcttcctcctcaaaattctgatacgcccacccattagagaagcatccggatagcgtgtaggactgtagcgtgtgggagaaggacaggaaagatgggggataagaaagcaaacatatatgcctaacattcctctatctcatggaactgtacgaaggaaactgacaacacattggactgaacaaattcactcactgcatttgcctgcctgggactcggtcagtgccttccctgagctcagaagcctataaacttctgcaatctgttcttctcaagagcattgtattagtaatcacacaccagaaacaactgacaaaaaattactagcactaggccaggtgtggtggctcactcctgtaatcttagcactttgggaggccaaggcgggaagatcacttaagctcaggagttcaagaccagcctgggcaacatagtgagccctcatctctattaaaaaaaaattactagcactaataaaatgttagcagtactttcatgagaccatgtaattctttcaggtacattgttaatgaccttattgaaatatgactcatatgtcataaaatccactcgtttaaagtgcacaattcagcgttttttgtgtgtgtgctcacagagttgtacaaccatcaccacagtcttagcttcaaatattttcttttcttttttttgtgagacagagtctcactctgttgcccaggctggagtgcagtggcgtgatctcagctcactgcagcctccgccctcccgggttcaaayrattctcctgcctcagcctcccgagtagctgggattacaggtgcacgccaccacaatttttatatttttagtagagacaaaatttttccatgttgggcaggctggtcttgaactcctgacctcaagtgatccgcccacctccacctcccaaagtagtgggatkataggcatgagctaccacatccagctttcttttctttgcttttttttttttttttaacaggktcttgctctgtcacccagcagggtggagtgcagtggtgtgatctcggctcactgaagccttgaccccccacattcaagtgatcctcccacctcagcctcctgagtagctgggactacagacgcccaccaccatgcccagctaatttttgtattttttgtagagactgagttttgccatgttgcccaggcttgtcttaaattcctgggcttamgcaatcctcccacctcrgcctcccaaaatgctaagattacagatgtgagccgccattcctgatcttttttttttttttcttttttgagactgggtctcactctgtagcccaggctggagtgcactggcgcgatcactactcattgtagcctcaacctcgggctaaagtgatcctcccacctcagccccccaagtagctggcactacagggatgtgccaccacgctgggctaatttttttattttgtagagatgggtctccctatgttgtccaggctggtcttgaattcctgggctgaaatgatcctcctgcctcagcctcctaaaatgctgggattacaggtgtgagccatggctcccagccacattttcatctcccacaaacctaggcaagcacaagtctactttctgtccctcagaattaatttatgcttttggaaaatgaataaatgtaggcatgcatgaacagagatttgatcatatcctttgaaaaaactattcaactccctgggtcaggggaggttagttcaacattggtagttcaaggaatttgtgacatgccagaaattaagaactcaggttgagaacagtgatagttgcattgtgttaagatgaaattgatatttatgatttcctttttttttctgttttacaaatgctttctgaactaacatgatgtactaatctctaagaaaaataagcctaattgcctctcacttagattgcaatcatgaaggtctaatttttctgtaagaacattactcttcttagattacaacatattcataaacaaaaccccaaaaaaggcatgctttgggtttaactgccttaaaacaagccattttctattgtgaaagcttgaagttgtccaacatctaatctcctagaaaataatttgctaatttgcttcgatttttctgtttggggcattgcgtgaagtggtgcctccttgaagaacttcacacacacaggaagcagttccactgcaaggtgactcacctgaggaggtctctccttccctccattagcttcccagcccccgcaaacacacacacaacctctcacggggtgggaggacagaaactgtctgtgcaactgcacagagatcttggccacctaagcaaataggtggagtgtatccatacctgataaaactttccaaatagtcatagaatttggcagtcgtaacatcactgggcatttaatgactagggcttcatctctatgaagggggctgtgaagcctgctcgggagagaggaatgagggaccatctccttagagaagtgggtgggtagaaatcatttcttatacttggcaggggtggaggacagcctccatgagtcacgactcaggcgtttagggacttgtggcttgggtttttcccttctgcatattgtgtgtgtggtaggtagactttgcttctgggagcatctgcgggaaaccgctatttttggttcttatgagaggcaggaagagcgttcagtgagtactacctgggtgggtcttagtggtctatttcttggagtttagattagtttgctcttgagattccccctgggtgcatatggcctaactcagatgtgatatgatcaaaccttccctgtagctaagcagaaaaaaacaaaataaatttgaatttaaaaggggatgggtatgctcagtctgttttccctcttctttatcatgacttttggggatttcttgaatcttaaaaaattgaagtcttccaatggggaaaagtaagtaggcttttcctttctaagaagggtaatgcttaacatttgtgggattttggtgataagtttgctacaaaactactcctacagttcagagaaaatgacgcrgcagaaatgagctgccagcagggccaggctgtcggctttgaaattccagaggcctgcccagcccttttggtttcctggaatgctttcattcagtcgtcatgcggtaggtgaggaaaaaccctgcaacatcagtgttgagctggaagaatatctcatctgccgtcaggggacagcggcccagggcgacaggcacacatccctgcctgtgctcagcggcacagtcaatggaccgcggggcaggggcacgcaggctcgcccagcagcagtgtcagacctatgcgcacaaacagacggttcacgcccaggtcacaggcgcccgttgtctcctggccagaggttgacgcacaggccaaccgttggacrggctcatgctctgtgtcatgagaaaggtggagcagaggtgactcagggaaaggctgctttcccctaacactggcatttgattaatctcatctcaaatgctgtcactcacccagaaagggcctmaatgtgccttacttccgctgctggagcggtggaatgtggcagcagctgtctggatgatgtggaagcccagcacgaggaggagggaggaaaagtaccagatcccactgaaccggtcagatgaatgcaggcaggaggggaaacgggcatccgcacggggaccggccacatcctaaggctggaggctgccctgatgaaaaaggcccattagcagggaagcaamgggraaagcattttctaggggggktttccttttttttttttttttttgagacggagtcttgctctgtctctcaggctggggtgcagtagtgtgacctcggctcactgcaagctccgcctcccaggttcaagcgattctcctgcctcaggctcctgagtagctgggattacaggcatgcgccaccacgcccggctgatttttgtatttttagtagagacacattggccaggctggtctcgcactcctgacctcaggtgatccgcccgcctcagcctcccaaagtgctgggattacaggcgtgagccactgtgcccggctggcttttccttttcacacggccttgaagaacttcaagaagagttgtcattagcagaacctaagacggactgaatcccttgtgtaggtgaatttgtgtctaggacctcttatacatgcgaagcctggaaatggaagataatgtcagggctcgtgaaaataatcatagctattaattatgacatgtcattaaccacaattaattgcattaataggattaaacatttactttgttccaggccctgatctaagactttttccttgattatctcatgtgatcctctcaacaactctcttaaatcaatgcttttagcatgcctgtttcaccagtgaggacatggggacacagagaggcagcacacaagatcacccagctgacatgaggccattccagtactgaaatcaggccaggctggtggctcacgcgtgtaatcccagcactttgggaggcagaggcaggcggatcatttgaggtcaggagttcaagaccagcctggccaacatggtgaaaccccttctctactaaaaatacaaaaattaacagggcatggtggcacatgcctgtagtcccatctactggggaggctgaggcacaagaatcacttgaacctgggaggcggaggttgcaatgagccaagattgtgccwctgcactccagcctgggcgacagagagagactctatctcaaaaaaaaagaaaaagaaaaaaaaagaaatcaatgaatgtgtaatttcaaactccaggctgtggctggaagggctgacctcactcatgttttcaaaagtgattatctttccgctagccaagttaggattgcctctggcaagcaagaaattggggaaagatgagaggaaacagcccccttctgcttgccccagtctgggacagtggtgtggcagtgcatggctgtcagcctggatcttgtcctgtggacacaggcacaggctgggtgaaggaggccagacttgtggccacttggaagccgaattctggactctccctcctcccacattccccaggggacagagccaatctttgagagagtaactttccccatcattcccagatcccaagccaagcatgaatcatgaaataatcagcttaggacgagtgcagtggctcatgcctgtaatcccagcactttgggagaatgaagcaggcagatcacgaggtcaggagatcgagaccatcctggctaacacagtgaaaccccgtctctactaaaaaatacaaaaaattagccgggcgtgttggtgggcgcctgtagtcccagctacttgggaggctgaggcaggagaatggcatgaacctgggaggcggagctggcagtgagccaagatcacgtcactgcactctagcctgggcgacagagcgagactccatatcaaaaaaaaaaaagaatcagcttaattgtagagtcagtgggtacacacacagccaacatacacatacactacccatacgcacatcagaggctccacaggtaccctctgttggcaaagcagcagcccaggtcacttttaacttatgtatttattttgtagagatagggtctcactctgtcacccagactggagtgcagtggtgtaatcacggctcactgcagcctcaacctcctgagctcaagcaatccttacacctcagcctccctactagctgggattacaggcatgccaccatgcccagctaatttcttttattttaagtttttgcagggacgtgttgaaagaaaaaccttagccaaattaagcttaacaaagtttagttaagcaaagaatgctttgcgaatcaggcagcctcccaagccagggtagctcagagagactccagtgcagccacgcagtggaagatttatagacagaaaaaggaaagtaacatatagaaaacagaagtgaggtacagaaacagttggattggctacagcttggcgtttgccttatttgaacacggtttgaacagttggccccctttggccaaaactctctgattggcacaagagtaggttacagtgggtttatacctccatttaggttgtatatagttcactatgtacagagaaacctttaggctgaacttaaaatatgtaaggaggccactttaggctaaacttgatttaacagacaaggtctcactatgttgcccaggctggtctcaaactcctatcctcaagccttcttcccgcttcagctttgatgaaccttaggaggggargtcattagcagaacctaagatggattgaatctcttgtgtaggtgaaatcttgtataggatccttatatgtcaagcctggaaacagaagataatgtcagggcaggtataataatcatagctattattagcagcctcccaaagtgctgggactacaggtrtgagccactgaactcagccccaggtcacttatctttaaggtgaaccttagcatgcctcagaattaccagaaggacctgttcaaacacagggtgctggccccacctccagagtttctgacccagtagtcctgggtggagcctgaggatttgacccacgtgttcccaggtgctgacactactggtgggagaccaacctctgggaaccactgtttgaagrgtgaaagctctagaaatatgtataatttctggtcacacatcactgcctgtttaaatgtgataccaggccggacgtggtggctctggcctgtaatcccaacactttgggaggccgaggtgggcggatcacctgaggtcaggagtccaagaccagcctggccaacgtggtgaaaccccgtctgtactaaaaatacaaaaatcagccgggcgtggtagtgggcacctgtaatcccagctcctcgggaggctgaggcagaagaatcacttgaacccaggaggcagaggttgcagtgagttgagatcttgccattgcactccagcctgagcgacaagagtgaaactccatctcaaaaataataataataataataataaaatgtgatagcagttgttctcgaggattttcatccttgcagcctgtatgctttcctattgctgctgtcaccagttacacccacaagcggagtggctttacacaacacagatcatctcactgttctggaggtcagaagtcagaaatgggtcggcagggctgcttttccttgtggagggcataggggagaatctgtgtccttttcgggcttctagaggctgcctgtgttccttggcttaaagccccttcctccatctgcaaagccagcagcagaggtgcatcttcaacccctctgctcctctctcgcacacacacacttctgcccccatcatcacatcatcgtctttgtctctgaccctcctgcctccctcttataaggacctcacgatgactttgggcccattcaggtagtctaggacaacttttccattttaagatgcttactaacatctgccaagtcctttttttccctagaaggtagcatatccacagatttcaaagattaaaagatgggtgtctttagggaccatccacccatcctaccacctgcttaaactccagcaggtggccaggcatggtggcatgcacctatagttccggctacttaggaggctgaggtgggaggatcccttgagcctaggaggtcaaggctgtagtgcgcaatgatggggtctatgagtagccactgcacttaagcctcggcagcatagcaagacctcatctcaaaaaacraaaaacaaaaaaaaaccaactccggcaaatatccttccatcccatatctcccaccaaaaaaaaaaaaaaaaaaggaaaaaactaaaagagcatcaggatttgcatgacgctaagtcagaaggtaaagccaaattttccccttcttctgacttacctgataataaagcagtgtcgcaggacggggtggtgggaaaagtcaaagagactggaagaagaggagagaaggaaggactagggcggctagaagagggaaggggttagtgacttgcatcaatatgggcctcttgaccatgcaccaaacacctactcagtctccctgctactttctggactttctaggactggaaccctggtcccttcccttttgagtcaagagaccttagtgaccccactagacttgcaggtcagcagcgcccctgcccagcccccagcactgctttaccatcctgcctgcaggccacctgggaaagatgcagaaagagaaactgcgctaaaaggctagactcttgcatgttgaaatttctgcttattacctttggaatttttctgaagtcccagccttaaggctgtgaattctctgtttgtgggtatgttagtttgctagggctgccataactaagtaccatagatggggtgccttaaacaacagaagcttatttcctcacagttctggaagctgggagaccaagatcaaggtatcagcaaggtggtttcttctgaggcctctctctgtggcttgcgggtggctggcctctctctgtcctcacttggtctatgcacgtaggtcctgctgtctctcttcttagaaggacgccagtcatattggattatgaccctaatgacccaattaacttaatcatctctttttttttttttgagacggagtctcgctcagtcacccaggctggagtgcagtgacacgatctcggctcactgcaggctccgcttcccgggttcacaccattctcctgcctcagcatcccgagtagctgggactacaggcacccgccacttcacccggctaatttttttgtatttttagtagagacggggtttcaccgtgttagccaggatggtctcggtctcctgacctcgtgatccgctcgtctcggcctcccaaagtgctgggattacaggcgtgagccaccacccctggcctaatcatctctttaaagaccctatctctcaagacagttacattctgagagttaggacttcaacatatgcatttgttggggggtcgggggacacaagtggccatagcattgggctaagatcctgggaagttaagaaagatcactcagttcttccctggtgtaacaggtagactaggcccagtgaggatgaatgctgggagagggaggcccagctgttaactttaaaagtgtgctctgggggccgagcgcggtggctcatgcctgtaatcccagccctttgggaggccgaggtgagcagatcaggaggttaggagatcaagaccatcctggctaacacggtgaaaccctgtctgtactgaaaacagaaaaacaaaaaattagctgggcgtggtggcgggcgcctgtaatcccagctactcgggaggctgaggcaggagaatcgcttgaacccgggagacggagcttgcagtgagccgagatcgcgccactgcgctccagcctgggtgacggagtgagactcccatctcagaaaaaaaaaaaaaaaagtgtgccccacaacccaaaactgcctgttttgtttgtttgttttttgcttgtttgttttgttttttgagacagagtctcactccgtcgcctaggttggagtgcaatggtacaatatcggctcactgcaacctccacctcccaggttcaagcaattctcctgcctcagcctcctgagtagctgggattacaggcgcacaccaccaagcccggctaatttttgtatttttagtagagtcagggtttcaccatgttggtcaggctggtatcaaactcctgacctcgtgatctgcctgcctcggcctcccaaagtgctgggattacaggcgtgagccaccctgcccggcccagaactgccttgtcatagctatgttgggttagggttgggaaaaaggcagaaaaggtcaaagaagcctccaaaagcccaggcttaacctgtgtaagcaaatagcaacatttatggctagcagtcaccagtgccaactccctgcaggttayttatttgatgcacaattcacagctattcccctaaattccaccaagtccatacacaccctggacacagtggaaataaaggagcagccagtgagtgtttgtgtcggatgttctttgaaagggctgtttgacagaaatgatttcattctcaaggcatggctttgatacggaagtcaaacagcccgcaagttgaaacaaaccaaatagccttatcttattattgattcatgggtttctctctcttcaaagccccttaaaggccggactctgcgaattgtaacttgttagagtaattgctgttgcaaagtccttcctggaacaggttgtgtctttgacttacaggatctgaattctctgacatttttccttgataaacctttgttagactctggtcaaactcactagccaatataggtttaaatacaggcacacattgtttaattgtgcttttctttctttctttctttcttttgagatggagtttcacttttgtcacccaggctggagggcaatggcacgatcttggctcacagcaacctccgcctcccgggttcaaacaattctcctacctcaatctcctgagtagctgggattacaggcgcctgccaccacgcccagctaatttttttgtatttttagtagtgatggggtttcaccatgttgcccaggctggtctcgatctcctgagctcaggtgatccacccgccttggcctcccaaagtgctgggattacaggagtgagccaccatgcccggcaattacacttttctttatcaggccttgcagatgtgtttttcacaaatcaagggtttgtggcaaccatgcatggagcaagtctatcaacaccatttttccaacagcatgtgctcacttcatgtctctgtgtcagcagttttcarcaatttttttttttttttttkgagatggagtttcactcgtgttgcccaggctgaagtgcaatggtgggatctcagctcactgcaacctccacctcccggattcttctgcctcagcctcccaagtagctgggattacaggcgcccaccaccacgcccagctaattttttatatttttactagagatggggtttcaccatgttggtcaagctagtcttgaacttctgacctcaggtgatccgcctgccttggcctcccagagtgccgggattacaggtgtaagccactgcccccagccagcagtattttttgtttatttttaatagaaagatcaggtgattgggctcaggccagcctcagtttgaatcccatctctgccactcactagtttggggaaaatgttctgtttctttctatgcaacggatcacccccaaaacttaatgtcttaaagcaatcatctcatcacttctcagtctctgggggtcaggaatttggggagagctttggcggggtagttctggctcagcatctctcctgagcttgcagtctctccaggtgagggctggagcaagtggggctggctgagcatctcctacagtttcaaggcttttcaggtggtctttcacatggactcacttgggcttccttacagcatggcagcctcaggacagctgggctacttatgtgctgactggtaaaagttacatcacctgttctgatctagcctcagaggtcatgcagtgtcacttccttccaattgtcttaattataggcaaatcacaaacctctcggattcaaggaaaagggaattcgtccacctcttttttttttccwgtttgtttgtttcttttkgtttttttgagacagggtctccctctgccgcctagggtggtttaagtggcacaatcacggctcactgcagcctcgaccttctgggctcaagtgatcctccaacctcagcctctggagtagctgggactacaggtgcacgccaccacagcaggctaattttttttttttttgttttgtggagatggggtttcaccatgtttcccaggctggtctcaaactcctgggctcaagggatcctcccacctcagcctcccaaagtgctgggattataggtgtgagccactgcacctggcctagactctacctcttgaagggaagcagcaaagttctagagcacagattggcaaactatcgccctcagaccaccgaatgggctcacctctcaaacacaaacaaggctgtacatgtacacatcgcccagggctgtgccacagtgatagagtagtcaggtcagacagcgaatgatccacacatcctaaaatacgtgctggatggcttttaacagaaaaagtttgtgaacacctgttctagaaggacatgtcagatggaagatattgttgcagccacttttggaaaatgcagtctcccgagggctggttaccagcctgtcaactttagctgcacctctaaatctgtgaaatggaataataatcccacgtacaaattactcagcagaaytctatgcctgtgacaggcaaagtatacaatttcatttctccttcctgggcttcattatgatttgagagccacagaaaggtcttagctgcactatgggtctgttagcagtgccagaaattccccactttaaatatccctcagagttaaggccaactttatagaaacctcccttttaaaatacacatttcttacccttgagggaagaaatgtttgcaaaaattcctgctaaaatgccccctccccacctaaaatgcattctcttatcaaactagctaaatttttacctctcaaaggcaagtgtctcagggaatgagagagtgagttaatttgggctggagccagttgggggaaacaggctgtcagggtgtctccagttgcctacagagacagacttgagaaattttagctactgcacaagtgtgcccagggctcactgcttcagacaaagcaatgaaaaatgcagctttcttggcctcccccatctccatcggctccattttcctactggccagacttgcttcaatgccctctctgctgtcaacatctcccttgggtgttttctctcctcacctgggcgtgtccaaggccaatcctccagcaacccctgagattatcttcttgtgacccaattttcctccctgctggaaattcaaaaaaggtcgtcctgaagcctatttgttaacaggcatctgtgctctttctctttagaagtgagtttctagtcaagaaaatagaggctccccaatcagcaccaactatgtggtaacaatacaccttccagtcccagcttttctactcatttactcaaataccaccaaaattatcaactctatttatgcatctttttaaaaattcttttgtctgctgggcacagtggctcatgcctgtaatcctagcactttgagaggccgaggctggcggatcacatgaggtcaggagtttgagaccagcctgaccaaaatggtgaaaacccatctctactaaaaaatacaaaaattagccaggcatggtggcgggcgcctgtaatctcagtcactcgggaggctgaggcaggagaatcacttgaacctgggaggcggaggttgcggtgagccaagatcgtgccattgcactccaacctgggcaacagagtgagactccatctcaaaaataaataaataaataaaataaaaataaattattttgtctcctctccaagttatgtttgactccaataactttttttttttttttcttgagacagagtttcactcttgttgcccaggctggagtgcagtggcactatctcgacttacggcaacatctgcctcccgggatcaagcaattctcccgcctcaggctcccgaaactgggattacaggcctgcaccaccacgcctggctcttttttttttttttttttttgtatttttagtagaggcggggtttctccatgttggtcaggctggtctcaaactcctgacctcaggtgatccgcccacctcggcctcccaaagtgcgggagactccagtaattcttaaaatctacttagcttcaccctacgctataatgaaagaatagtttctttttgatacagctatttgccaccatggtattttcatatcaaatattatgagtgttttggggatggttgagaggggaagtgtgcaatttatgattagagatcatttcttttgacccatattaatttttacagcattttctccctttctactcagcctaaatgtacatttatgcaaattgtatataatactttgcggtatcccagaaccccagttcaatattggccaaggccaacacaacttatgctgttccaggaagaattgtggtttggaaatgttactcagctggagccagaaaaaagtgacaactggccaggcacggtggctcacgcctgtaatcctagcactttgggaggccgaggcgggcggattgcctgagctcaggagttcgagaccagtctggtcaatgtggtgaaactgtctctactaaaaatacaaamtttagccgggtgtggttgtgggcacctataatcccagctacctgggaggccgaggcaggggaatcgcttgaacctgggggcggagcttgcagtgagctgagatcgcgccacttcactccagccygggcaaaagagggaaactccatctcaaaaaaaaaaaagtaacaactgttactgggtagctgctgyggcttcttkgcctagcatctgcatagcactttgcaacttacaaagggcttttacatattttaagtctttaatrttcactgtaacagccatcctgtagttattgtcccattccacagatggtaataaaatgaagcataaaactgtattgcctttggacacagaccaaccaatttatacccaaggtctgttaactcatctgggcgttaattgttcataaattcatacttcctaagagtactgggcactggacactgtgggccaacattgcttcctagccaggctcatgcctgtaatcccaacacttagagaggaagtgggaggatggcttgagcccaggagttcgagaccagcctgggcaacacagggagacccccatctctgcaaaattcaaaattaaaaaattaaccaggaatggtagcatgcacccatggtcccagatactcaggaggctgaggcaaggaggatcacttgagcccaggaggttgaagctgccgtgagccatgattgtgccactgcactccagcctgggcaacagtgagtccctctgaaaaacaaacaaaacmaaacrgaagacaataaaccattgtttcctttactcctttctccagaatgctaactttttttttcctgagaagggttttatatctaatattacttatgaagtgaggtgctaccaacaattcatgtaacctgaaaatttgtcttcaaaaacctacttcctaatctaattcctcttacattagcaatagaaaatggactaaaaggccaggcgtggtggctcatgcctgtaatcccagcactttgggaagccgaggcaggtggaccacctgaagtcaggagttcaagactaaccaacatggtgaaaccccatctctactaaaaatacaaaaaaattagccgggcatggtggcgggcgcctgtaatcccagctactcaggacctgaggcaggagaatcgcttgaacgcaggaggcagaggttgcagtgagccaagattgcaccattgtactccagcctgggtgacaagagcaaaaactccgtctcaaaaaaaaaaggaaatggactaaaatattgtgatagacttgaagatatagctaacacaaaggttttggttgttttatttttacatcagcaaccatcatctgagaataactaaaaaatgtgtatgaaatgattggtcaatgtttcagaacttcttttatgaaactgtaattcaaaggtcctatgaagtcagaattttgagtgtgttacagggattccactaacgaatgaactgaacagcagagttgcagcctgtgattctgttgtttcattgtacaccacccgcctggcactaaactagatactggagacatctggttgccatggatacgggatggcatcatctgaccacgttggtgtagaagttagcttcagatgttctcagacctttcacaagggccacgggtcccctggttaaaatgaagggattccccttatggaactgttgatggctgttgttactgtatgccatttactgagttaatacactgagcatttcccatatattgcttcctttcagcctctctacaaccctataaggaagtttttcattcttatcctcattttagacaataaaaaccagatgtttatagagattcagcaaccttccctaggtaacacacttttaaatcaaggtcggcctcctgaacttacattatttttaatattttgagatcggatcttgctatgttgcccaggctggactcaaactcctgggctcaatcaatcatcccacctcagccttccaagcagctgggacgacagaactgtgccatattcttaaacatcatacaatattgcctttcaggcatgaaaagcaaagggaattatttgttcatttgatagcgctttagtaatgtaagtggatacacttagggctagccctctggcttgttaccatggtaagctaggggaatatagttgaggggtctgcagcagagcttggagaggatctgggatgttaaattctcaagtacttgaacttagcaacaggacttggtcccatccacaccctgctctcyaccccagctggaaataattagtgctgactatggaggcaaagagaaacatacttgtaagcttttttgtttggattttctttggggtttcctttttgtcttttctgaactggagggtgatagagaaggtgcggaaaaggtttgaaaccacyggcaggggtccaccatacaagccctgagaaacgcgtggtaagttctgccatgttccaaggtgcaaggaagcaggggctgcagcgggtcctgctatgtaatttcgaggtgggaggcggggacgcgttaacagaaatgacaagcaggggctttggaaagacttcgtggggccttggtcatggggagggtgaaggctgctaactagaacgtagggaatctggagacagctgccgttggaaggctgtggagggctggggcgagtgcagtggtagagccggtcaggactgggttgaatgagcaagctgcaactttgcactgccccgaccccaaaacttgtagtttataaaagatggagcagcaatcttattttctccaggcatctcaaatcagttagggggatgcgggcctgggatgggagggtgtgaggctgctgtaagctgggtgatcargggagctgtagggaagttyacattttccccctgaagccttgataatttgagtctataaaacaaacatatagtaaattaacaggaaaaaaaagtatacactttttttttttaaagacagggtcttgctctatcgcccagggtagagtgcagtggtgcgatcatagctcacagcagcctcgacctcctgggctcaagcaatcctcccgcctcagcctctgagtaactgagactacaggcttatgccacacatggctggcatacaaatttcgctaacgtgcacacatgtgcatgagtcatacaawttatgaaaactcttctgccataggaaaaaaatacatatgaaaactcaaaaaaaaaaaagaccatacagttaatacttttataccatctttttttatttttttgagggacagagtctcactgtcacccaggctggagtgcagtggcgtgatctcagctcactgcagcctccatctcctgggttcaagtgattctcctgcctcagcctcccaagtagctgggattacaggcatgtgccacaacatctggctattttttttttttgtatttttagtagacagcatttkgccatgcttgccaggctggtctttaacttctgggctcaagggatctgcccaccttgtcctcccaaagtgctaggattacaggtgtgagctactgcccctggctgagttgatgcttttataccatcttgatgttactgaggagtagggactcagagcatggcaaaataggttatggcagggaggggagagggaaggtgagggcacaggtgggttaaatctcacaggtagcagtcctcagagagaacagaaggtagtctgtggttaagtgtttctctgtcacattttcaaaggtgtcagactcagttaatctctcctaggtctggataggcggagggcctcagaaaaagcctagctgtttatttcattgctgcagattttctctgcagatgtacgtctcctycacaaatggcaacttggcagggctattcctgcctgtgggccctctgaacagccatctcaaaaatatgccaaagaagtatattttgaggtaaaatagttttagtttttttaaagccctctcgaaggagaggacatatgaattgagaacagcgatgagatgaatttttattttttaaagcaattttttattttatttttgagacagagttttgctcttgttgcccaggctggagaacaatggcgtgatctcggctcactgcaacctccgcctcccaggttcaagcaattctcctgcctcagcctcccgagtagctgggattacaggcatgtgccaccacgcccagttaatttttgtatttttagtagagacagggtttcaccgtgttggccaggctggtcttgaacttctgacctcaaatgatccacccacctcggcctcccaaagtgctgggattaaaggcgtgagccaccgcgcccggcctccgagatggttttcatatttgaattttgttrcatcacataatctaggaaggaaagaaaaaagaagagcacctaattcctatatgtcacagggtaagtggaacactctatcccctttccctacattcacctcttcrctcaccgcatcacactatgagataggtgctgttatcctaactcaacagatgaggaaactcaggaaaagatgatttaatagtgtaaagttaagtagcttgtaactggcaggtcaggatttgcaccaggcagacacagccttttctagcgtgtggaagaaatatctattccacacccatcgctaggttcatggctaagactcctatcacagaagacagattagtaacagaaaaataagcaaatttatttaacataagtttcacatgatacagcagccttccaaaggaagactcaggcccgggtgaggtggatcacacctcaaatcccagtactttgggaggccaaggtgggaggatcacttgagcccaggaatttgagactagcctgggcaacatagtgagaccatatctctacaaaaaaatgtttaaaaattggctggttgtggtggtgcacacctgcagtcccagctacttgggaggctgaggacactgcaagggagagtattacagatcaggctgggtgcagcagctcacgcctgtaatcccagcactttgggaggccgaggctcacttgagttcaggagtttgagaccaacatggccaacatggtgaaaccctgtctctactaaaagtataaaaattagccaggcgtggtggcacatgcctgtaatcccagctacttgggaggctgaggcaggaggatcattgaacctgggaggtggaggttgcagtgagctgagatcgtgcactacactccagcctgggtgacagagcaagactctgtctcaaaaaaatgaaaagtttcagactttggagtatttcagatttcaactagaataaatttattatctaacggtaacaaacaactgggggmcagtagggcaagagctgtctgttccttcttcgcctctgggtatagagcgagacctctctggaatgagcatcttatgacctrctttcagacaaagataggtcagagcattccctcgtggccagctctcacagtgagtgaccttcttgctccttcagttttctcaattgccaagtcaccatattttagggcattatgttctgagccccaacacatagacagcatctacaaagtcactgcataagtgccaagccaatcaaatcaataagcaaacaaatacaacttaaaaaataaaatcaaagtgactaagatggcaaaataatttattttctcaaacaataccaggtccaagggtaaggcaatgaatttaccaaaaccagcaagttcattacagctggcctttcttccacccgtcatccccagtgtgagctcatctttttttttttttgagatggagtttcactctcattgcccagactggagtgcagtggcgccctctccgctcactgtaacctccacctctcsgattcaggcaattctcctgcctcagcctccccagtagctagaattacaggcatgcgccaccacacccggctaattttgtatttttagtagagacagggcttctccatgttggtcaggctggtcttgaactcccgacttcacatgatctgcccgcatcctcccaaaatgctgggattacaggccaccacgcccagctgagctggtcttcttaggccagtactttctgtggtcccccgatggcagccacagttccagcatcccttgcagatgacaaagtccagaggaagaaaaaggatgtccctgacttgggtggctttaaatagtgaggtaaactttcccagaacattcccatccaacctcccttctcatctctttgtctggtagtctggtgaagattcagcctccacgtgtagggaggggcttagccacccctaaaactcacagctgtgtggaaaagatcaacagtactggggtctcattagcaagcaggatagagaraatggttatgaggaggcaaacaaccatgtttgccactggcgtaaaggcatgcaaaaggatggtatgttctggaaatgataagcagccagataagaaattgtcaggagaaggtaataaaatatgctgcagcccagttgtaaaggagttaccggccaatatttggctgccttgtatgggtccatgttccttaagttttcaaagacagtgagatatcaaataatgttagatttttagtattccttttttatgtggtaatcatataaaatttccttcaaaaaacaaatgctcaaggccgggtgcagtggcttatgcctgtaatcccagtattttgggaggctgaggagggtggatcgcttgagcccaggagctcaagaccagcctgggcaacaaaacaaaaccccatttctacaaaaaatataaaatattatctgggtgtggtggcaccggcctgtagtccagctactctggaggctgaggcgggaaaatcaccttgttgcagtgagcctgggtaacagaacaagatcctgtctcaaaggaattaaaagaaaaataaaaaaggttcaaaacaaaaattacacggcaacatacatggtaatacaaaaattccataatctaggccaggcgcgatggctcatgcctctaatcccagcactctgggaggccgaggcaggtggatcaatcacctgaagtcaggagttcgagaccagcctggccagcttggcgaaaccccttctctactaaaattagccaggtgtggtggcaggtgcctgtaatcccagctactggggaggctgaggcaggagaattgcttgaacccgggaggtggaggttgcaatgagccraggtcgtgccactgcactccagcctgggaaacaagaccgaaagtcatctcaaaaagaaaaaaattgtaatctagtcatgtcatagcagtgaagaaataatagtgtgtataattcttatttatacttttttataattacaaaataatgcaggtgctttttcaaaatataggaaaattcagagaagcccaaagaataaagtaaaaatcacccgtaatcccattacgtggctgtaacgacttgatgtcaaagctgggagctcacatacatagtaatttggtatagttacaatagtgattttctttttcctttgtaagaatccacttcaaattcagtttcttcttactatacttttctgtcaaacaaagcaaaactactggtcagtgtagaagggggaaaagcaacaaatgcatatgatggcttatgaagtacaacatattacattagggaaagaaataagtattattgctgttgtatttctgtttgacttactactcatacaactggttatctaagcccaaactctataatgtaaggaagtaatgaaaacgtctgtctttgagagcagcgaattctttagtgtggttctggcaggggaaggaagcggggaagggttctaagaagnggggcccartttcatcctggcgagttgcagctttcttcctgagcgtggtgactcgtcaaggcaccaaggctcaggaatgagacagacattagagcttgttctggttggcacctctaggatagttttgtctgcacactgtgcctctgaggaatggcctctacaaagggtcaggatgccaaaattctttaatctttcactttcattttaaaaatgaaatctgaatatctctccatctaatagcaaaccacagcgagacctttttttttcttaatgtcccgacctgcctaggcaggaatccattatggttgttgttgattttagtgttttgtttgaagtctcctatttcttyatgaattctctttcacacaaacttgttagtggcactcagtgtcctcggtaaactttttggtttttgtttackgctagcttttaaaaatctatagacaggcaaaaaaaatctcctgccgctaaaaagctccgtgaccttggaaaagtcacttaacctctctggagaaagctcaagttagagggtcagagtagtggactggagaggattttagagatcagagttctgcccttcctgtttacagatctgacattcagagaggccagaagtcamaacagctttcttgaagttttattattttgatttttaaggaaaggagtccaatgaatttgcaaattaacgaagcagtgtttgaaaagaaaatatgcaagagatacttaagtgttaaaggaaactaaagctttgagaactagagataagatactttaaagtaactatccaaattggtttgtaggcagcaaacgttaactgtgtaaaatgtggagcatttgatgcaccaagaaatatttactgactgcccacttggaacttaaaagttcagttgggaaccaagaagataattataatgtaataagtgctctgcctgattaaaaactgctgtgttctcatgagaactaggaaaggcattcagaaggacattcctgacgtcttcttggaagaggtcgaacgtaagctcgtatctgaaggaaaaaccagaggaaagaatatccctaacgaggaatcgattgcacatgcaaacccagggaacttgatgggttgaataactaaaggaaaagtggtcaggmggaggcagaattctgagacctgaaaagggtgaayaggaactcttatcctgaggggagatttgtaaactgcagactgacaggacctgctggagggtttccactcttcctctaagtgtacacaatagtttggaaacagaaaagacagacccagtgagactaagtagaaacgtatttctccaaatattttgacctacaaaatgcattttccctgttgcccagtatgtacacagatccggggacacgcacacacaaactgaaagaggtttcacaacaagacttactttttctacacaggatgtacgctgacattttctacctaacmttttgcattttctaaatggtgaaactgcatgactcatctkatttcactacccactaagtgacaactcagagttggagaaaccttgmgttaaggaagttgctgtgatactccagaagataacattaaaactgtaggatctagggaagcagaaagatgcacagaaggatgtggaatgactccacagggatttaagagactggagagaaggacccaaaggagtgcttacagataatgctgagttttggcttgaactcggggcagataaagggatcgtgtactgagatggggaaccttaagtgaaaaataaggagggtaaaggtatcaccacttgagaaatgcccgattcttttgtgtgtatgtgtgtgtgtgtgtgcgtgtgcgtgtgtttgtaaacataaatatgctccttaatttgaagtacatcccaagaaaaacatrtaactccagaaaatgtccaagttttattaaaagaagaagggaaatggcagaaatggaaagaagggaatcagtggggaggaaggagtgggctctagcacttaggcacaagactccacttggaaaggacaggcaagattcaaatccccgagggaacagacagcccatatcagactcacctgatgcttcactgcagctgccatggggcttttataagctgggaatgggttaagcatagtcccagctgttcattcagccacgatgttggcaggagttagcttctttacacataaagttggcatcaaatttggaattcacaatcactagttcacgaacgtcacaggcatttcttaggcgcttcttatataaatggaaataccattaactttcttcttcatgcamgctctctgacagcatcgggtcaaaggaacttttttcctgcctcttttcatagcttccaccgccccatccttcttctaaatctttaattttgcaaagccatagggagtggtggtagcctgtggcgagttgaagattttgaacaataggtgtttctgagctggatttattgaaagggtcttgtctgtgtcctgggggagaytgtaaatgagatgtcaacaggagctcttttgtgtggatggcattcatcctgaaagacaggaattcccttactgtgctagtatttaaagtacatttgttgctgcttttgctaaaacttttcatccaactgccggagctaacagcaatgaatgagtcacttggtgtgattgtaacttccttccctccttagcaaagcaatgactcagtcatttacatttagaaaggaaggctcctaagaagatttcttggattttcwtcagcttgagcctcttttcttgaccatcacgtgggcctgatctgtcggcaatcctgttaacccagggtgaggggagtctagccgggctgcttttctcactccctggaaaactttttgctgttttgctcgtttcttttttaaatccaaggagaaagacaaacacaatttcctgccttaagcccttttcctttctctctccctccgcctttttttttgtaaaggacaggcaatttcagtttactataattaccctgggctgaggtttgactcactccacctttagatgataaggcaaccgttttattacttcgcagccaggtgcctgagggtgacaagacttgcctttatctggtgwcctgacaaggttatcagcaactgcaaatggkytgaacctcggagcagggaccatcaaaacgcttccctcyccttgatccatttcccaaccctttattggtaattcatttcaatccgaagactagctctagtttctgcaagttcttccgcattcctacaccttagctctgtcctcttgtgttctctttggaacacaggcagcggcaacagcaatcttaattatgagcagtcagctgcccccatgagcccagagcacgaccatgaagtctcaaccacagtccagcacacaacacgcaggatatatttgcgtcctctggcttagtcgatttgcagtatttatagttgctttttcagagtcgatacttaataacgtctttgacctatgatgctagaaatccctccaaaataaaatcgtattgcttgtatcttctatggttccttttgaaaactggaatataatccgcaccaggaggcagtgctgtgctggagataataaacatatctagtgctcgatctatttatatctgcagttcatgaatttatttgtctaccaacacaagtttctttgttttttttttttttttttttttggacggagtctcgctctgtcgcccaggctggagtgcggtggcgcgatctcggctccctgcaagctccgcctcccgggttcacgccattctcctgcctcagcctcccgagtagctgggactacaggcgcccgccatgatgcccggctaattttttgtatttttagcagagacggggtttcactgtcttagccaggatggtctcgatctcctgacctcgtgatccgcccgcctcggcctcccaaattgctgggatgacaggcgtgagccaccgcgcccggccaaaacaagattattctttaattcaaactgtgttacgtgcactgtctcggttatctggtgggtgggaaatgtggtataaaagcatgcattttgggaaatggtttccaaaaagtgtgtactaggcaaagcttgaatgaatgaagggtgagagtacttgcagacacacttttaggtcagtgtcctgggcagcatcaaagctgcgcggcacccggcttgtacatagcacggagctgccaccctgtagtgcaaaattatagtgggccaaggtaaatcatatgttttatttatttatttattcattcatttgagaaggagtctcgcactgtagcccaggctggagtgcagtggcccgatctccactcactgcaatctccgctwcccgggttcaagcgattcgcctgcctcagcctcctgagtagctgggattacaggtactcgccaccacgcccagctaattttttttttttttttttttttccgagatggagtctcgctctgtcacccaggctggagtgcagtggcgtgatctgggcttgctgcaacctccgcttccttggttcaagcgattctcctgcctcagcctcccaagtagctgggattactggggcaggccaccacgaccggctaatttatttgtatttttggtagagacagggtttcaccatgttggtcaggctggtctcaaattcccgacctcaaacgattggcccacctcggcctcccaaagtgctgggattataggcgtgaaccaccatgcccagccgtaggttttatttttctatctgtgaagtcgaactgtagcctgagggtagcagatgggaaaggaggggttgggaagagaatggaaaagatgagttaaaacacacacacacacacacacacacccttgcatatgtgaagtgtttatctgtaagaccacatcagattactccattctgggccaggcgcagtggctcacacctgtaaacccagcattttgggaggccgaggcgggtggattgcttgaggtcaggagttcgagacmagcctgatcaacatggtgaaaccccatctctactaaaaatacaaaagatagctggcatggtggcaggtgcctgtaatcccagctacttgggtggctgaggtgggagaattgctttagcccgggaagtggaggttgcagtgagctgagatcacatcactgcactctagcctgagccacagggtgagactctgtctcaaaaaatatatatatctatatatctatctatatatctatatatctatatatctatctatatctttatctctatatctctatatctatatatctatctatatctatatatctatatatctatatctatatatctatatatctatctatatatctatatctatctatatatctatctatatatctatatatatctatatctatctatatatctatatatatctatatatctatctatctatatatctatatatctatatatatctatctatatatctatatatatctatatatctatatatctatatatatctatatatatctatatatctatatatctatatatatctatatatctatatatctatatatatctatatatctatatatctatatannnnnnnnnnnnnnnnnnnnattggggagaaaagtttttacttgagacattatctcatgtcttaaatagttggatattttagtgaataaaaaaattgttcttattcttcctctaatcattgtacactgctatgtaaattatagcaaagtactgagtactttatgtgactctcatttgactcatccaaccaccttatggcgtaggtgttaggatcatctctgccctacagatgagagcacagagaggttggaaaacttgcccaaggtcacctgctttttgttgacagagccaagattgtacctagtgtctaacatgatcacattatactacttctttgatggagaataataagaaaaaataaaacagggccggttgcggaggctcacacctgtaaacccagcattttgggaggccgaggcgggtggattgcttgaggtcacgagttcgagaccagcctgatcaacatggtgaaaccccatctctactaaaaatacaaaagatagctggcatggtggcaggtgcctgtaatcccagctacttgggtggctgaggtgggagaattgctttagcccgggaagtggaggttgcagtgagctgagatcacatcactgcactctagcctgagccacagggtgagactctgtctcaaaaaatatatatatctatatatctatctatatatctatatatctatatatctatctatatctttatctctatatctatatatctatatatctatctatatctatatatctatatatctatatctatatatctatctatatatctatatatatctatatatctatctatatatctatatatatctatatctatctatatatctatatatatctatatatctatctatatatctatatatctatatatatctatatatctatatatatctatatatatctatatatctatatatatctatatatctatatatctatatatatctatatatctatatatatctatatatctatatatatctatatatctatatatatctatatctctatatctatatagctatagatatctatatagatctctatagatatctatagatctctatagatatctatatctccattctgtaatgtatatagacatcattccacactgtggaaagaaacagttcaaatcccctaccagggcccttactacaattataataaaaaygaataaaaagaatgtttctggccaggcacggtggctcatgcctgtaatcccagcactttgggaggccgaggcaggtggatcacctgaggtccggggttcgagaccagcctggccaacatggtgaaaccccgtctctactaatacaaaaataagctgggagtggtggcactactcgggaggctgaggcaggagaattgcttgaaccggggaggtggaggttgcagtgagccgagatcgtgcgtgccattgcactccagcctgggtgacaagagagaaactccgtctcataaaaaaacaaaaacaagaaaaaagaatgtttctgagtacagtgtgtgaatcacatgcatggtgatgaactaatgaacayccagaactccaacaggagacaatgtcagaaggattaacaaatctgaccttgaccctgggcaacatagtgagaccctgtctttacaaacagttttttaaaacttagctggatgtggtggtgtgcgcttgtggttccagctgttccggaggctaaagtgggaggwtcgcttgagcccaggagttagaggatgtagtgagccatgatcacaccactgcactccagccctggcaacagagcgagaccctgtctctttaaaaaaaaaaaaaaaattggctgggaatggtggctcacgcctgtaatcccaamattttgggaggccgaggtgggcggatcacaaggtcaagagatcgagaccatcctggcccacatggtgaaactacatctctactaaaaataccaaaattagccgggcgtggtggcgcctcctgtagtcccagctactcgggaggctgaggcaggggaatcgcttgaacccgggaggtggaggttgcagtgagccgagatcgcgccactacactctagcctgacaacagagtgagactgtctcaaaaaacaaaacaaacaacaaaaaactctctgtccttggagctgtcttttctttaaagacgtgaaaccttgcacgcctgtcaccactccattgccaccctccacaggtgggcttagttagcacagagctccagaacctgagatgcctctgaaggtgggagtaggatggcatccttctgccccaattctaaaagccactagccaaacttgacctcggaaactatttacagtgcggtgatgccacctctccctgcagacaaattcaagtactccattaaggggcgttccccagaccttgctgggcatgcccagataagcctccttttcatctgcaaaattgagatcctgacttcctatgcaggattgtttttaatttaatgagactataggtaaagcgcctggctttattaaacactcaaccaacgaggaggaggatgggggtttgtrgagtaaattggtatagattttagtactgacttcacaggttcctaggttcctagactgtttttatttaattttggcaaatgacaagtacctaacagaaaggtagtattttaaacacagtctttgctgggcgcagtggctcacgcctgtaatcccagcactttgggaggctgaagggggcagatcacttgagatcaggagttcgagaccagcctggccaacatggtgaaacccccatctctaccaaaaagacaaacattagccgggtgtggtggcgcccgcctgtagtctcaggtactcaggaggctgaggcagaaggttgcagtgagccaagatcatgccactgcacaacagcctgggtgacagagcaagactctgtttcaaataaataaatacagtctttaagggacacttaaggagtaatggaggggaccgggcgcggtggctcacgcccttaatcccagcactttgggaggccaaggcaggcagatcgcttgacgtcaggagttcaagaccagcctggctaacaagttaaaacctcatctctactaaaaatacaaaaattagctgggcggggtggcatgcacctgtaatcccagctactagggaggctgagtcaggagaatagcttgaacccaggaggcagaggatgcagtgagccaagattgtracactgcactccagcctgggtgacagagccagactctggctcaaaaaaaaaaaaaaaaaaaaagtaatggagggggaaagagccctggggtcacctggacaagttcttctctggatctatgtccttctctatcagtgacaaagttggataatgaatgagacagaatttttttttttgagatggagactcactccaccgcctgggctggagtgcagtgtggcgcaatctcagctcactgcaacctccgcctgccaggcctaaacgactctcctgcctcagcctcccgagcagctgggactacaggcatgcgccactacgcccagctactttttgtatttttagtagagacaggttcactatgttggttggccaggatggtcttgatctcttgaycttgtgatccacccacctcagcctcccaaagtgctgggattataggcgtgagccaccgcacccggcccaaggcataatttttttaagcactaaccctgttatctgagcatcagtaaggagctggtatcctttctgggccaagtgggctgatgtaaacagtattacacgggttacccagatacgtttttctgtttttcctttgaaaacggcggtttcgggagggcagagagaaggaggaggatgaaaaattaagtgcctaactacacagaycaggggggcctgcagcctcccacacrcctgctttccagatccaggtaattattcctcatcgtgctgacaccaacaggaaggaacggtggatgcattttctttcttcttcacttcaccatgcatcctgtttccccaggtttggaggtttgagccggccttgtgcaaaagctcctgtaccaggtcaagccctggctccaggccctctgttcctagggcagtggcagcaatgggctgctttgggggagggtcagccttttctccaaagtccagcaagcctgccagtgaaccaaggttactgatgaatccacgctgaagtcttggtgaggactcagcctgacyggactctcattagatgggacggaccctggttcatacacaggccactcactctgcacagccaccccacttactgaagcaagaattggcaataagtgcacaataccctggtcccatcttaaaacaaccagctaccccacagtctcagagtcagggatgctcaagtactatttattctgtttaccaracatatagcagccgggcagggagtcttcatagcctgttgcgtcatgtgattccattccaratttttccttttattcctgtctccaaggccccattgtgcaggtgctactaattttcatgaaatgatactaggaggtaaagaaagttcgctggctctcagatatccatctgtgtgcaaacagacagagtacagaaaaataagtagaataacaaagttcctagttttgtgtgggctgagagtgaaaaaaaaaagagtaacgaggagtgaaaagaatgaagaagaaaaacagctgcacaggaaaagggcagtgtcacaggtgcctcccacggtcctttgcsgagagcctgtgggggaggccaagtggggagaatgggggacatcgggtggacgacccaggggaccagctggtgtcagagaatggtagattaggatttggcctgctagatcatgctggcggcattggccaacatcaaacacgagggggctctggtgacaggacatgacactgcacaatcagagatcwcagcgaatggctttgctgaggtgtccactttactcctgccccgatcacctccccttcctgattgttagtccttttgtttctccaggaagtctcttctcatccctgttcacgccttcatgtaacaagcatttatcacactagtaccgtgagccacgcgtgtgctgtggttacatccgtggaacagacagacagcagtgcctgatcttgtaattcttccatcctttcattcctttctctcagtctggccagaaaaaaaaaaaaaaagttctcctaacagagaatatagcaacaggttgctgaaaagtgacatctgacaagaaatgaaagctggttgataaaagatttaaaagaaaaatgtcaggccgggcttggtggttcaagcctgtaatcccagcactttgggaggccgaggcagacagatcatctaaggtcaggagttcaagatcagcctggcccacatggtgaaaccccgtctctattaaaaatataaaaataagctaagcatggtggcgggcrgctgtaattccagctacacgagaggctgaggcaggagaatcgtttgamcctgggaggcggaggttgcagtgagccgagatcgcaccactgcaccccagcctgggtgacagagtaagacacggtcttaaaaaaaaaaagaaaagaaaaatgttctttcctgctcctggcactctccctgccctagcctcctgggcatgctatctctcaacaagacccagtctgccccaaccagaggtgttgctagaccagctgcccaaacaggaaaccttatataattctgtaaccctgaccttgggcctgaatcttccccttctgtaaacagtccattcaacccaggaagacctgcagacctggttgggacacattttgaaaaacacacacattgttaaaaatgttgaaaaaagtccctaggtctaagaggaagtgttctgtctgactcagcagtagaaatcacttcatataaagtaatggaacaaatggaaatttaatcctaacagatgtaacagggcagtcacttgtgtacacggatgacttgattgcacctgttggaaaggykgggaaaatgagccgtgaaatcctgatcacattccctactggaagcagcactcctgccttgcaaattagtaagcctgatgttctcaacatcctgacttcaacatgtgtgccctagttctgtgcaggccatgactcactttagctactggtcaaatgattcttactcagagccctaggtttctaatctttagtgttaagtggtccaggcacatactagccaaatgtctgtctacttccttttttttttctcatgcctgtttcccagtctgtgtcctttcaagatactcccttgaaatgactgatttcaggcaacaactggatttacatatggtagccttcaacttcctgtttaacttactgccaaacttcaatagaagtccagattagaagttttagacctcagcctctggccctgggccttctgaaatgaccttcctccwaacaccatttaatttccgctaayttagttaatgaatggaactttctgaagacagcagttactttgatctgaacccctttcctagtttccagttaacatagccagagggagacagaaggggtgcccgcctctcaatgggtgccctctcctcctgcgtggctggagcagctcccagctgtagctattcctctaacgcagagagagctgcagaaagcagttcccaaaaggaagaaggcaagttacaaataccgccgttggcattttcgtgggtgtttcccgccacatagagataaaagstttgaggtggggctttgaggcacactctctgggtagctgggcctgcagtctggaaatcctaagtaatccttgcaaataggctaactggaagccagcaatacaaatgagcagtgcttctggcctgagagaaaggtgtctgcattcaaagtacaacttcagataaaaatggaaaatgccagtcccacccygcaggaatcctgtttctgggctgtttatcctcactgccatccaccctacccttggctgtgactaggatgtgaagaaagagattgggtggaaaaggctaccgcagytcttgctccgtttaactcaccaccttaaaaaacatggccttggctgctgctttaaaacaacaacaacgaaaatccccagccccaacccagaggtttaaccctgcagctaaggtgaagtttttgttaaggtgataaggtaaaaaaggacgccattctgagccttgacttccactcttcatacttttcggaagacaagtccagcaaagacctccaccccttccaaagagcgacttacctcgtagctgatccacagattgcaacgtacagatgtgatgttccaggcttggccacaaggggacactagagagtaggactgcccgcgtcaatgttttgttttttacagacttttggttgggagggagggagggagggaggggggtgtgggagtggtgggggagatgctggctttaaaaaaaagtccatttgttccctgagattgtgccacttgcccttttataagtcaaaggttgccacgttacctgttgccaggttcctgagagtgcttggggaaaatgtgggcgagagaggcacagcacagtcctccggcttggtaggtttcaagctcttttgactgggctggcgctgacatttgcaggggcagctgctgtggattgcctgcgcattgtttggctgtagttctaacagaggagtggctgcgtctgacatcatttccaggcatcaagtgcctggggcttttttttttttttttctttaatgacgaactctctgacccctccctgcctggatttttgtacagtacatgcactgtgcaaaacagcctccactcaggaagcccaagttttgtagcagcttgttgaaacaacttgggtgccttttaaaaaaaataaagttgtgactctgaaacaaacctttccattcttcctccttgctgagaacaatgttgcgtttgattagcagcgcagccagtgctttctgaaagatctgctctccccagaagaggcggctgctatcagttgaatagatctctargccagacatgccgaggcttggggcatttgtctggcgttaggaagtgtctggaatactagcaactaccaactggcgtgtcttatgactacaggaattattacactaccctccatttcattcacatyccctctcctccccttacacacacacacaagcatatttttttctactttagaaaaagttgagcgagtcatcttgtggtttccgtggaggatgtaactgggagagaagactgtgggataccttgtatctcccagaggggggccgggaatcatggtgtatgacccaccccaacagcctctgatctctgccttctcaccactgaccgccacgctttgggtggccttaaatgtgaagctgtaaatattttgaaataaggtagtgatttttccatgtgcattttgttttgtggcatttctctccttctgcaatattttaaaagttgcaactgtgcaccccttgttgaccactccaaattcattcattcactgaaacttaagagttcctgcagagtgaggatggctgtgcacgaaggagtccctcgtggaaaccacggtgctttagtggacaaggtgtttactagagagtgtttactggcggggggcgggggagataaacaaaggtggtttgagttaatggtcagatgggagttggagccctgagtactctaactctgtcactgaatctctagatgagttagggatgtccgttgcctgctctgagccttaatattttcatcagttaaatggggatagtgggatctttcacatatgtgagatcatgtctattttcttctttttcttttcttttctttcttttttttctttttctttttctttctttctttttcttttttttttttttttttttttttgaggcagggtcttgctctgtcacctaggctggagtgcagtggcacagtcatggctcattgcggcctccacctcccaagctcaagtgatcctcccacctcagcctaccgagtagctgagacttcaggcgtgcaccaccatgaccagctagttgttgttgtttgggtttttttgagacgaggtctcactctgttgcccaggctggtctccaacacctgggctaaagcgatccttatgcttcagcctcccaaagtgctgggattacargtgtgagccaccacacccagcccccatgtctattaagttcttagcacagtgtccagtacacagagtaaggatttgctctctggtgattaggaagatctaatggcatgtcacgggtctggactgaatctcatctcatcatctttgttgttgccagggtttgcgcatttttgccggtggaggactccagccagaccgctgatttgtctggcatttgttggaaagtccggccagcataacacatcaccgcaaggagcaggagccctatgatgcactgttaagtgcacaactatggggtctgcttggctggaagcagcagcagcaaacttgtctattagttatttwgtcctcatcagtgccagctgctttcccaagatggcagaacattcatcattgctaccagacagcctcgttggagctctttctctggcctcyttttttggcttctttcttcagctcttcagcatcattctctgtgggaccctccctagtttgcaaattcttgtctaaatttcactcattatcataaccatccaatttgaaagaaaccttgtcatctagttgagccccctatcagatgttggtacaattgctatagcctcccagccaaaagatgtgctggtctgtgcttgaacaggtccaggggctgagaactccctctgttatgaggtcctcatattccttctatggacggacaatcaatgcctggagaattattctttatgcctctctgagcccttgcctttgttgttcctttggggacttatacaaaacaggcccatgctatcctctaagcaagagccctccaaataattgaaaacccccctttcttcttttccaaatgaaacaccccgtctttttatttttattttttgttttttatttttgacgtagtcttgctctgtcgccaggctggagtggtgtgatcttggctcactgcaacctcaatcttttgggcttcagcaatcctcccgccccagccttccaagtagctgggactacaggtgccacctacttggaaggctggggcaggattctaccactcctggataattttgtggagatgggtttcaccatgttgctctagctggtctcagactcctgagctcaaagagatcctcccacctggacctctcaaagtgctgggattacaggaatgagccaccgcaacaggcctaggtccatacttctaatcctacatgcctttcctgaaatagacaccttacctgacattacaaccataagtccaatcgttcccattctgtatttctacaatagaaatacatttatgtccccagtttaggtccttccaagtttcttttttttcttttggcctcttcacatcattttgttttctaaaatagcctgtggcttcaagttacctcttgaatatattcttaatctcacttgtactacctctgccctgttccctggatttgcaaatgttcttttcagtgcttctcagcctatctctggtaagggaccagtttgtttgtttgccctcaatctgctgcagattagtgctttggtaaaatgcaacaaaaaagaattactagaaagaggactttttttttaagacatacaaaaaacaaacccataatttttgttttgttttgttttgtttttagattcaacaggtaaaacactctataaaattgctataaaagtttctaaacacttacattcaattttctttgtttttttttttagacggggtttcattcttgttgcccaggctggagtgcaatggcaccgtctcggctcactacaacctctgcggctcactgcaacctctacctcccsggttcaagcaattctcctgcttcagsctcctgagtagctgggattacaggcatgtgccaccacccccggctaatttttgtatttttagtagagacagggtttcaccatgttcgccaggatggtctcaaactcctgaccccaggtgatccactggcctcgacctcccagagtgctgggattacaggtgtgggccaccgtacctgaccctacactcaattttcatagcatgtgtcaccctgcactgtgacacagtttgcaaacgggcaccactctgcagaccaggctttgaataaccctgctctgtacacacaggggtgttggaaatgcttaacaaccggctctctgattgaagaaaatccacaggggggaacctggatttcaggcatttgctgatttccatggtgtaaatacaccaaggtcaacaatttcaagctaacagtgaaaagtgactgaatacagaggtagaaagaaatgtgcacaatcgagcttagcaagctgagaagrgccagttccagcacgcttctgtcaaccccattagattttaaaaatctttttaataaagcccttttggccaggcacagtgactcacacgtgtaatcccaacactttgggaggctaagggagctggatcacctgaggtcaggagttcgagaccagcctgaccaacatggtgaaaccccatctctattaaataaaaaaaattagcctggtgtggtggcacatgcctgtaatcccagctactcaggaggctgargcaggagaattgcttgaacctgggaggtggatgttgcagtgagccgagacggtgccattgcgctccagcctgggcaacaagagcgaaactctgtctcaaataaagaaataaaggccttctttttgagggcttgttgaacaactgctgatcacctggaccaaatcgggagaactttgccctcagcagattttagacagtggaccaaggcagcccttctctctggtagtcttcatctcagtaagatgacaccatctgatagaactcacagcaaatccaaggttgctttccccatgagctctgtgtaggcgctgccacttctcaaggatgatcaaatcacagcttgcttgataatagytgcacttaataacaacgccttggggtaacaacatgtttacatcaaaaagatgttacttgactctgggacatctgcatatatatctatatataatttaatttatatataagtttaattactttgtcttattgtgtttttatttgtggttccttatggacttgctctctcatgttttaaaraatttctaaaatgcagtaatcaggaactgctaaatagttgctctacatagcttatggtgtatgatccattcgcttagctggtaagggtttatgaataaaaaggcacaaaaagggagtttgatctcacatctgttttgtggccgcctgacacttgtgtgctgttaaacttgaaggataaccagagtggaaagagagtctggataatttgccagaacatcttcaccactacagaataaaataatctctggcccaggccttcctgaagcttgcaacactttctttttttcttttttttctttttttcagacggagtttcattctgtcgcccaggctggagtgcagaggtacgatcttggctcactgcaacctctrcctcttgggytcaagcagttctcccgcctcagcctcccaaatagctgggattacaggcgcctgccaccaygctgggttaatttttttttatatatttttagtagagacggggtttcaccatgttgaccaggctggtttcgaactcgcgacctcaaattatcccctgccttggcctcctaaagtgccaggattacaggcataagccaccgcgcctggccgcattatctttccatacaaatgtaggcaatattcaatcatgagctagctcgaagctgaaatgataggaatgtgttgttttctctataatgtctttctttcttttttctttttttttttttttgagatggagtctcgctctgtcgctcaggctggagtgcagtggcgcgatcttggctcactgcaacctccgcctcccgggctcaagcaattctcctgcctcagcctcctgagtagctgggaatacaggcacacaccaccacgcctggctaatttttgtatttttagtagagatggggtttcaacatgttggccaggatggtcttgatctcctgaccttgtgatccacctgcctcagcatcccaaagtgctgggattacaggagcgagccmccgcactctgccgtataatgtctttcttaaaaatataactttttttttttttgagacggagtttcattcttattgcccaggctggagtgcaatggcgcaatctcggctcaccgcaacctccgcctcccaggttcaagtgattctyctgcctcagcctcccgagtagctggggttagatgcatgtgctgccacgcctgactaattttgtatttttagtagagatggggttcctccatgttgttcaggctggtctcgaactcccaacctcaggtgatctggccgcctcagcctcccaaagttctgggattacaggcgtgagccacagcgcccggcccmaaaaatatataacttcttaaatgtaaataccaacctctggtctctctgtgcactacagtatccactgaatgaaaatgtcactgaaatctgcagctctagttctgcaactctctcataaatggataagagtcctttcagccagatgaggaaaaaaataatttcatttgaaatgaacaaaaaacttatcagggcaaaggaaagcagtaatggtgataaaaaatacagcatcatttcttttttcaagttccacttacattttaaaaatcattgtttttgagaacgtcattctgtgtctggaatttattccttcttgtgggttcctggtcttgctgacttcaagaatgaagccgcggaccctcayggtgagtgttacagctcttaaagctggtgtgtgcggagttgtttgttcctcccggtgggttagtggtctcgctgacttcaggaatgaagccacagaccctcacaatgagtgttacagctcataaaggtagtgtggacccaaagagtgagcagcagcaagatttattgtgaararcgaaagaacaaagcttccacagcatggaaggggacccaagcgggattgctgctgctggctggggtggccaacttttattcccttatttgtccccgcccacgtcctgctgattgatccgttttacagagtgttgattggtccgtttttacagagtgccgattggtgcgtttacaatcctttagctagacacaggtgctgattggtgcgtttacaatcctttagctagaaaagttctccaagtccccactcgacccaggaagtccagctggcttcacctctcaattcttgcagggagcggtggctcatgcctgtaatcccagcactttgggaggccgaggcaggtgaatcacctgaggtcaggggtttgagactagcctggccaacatggtgaaactctgtctctactaaacccacaaaaattagccaggcatggtggcgcaggcctgtaatcccacctactccagaggctgakgcaggagaattgsttgaacccrggaggcagaggttgcagtgagccgagattgcaccattgcacctgggcgacaagagcgaaactccgtctcaaaataaaaagagaacgtcactcttaaacaaatcagatgtttcacttactgtatagaaactgctcgttttctctttttctctttctcattttctctttctgttttgaccaggcaagacaaacatattggctggtgtttcaccctccttcagtctcactcttatgtgtcacacacctgctggtgctcagaccttctcagtgggttctaaatctttcctggcactgaattctgagagtagaactgaaaccaaccaaccaacaaacaaaatacccttaggagagaagtgtgggtttagggcttagcaaatctaggaaagggggatgttggggaaaatggaaggatttcgttgtatgagttttggagtgcagaagaattggaaaatgaagaaggggaactatggggaagtgtgagttgtgatttgaatccctttcctctccttcaaatggcaatcttaagccgggcatggtggcatgcgcccgttgtgccacctattcagcaggcagagggggaggatctcttaaatctgggagttcaaggccagcgtacacagcacagtgagatcccgtctgtagttgaaaaaaaaaaagcagtcatgaagatttgaattccttttaccttcctagcccatgactggacagtgccgctcactgcagtgaagcctcataataacgagtaaagtccctcagcataacagcatgggagatggttcctgtccttaagtctcataataatgagtaatgcccctccgtataacaacatgggagatggttcctttccttaagcctcataataatgagtaatgtccctccgtataacaacatgggagatggttcctgccctccattcagctcccttattcgaagttgggggggatctcaaaatcttatcttctttgggtgttgggggctggaccaccctgttggagaagccatgtctccagtattctccctgtccagtctaaccatggtagatgtcaagcattactggaactctgccaatgtccctgttgagcaaggtatccagagttatccctatcgatagcgaagatgagctgacaacagccaccaggtggcgtccaattgcagttggcctggggagtgtaggagccgcactggaggctcagtccccaaggtcagtcatgcgttggaaacaatgtgamctagcccctcccacccccacttatcacatcatggcaggatttttactgtatgtcacagcaaatcaaatgattccatatttggctgaattatctagcttttttttggagggggactgtttggttttgttttctaattgtgtagagatgggatctcgttatcttgcccaggctggtctgcaactcctggactcaagcagtcctcccaccatagtctcccaaaacgctgggatgacaggtgtgaaccactgtgcctggcctcactgtccagtttggattatccacactaaaagaagaaaccaaggagagctaacaagaagcaatacataatccaaaagatcagacatttgatgttggaatatgttatttagcttcttgaaatatcagtgggcggaatgtcctgagaatccattttgaacaaaatagtgagttcacgttgtaaagacatgtcttaggagaagtggtacaatgctgtagtttcattcaattttagcagggagaggttctatcctaattatggctcccacccactctgggtcttcagctgaatcactgagatgagcgttactcccagcaggactaccatcactcatgcctctctgggaaccagagctccaccatggtttggatgcaagaaactaaattgagtgaggcaagatatttacaatgtatatgcactggcattgtttagccagaggcttagctgtgggctagtgggaagaacctgaggctggctggctcgctcctgactctgcaccttgcargcactgtattttccctgagtcgtatttcctgtcaggtgcattagctaaaaaatgaggaagtcgacacttattgttgagctgcattcaaatgataaagatgggccgggcatggcatagtggctaatgcctctaatcccagcactttgagaggccaagatgggaggatcgcttgaagccaggggttcaagaccagcctgggcaacacaacaagacccccatctctacaaaaaataaaaaattagctggatgtggtggtgcacacctgttagtcccagctgctcaagagattgaagtgggaggattgcttgagcctaggagatcgaggctgcagtgagccatgatcgtgccactgccttccaacctgatgacagagtgagaccctatctctaaaaaaaagagagatgaagttgtgtgtttcatgagtcaacatagatgggaagttctcctgggctgggcctctgccagtcatccacccagggaatgaggggtgactgcctctatgtcatgcaccttgtctttccccatcccagagtccatatgatattgtaatgagacatttgcttgatttattcctccaatactcaggcaatccctgggaaatagccaaacattattgtctccatctattttatggttaaggaaattactccaaatcataggccactgaaacagcaggacagcataatagagtccttttgtttattgttcattatagggtgtttcctctgagtggccagaggaaacatcttcaatgttgaagcaagtatttcattcagtgagatggcctgagttggcagctggaactgtaggtaacaagttgggactgcatggccaggtctagctgatgtgatggagccacagtgacaccacctgtgagagtgggtgggctggggtggggtggggaggaaatgatggaagcataattatttgaatgaatttataatagctgcttaaggaattgtgcttcactgaccggagtcccacttggaaacttaattcatttttgatccttattttcttaaatcatgctttacaaatgagaaactgaaagccaacgtgtaaagcttcttcaaaaccctcagcgttgtaatcaaatggctagagggaggggctgaggctgctgtcgggagcctccaaatagaccttgacccccttgtacgggtccaaaattgtactcagcagcctagattcaggcccccaccattttttttagaccgaatcttgctctgtggcctaggctggagtgcagtggcacgatctcagctcactgcaacctcctcccyccaggttcaagcaattctgctacctcagtctcccaagtggctgggattacaggcatgcaccaccacrcccggctaatttttgtatttttagtacagatgaggtttcaccatgttgaccaggctcgtctcaaactcctgacctcaggtgatccacccgcctgggcctcccaaagtgctgggattacaggcgagagccaccacacccagtcagattcaggcccttgacttgaccaagttgccctaaagaaagacactttagggagtgactcatacagaccaaacccacgaagactgatttataagctagcatgtggattaatttctacaataggagacttttgtacagtgtaaatactctcagtgagtagttctgctcagaaacaagcaaaaattaaacaaaagaagtttatatagtgagagtttatccagaaaaagacagagagagagataggcaaggtggaagtgaagaaggaagacagagaggaggaggaaggggaaagacaagaaagagggagacggagagagagagagaaggaaaaggaaggatgacaagacaggwagacagagaaaagaaaaagactgaaggagggaaggaaggaaagaagggaaggaggtggggaaacacagagggacagagagagaaagggagggagggaggagggaaggaaggaaggaaggaaggaaggaaggtaggtaggtaggtaggtaggtaggtaggtaggtagtgtcggtcagtcaggcagaaagacagaaaggtgggaagtggccgggcccggtggctcacgcttgtaatcccagcacttctatgtgtctgtctgtcaggatataggcaacagcttcctcttctgtcctttgaaaggaggcctaagggagaggatctcttgagcccagagttcaagaccagcctgggcaacacagagagacctcctctctattttttaaaaatatttttacaggaaggagggaaaaaggaaaagcagggaggaagaaaggaaagaaggaaggaaggagggagggagggaggggggagggaggaaagaaggaaggaaggaactggcttcgataaacaagttgcagcagctaccatggcgtgtgtacccttctcccccagacacctcgtccttgttattaggatcagaacacgcatcctcacaacctctttgccttccttttttctttttccatatttattatcaaccactaaaatctcttctaatgagttactctgtttaatattagctatatttagttttttccctgaagayagaaactcccctcaccttttctatgtgcctatacaatttgttggctgggaaggtttcgacagagggctaatcgtatctagtttatgttgattcatattaatttccattttagaaacttccatttcagagattgatatttcccggtgtttttctccctcagttttgtggaggtgtcacctcagaggagacccaaaccacctccggagagcaggggtctcagcctgtcaatggaacttgttttcctgttaaatgtctcagtgtgtttcatgtgccctaattcccaatggctgtcagttacaatatcagaaattaaaacccacgcagaaatcacaktgtctttgttttcactgtcttccagtgtcatcttgcattacaacatataagaagacaccacctccagtcccacccagaactaccacgaaacctttcatttctatcacagcccagagtagcacagagtcagcccaggatgcctacatggacggacagggccagcgaggagatattatcagccagtctggactcagcaactccaccgagagcctggacagtatgaaggctctgacagccgccatcgaagctgcaaacgcccagatccatggccctgccagtcaacacatgggcaataacactgccacygtcaccaccacgactaccatagccascgtcaccacggaggacaggaagaaggaccactttaagaaaaatcgatgcctgtctatcgggatacaggtaacagcctccctttctatcctttgaaataggaacttaaaactaaggaatgtaacactttttgtttccccggaagatttgctttcttgccgcttggaatcatagatctatgcataggaccagattttcaagtgattggctgtggactccgtatactgttaaatgtgaccaagattatgaaagtattttcttttcttttttttttttttttcatggtgagaagatttttttatttgaaatatagtctgagcaacatgagtgtagccaagaggagtaggggctggcctgcctggggcagcagcctctcaaatggcacgagagcagtacaaatattccaatgtctgtgtgccccaaccccacctgtcaggaaaggcagaacagcagaacaaagacccacccacagcgccttctcaaggggtctggttcttggtgcctgcctgcctttgccttacctcctgctctgcccaggttccaaacagaggtgtgcagcagaggcttctcccacctcacccacagagacatgataagccagtgtgacaattagttctcaggactattttgagggaaaagaatcagagaagacagggaggagggccaaggtgatcaagggcctcaccaaaccagactaggcagagctctcccagagggactgtgtcagcacccctcatttccctccttctcaggatctaaaggcaggaaggagagctggtgtctgcaggaaaacagggctctgaggagcgccctggctraaggcagcaagcgggaacctcccagaagagcacagccgctgtggggttcaagcctagttgacagcattggggttgggccacataagcagcctggggttggaaggacacagacaggagatggggtaccaagaagcagcaaaaagccgtaaataacagaagcaaattcagagctgtgagggtcccggccgaccccacatttcctggggctgggggatacccagcactggcagctcagggcagacgctactgcagggtacaaccggccacactcacccygggggcagagccttttattttccacggtccgcacggcaggtggaagacgcttcggcaccacccctgaccatgcacactgcaaagtctccggtcacacctgaggggayggtgcgtggctgtcctggtcctgagaggcctgtggttgactgtgatcattgtggccaccgtcgtcctcaggggccgggcccagcaatctcctcgcctctgggtcagccgacaaaggctcaccggcacattcttccagtccattctctctagtctccatgggcacytcctccccggagccctcctctggctctgccacctccactgccatctccgctgccgccgcctcctcttcctcctcctcctcctggtctctcamcttgtggacaatgaagaggtggcggctgagggagctggcagaggtgtagcacaaaccacagaggagacattgggctgtggagctgtccacctggtgcttaggtatgtggctctgaaattcgagccccgagtctgtggcaaaactacatttcgcgcactgaaaaagggacttgtgccttttggtggaagagacagttgcgccattgytggtgcctggagcgtcccccactccactgactggtcttttcagatggttcacctgaggggaatgtccacccggaggtttgactttggrcgtctggctcaaatcagggtttctgaaartattttctttgtagacattattagcagctattatttttgttctctaaattgaatgtgtgactcaagctgcaggataattcaaagaacatgaacacaatcaaacatgaggtgcttttaattcctaacgcacatttctatttttagaaaagagagtggacttgcaggaatagccggggtcatcgagccacataacagtatgttcaacactattgaatgaccatatgagaacaaaaatgtgaatcacttcccatagatgtgggagtgaaggcgagcaagaccaaagtgactgacagtgtggaaagcaataacacacatcacagcatcatgaggaaagaatgtgcactagtttcagcctaatcaagcatttcatgaaaatggtagaaaactcagtaggcttctcagttcagttcactgtttttctgcttttcaaagataagatcaaactgattccaccttgtttcttttacatctgtttagcttgggttaccctgctaaaartgttcttctatcaaagaagaaaaatcatcctctctctccatttttgttgtgctatatcagtctgcgggtaccctttgaataataacttctcaatttgctgttgaataaatccatccacattgaacccactctaaggctaatttaaaagccaggcgtggccaggcacagtagctcatgcctgtaatcccagcactttgggaggccaaggcgggygggtcacctgaggtcgggagttcgagactagcctgaccaacatggagaaactccatctttactaaaaatacaaaattagctgggggtggtggcgcatgcctgtgatcccagctacttgggagactgaggcaggagaatcccttgaacccgatagacggaggttgcggtgagccgagatcatgccattgcacacaagtcggggcaacaagagcaaaattccatctcaaaaagaaagaccgttttaactatttttacacctacagttcagtggcactaaggacattcacattgttgtgtgaccatcactatactgtgtgtgtttagtggtgatgatgcacccaccaaactataacctccacaggaagctagattttttaaaacagtttcagaataataataataattattattttcacccagtaggatggaactagacttaaatccacgtataccattggggagaaaagtttttacttgagacattatctcatgtcttaaatagttggatattttagtgaataaaaaaattgttcttattcttcctctaatcattgtacactgctatgtaaattatagcaaagtactgagtactttatgtgactctcatttgactcatccaaccaccttatggcgtaggtgttaggatcatctctgccctacagatgagagcacagagaggttggaaaacttgcccaaggtcacctgctttttgttgacagagccaagattgtacctagtgtctaacatgatcacattatactacttctttgatggagaataataagaaaaaaaaaaaatggccrggtgcggkggctcaggcctgtaatctcagcactttgggaggctgaggtgggcagatcacgaggtcaagagatcgacaccatcctggccaacatggtgaaaccccatctctactaaaaatacaaaaattagctgggkgtgrtggcacacgcctgtagtcccagctgcttgggaggctgargcaggagaatcacttgaacccaggaggcagaggttgcagtgagccaaggttgtaccactgcactccagcctggcgacagagtaagactccatctcaaaaaaaaaaaaaaattaaagacgcaaactattcattgaatttcgttatacagaaatcaaatttaaatgcaagttcccaaaatatgtcacactagaatcttagacttccttccatgctttctctcttagggccagagtttccaatcctttaccaaaactttacatttaattcatacccaatagctaatactacaactacttactttataacctctgtgaacttagatcaattacttaatatttctgtatctcagattcttcatctggaaaatgagaataataatagtccttatttcatatggtacattttgggtatggtaaaaattaattgataaaatatatgtaaggccgtaagcacagtgccaggcataagtgttcaacaattattagatttagttgttatgattaatattgtcctttaaaattataattagctaaatatgctgaactaaatatgccatggactttctcaattattatttttttggacagagatctcatatcctgcaacttcttttacaattttgaaagccactttataaatttaagtagattaccctagatacaatacataaaagatgccatttgccaatatttggagctaagagtaaaaaatcacagataaatttatatacaatgactaaagcttagaagatgctaatacttgatgcaaatgagctggcagttctaggaccagtggggatgaggcttggaccaggcagagaacaatatcctccattcttgttctgatgaaccctccttcttttctgtctcctctttttcatgcattgaggatcgtgcttcttcagggaaataactaccatgcgtcttctgaacaaatttcattggatagttttataccaccgcatagtagaagacacaacatcctactttggctgacatcctaagcgtttttaatttacaaaagtgtagtcatatggaattggttaaaatctcatccaggaaatcacagaccaggctcacttcttaaacagagacagtttaakacacaaaattggttacacaggtatgggaagactgagagagcaataaaaggaacaagaaggaaaaggtggggttaccagaagtttaggagctcagaagaaaggcctggggtagcccgtgctcagactgtgaggtggcagggtcacgtggtgctgggacttcagagtggtgcagagcagctggtgcatgggctgttgaaaggagctgaagggccaggcacggtggcgcacccctgtaatccctgcactttgggaggccgaggtgggtggatcacctgaggtgaggagtttgagaccaacctgaccaacatggtgaaaccccatctctactaaataaaaaaattagctgggtgtggtggtgcatgcctgtaatctcacctacttaggaggctgaggcagaagaatcacttgaacctgggagacggaggttgcagtgagccgagatygygccattgcactccagcctgggcaacaagagtgaaacgccgtctcaagaaaaaaaaaaaggccgggcgtagtggctcacgcctgtaatcccagcactttgggaggccaaggtgggcggatcacctgaggttgggagttcgagatcagcctgaccaacatggagaaacgccatctctactaaaaatacaaaaaattagccgggcatggtggtgcatgcctgtaattccagctactcgggaggctgaggcaggagaatcgtttgaacctgggaggcgaaggttgcagtgagccaagatcgcgccattgcactccagcctgggcaacaagagcgaagctccatctcaaaaaaaaaaaaaaaggagctggagctggctgcgctggctcatgcctataatcccagcactttgggaggtcaaggcaggcggatcacaaggtcaggagttcaataccagcctggccaagatggtgaaacccagtctctactaaaaatacaaaaaaattagttgggcatggtggtgggcacctgtaatatcaagtactcgggaggctgagacagagaattgattgaaccctgcaggcggaggttgcagtgagccgagatcgcgccactgcactccagcctgggcgacagagcaagactccgtctcaaaaaaaaaaaaaaaggagttggagggtggagccatagctaccttcacatgcaagagtgatgccagaagaaggtggaaacaggaaggaagtttcttctcttcktccaccttcctttgttagaacacagctggaaaccagctgacaaggaggcctaggaaatgtagtttgggagtcctggccgcagtgtcgaagagcagctaaatgtagaagatgggctcgaggctgctagacagtaagcaaatcaccaaaacaaagctctttgtctgatataataaataaatgtgctgtttccttcaatcagcatgtgtgttaaaagacctaaaatggacatgatccgtgtgyagtcttgattcctatgttcttatgggagcacctygtggcactctgcttctagaatatttaaagatataaatttctgtataatatggcaccaaaacaagtcaagtactttatctggtgtttttcttgatrccctagtgctgggggtgatgggggcattgtggggactggctgctctggatttagagcaaagttgtatgtctaaactaaaagtcataggcacctttaggataaattttttttgttttcttataattacaaagtgagtaattcatgtatacaggattattataaagagttcgtacagtacaggagtgtatagagcaaaatatgagatttccccttctttcccactcccacctcgtattcctactgtactccccaaaggtgacccctggcaacagttggttacattgtcttttagtctctcaagagtaattctgactacagatgagtttcatgtactacctttaggccctgacccctctacttcctgatggtacattatgatttccatatattatcatttaactcaatttgcaaaacagatgaaaagaacagcttaatcttcacattatatgaaatgcaatggctttctctattctttgaattaaaaataaaagaaaatttagttattttagatcatactcttaagacttatttatttcctttaatacctgtccaagtgtacagatatatattaatattttatgcttatgtgaagaaataagtccaactgcagataatgaaacttgtctctgccaagtaaagtacaaaccaaaggaatggttactatttgaaagaaagctttgaaaaataaaaaggcccatgcatggtggctcacgcctgtaatcccagcactttgggaggcctaggtgggcagatcacgaggtcaggagattgaaaccatcctggctaacatggtgaaaccccgtctctactaaagatacaaaaaattagctgggcgtggtggcgggcgcctgtagtcccagctactcgggaggctgaggcaggagaatggcgtgaacccgggaggtggagcttgcagtgagccaagattgtgccactgcactccrgcctgggcgacagagccagactctgtctcaaaataaataaaataaaataaaataaaataaaataaaataaaataaaataaaaaggcacattatcttggattcataatttattgacttaaaatagtaaaggaacactaaggagatagtttcaaaacatttaagccttgaagactttattttgatgtcctcgaagtcagcatcagtgtttatttggaaagagatttttggagggacctctctccagtcaaaactaatgaaccttacggagatcattttaatgaattccaaaaagaagaaataatcagtcatgtttgccaaccatgatgcattaaaattagaaattaacgctaaacagataacaaaatctaaccatttgaaaatattaaaacatctaaataacatttggattacggaaggaattcaagattattttgaaataaatgacagcaggaatcctataaatcaccactatgggctgtggccatagttatgacctaacaaaaatttctagccctatgttctttcataattaaggaagaaatattacaatataaagtaaacactcaatttacaaagctagaaaaagaacaacagattcaaaagaaggaattacaagtaaagtggaattgataaaccaaaattggttatttgaaaatactaaataaatagacaagtctgattgagagagggaaaatagaaatcaacaatattaggaatgagaatagtatatgacctttcgaaaaactataaaagattcttgtgacagcttaatgttggcaaattttaaagtcaaaataatacgtacactcatgtatattactaataccgatgcaagagggagtattaaatctggggaaagaggtcaggctcagtggctcacacttgtaatcccagcactttgggaagctaaggtgggtagatggcttgagccagggaattcaagaccagcttaagcaacataacgagaccttgtctctacaaaaagtagaaaaaattagtcgtgcgtgctggcacatacctgagtgccagctacttgggaggctgaggtgggaggatcacttgagaccaggaggtcacagtggcagtaagccatgattttgccacagcactccmgcttggatgacagaaaccctctgtctaaaaaataaataaataaataaaataaaaacctggaggaagaaatcttataaccatagaataaagtgcmaaaaaagtgaagaaaaaaaaaacctttcacaaatrttacggacttggatcattttaacaggaaaggttttctcaacattcatgaagcaaataatycctatgttatttaaagcatgtaatattacaaaaaagatcaagactcttttttcttttgagatggagttttgctcttgtcacccaggctggagtgcggtggtatgatctaggctcactgtaacttccatctcctgggttcaagcaattatcctgcctcagtctcccgagtagctgggactacatccacgcgctaccacgcccggctaatttttgtatttttagtagagacggggtttcaccatgttggcyrggctggtctcaaactcctgacctcaggtgatctgcccgtctcggcttcccaaagtgctgggattacaggtgtgaaccactgcgcccagacaagattcttaatatattttaatcaaataagcataactctaatacctaaatttgaaagaacacaagaaaaaataattatggaataacatgcttacaaaaatacatgtaaaaattcttaccaaatttgagaattaatcaaagtgtatatatatttttaaaaataatatacctttactgatctttttgtgattcatcagcatgatgattgggtcttcacacaaaagtttaagatgtgcctccctcacatcttattatcgtgtcagcatatttcctgtctgaagtaagaaaaatgaaataaaaataatatactattaccaagtagtgtatgtcacagaaatccaaagttattttagcctttagggggaaaagtttggtatcagatagatagtaaaaactattgcatttggtaaaaatcagaagccattccaagtatcaacatgataaaaagcatttataagaaaccaaactaaaggccgggtgtagtggctcacacctgtaatcccagtaytttgggaggctgaagtgggtggatcacttgagatcaggagtttgagaccagcctggccagcatggcaaaatcccgtctctactaaaaatacaaaaattagccaggcrtgatggcacatgcctgtagtcccagctactcgggaggctgaggcaggagaatcacttgaacctggggggtggargttgcttagtgagcttagattgcgccactgcactccagcctgggcaacagagtgagactctgtctcagaaacaaacaaacaaacaaacaaacaaataaataaataaaagaaaccaatctaaacttctgcttaaagacgaaatgctagagatattccagagtcagaagtcaagtaaggatgaatattttcttaggcttattcagtgttgtttgcctttactggccaagacacaaagcaagaaatgaactgtaaatatttcaaaacaaagcaaaattgcttttattcgtagataatatacatgtccacctttaaaattctagcggaaaccgggaggctgaggcgggagaaccgcttgaatcccggaggggtaggttgcggtgagccgagatcgcgccattgcactccagcctgggcaataagagccaaactccgtctcaaaagaaaaaaaaaaaaaaaaaaaaccctaaaaaaaccactgaaaatccattagattcagcaacgtgaaagaatataattataaatacagaggactctcaatactttttctattttttttctcataaaacaaaattataagggtacaaaattaccccttctcacagtagttaccaaaactatataaacaacacaattgagcttcagaaatatatgtaactcctatttgaaaacaatataaaaacttaccttacataaaatataagacctccaggcggccgggaacattggctcacgcctgtaatcccagcactttgggaggcygaggcgggyggatcacgaggtcaagagatccagaccatcctggccaacatgatgaaacccagtctctactaaaaaatacaaaaattagccgggcrtggtggacgygcctgtagtcwcagctattcaggaggctgaggcaggagaatggcttgaacccccgaggcggaggttgcagtgagccgagactscgccactgcactccagcctgggcgacagagtgagagtcccaagactccatctgaaaataaataaataagtaaataacctccatgcatggtcatgcacacctgtgtctcaactactcagggggcttaggcaggaggatcacatgagcccaggagtcttgggctgtagtgcactatagtgatggggtgtccacagtaagttcagcatcagtatggtgacctgccaggggcaggggaccatcagtttgcctaaggaggggtgaactggctcaggtcagaaaaggagcaggtcaaaattgccctgctgatcactaatgggatcgactttgtgaatagccactgtactgtagcctgggcaacatagcaagatctcrtccagcaaataaataaataaaatataatactgtaataaatggaaaattatttactattcctacacaggaatactacatagtaaaaagacaacaatttcctgaaaattaatacaaatatttaaagaaattccaataaaaattccaatatgatttttatcacttggtggaggctaacaggacgagcttgacaatttgatgttaaagtttacttagaagttaatactccaaaataacctagagatttttkttttgktttgttctgtttttaaattacctttttttttttttttgagacactgtcttgctctgtcactcaggctggartgcagtggcatgatcatggctcactgcagcctccacctctcaggctcaagcaatcctccttcagcctcctgagtagctgggagtacaggcgcatgccactatgcccagctattttttttcttattttttgtagagacagggtcttgctatgttgcccaggctggtctttaactcttgggctcaagcgatcctctcacctcggcctcccaaagtgctaggactacaggcatgagccacctcacctagcctaattatactttttgaaaaaggaactacaggaggagacttgccatagaaaatatcaagactgattacaaaattatattaggaaaggccagacatgcaaccagcactttgagaggctgaggcgggcagatcagctgaggttgggaggtcgagaccagcctggccaatgtagygaaatcccgtctctacgaaaaatacaaaaattagccaggcatggtggcacacacctataatgccagctacttgggaggctgaggcagkagaatcacttgaacccgggaggtggaggttgcactgagccgagatcataccactgcactstaacctgggcaacagagtgaaactccatctcaaaaaaaaaaaaaaatttaggaaaaaggagagggaaggtcaataagcccagcagatcaataggccagaaacaggtctttatatgtatgtcacttaatgacagggatacacctgggaaaatgtgttattaggtgattycgtcattgtgtgaacatcatagaaggtacttacacaaacctrggaggtagagcatactacccacttgggctatatagtatggcccattgctcctaggctataaacctgtacagcatatgactatgcagaacactgtaggccattataacataatgttaagtatttgtgtatctaaccatagaaaaggtacagtaaaaatacagtacaaaagatacagaatrgtacttctgcacaggacagttccattataatcttatgatcactattgtatatgtgctctatcgttaayagaaatgtcactatgtgtgtcatgactgtatatgrgaatgcctatatgagaatgtatggggaaatatatgtgagtaaagtttggtatcagataaagctggcatctcaaataaaaaaggcgaattagttaataaacggagccagatccattcataacccaagggaggtagtacaggagggtaatagtagatctctaggtatgtgtctttgacagaaacatttcaggatggtggatttaagaattaaataygaaaaaaagataacatgaaagcataaaagaaaatacaagaagacttttaaaaatatgctcagagaaaaagcctttccaaaccataaaagctggatgtgactacctaagactctctccaatgaagggcaaagtttaaaagacacatgataaactgagagaaaacttttgcagtatatgtaacagagaaagagtttaggttcataaaatataaagagatcctatgattaagaaaataaaaaacagcctaattagggaggagactagtaaaggatatgaacagacaacttacagatagaaacataagaagtcaataaatatttttgtccaggtgcggtggctcacgcctgtaatctcagcaatttgggaggccgaggcactcaaatcacgaggtcaggagttygagaccagcctgaccaacatggtgaaatcccatctctactaaaaatacaaaaattagctgggcatggtggcacgcgtctgtaatytcagctactcgggaggctgaggcaggagaatygcttgaacccgggaagcggaggttgcaggagctgagattgcgccactgcactctagcctgggggacagagtgagactctgtctcaaaaataaaataaaataaaataaaataatcatttaggccaggcgtggtggctcatggctgtaatcccagcactttgggaggccgaggcgggcggatcacdaggtcaggagatcgagaccatcctggctaacacagtgaaaccccgtcyctactaaaaatayaaaaaattagccaggcgtggtggcgggcacctgtagtcccagacacttgggaagctgaggcaggagaatggtgtgaacctgggaggcggagcttgcggtgagccgagatcgtgccactgcactccagcctgggtaacaaagtgagactccatctcaaaaacaaacaaacaaacaaaaatttaaatatatatatttagacatatatataaagatagacaaatatacatcaaataattgacaataattcttgggagactttctctttctacattatatatttctgtattttaattttatataacttacattgaattgtctttatatttagagacaacatttcttaaacacatagtaggaaaacggaataaacctaataattctaaaattttcttcaaatttgggttggagctaatctgttgcataggttattagttctatatggtatattttctatatagctgtaatatacacatagctatttagaaactatggagtgatattcaaagtcaattctttatttaaggggagaaaaatgaagacactctatagtttatcttaataaggttaatatctaaatctcccaatgtcaacaattataattacaatatataaattttcctctttattttgtatgttgttatcttcaaattcaaaacttccaggccgggcgtggtggctcacgcctgtaatctcaacactttgggaggcccaggcgggcagaacacttgagatcaggagtttgagaccagactggccaacttggcaaaaacctgtctccactaaaaatacaaaaattagccggacatggtggcacacacctgtaatctcagctattcgggaggctgaggcaggagaatcccttgaacccgggaggcggaggttgtagtgagctgagatcacaccacagcactccagcccgggcgacagagggaaactctattagaaaaaaaaaacttccaagaacacatttccatgtagattcccttctaatatagtatttacagtaagatacttaagtctaagtacagacttgcaaatctgtggaggaatcataaacatttatcagctaycttgagagtggataaaattgcattttactaacagcaacagagtcaaagagcgtgcagtgaaggtagtgtacacaaatattgaacaaggaggttataaattacaaaacattccagtcatattagagatttttctcataaaatgtgatgtttgtttttcaagcaagatgactgaaatggaacaactctatttatttgatgatttctccaggtggatgatgcygaagaacctgacaaaacaggggagaataaagcacccagtaagttccagtccgtgggagtgcaagtagaagaagagaagtggtaagtccacatgcacgcatcctcttttgtcttgatgttttgaagtaaggtaaaagcatttttccccgtgataagtctacaaaattcaatgatattttcctctaagttttgggagtatttaaagggtgaagttgaatcaatattagttgattctctcctgtactttaatactagacaccactccatttgagttttgtttgaatagtactgtaagcatattacatacatataaatactgtgtgcagtactcttgggttgccaaactatacctctgaaaacaaaaaaaataagagaccttcccatatgagacagtgcactttttatgagaagagaacttaccttatttctatttctattcccaacacttaatagtgtctggtgtttagtgtgtgctcaatgaatgatgaatgaatgaatgatgaatgaatgaatgaatgaatgaatgaaaaagaagatattccctgtcattatcctgaatcaccagtccttcagattactctttacctactttagagccttagtatctataaatgggaaatgtakgatttcataaaattacagaatttggggtcaataatttcatgttgtaaatgagaatctgatggagagaggcatgtgaatttctcaaactgggagtttcttggtgggtagaaccatgttttattgctagtagtacccccagcttccagcattgtgatttgcacatactaaatatacagcaaatgttggctgaataaagtaaaactggagttacggtgagagaaactactctaaattataaatcagtgtatcatctcaactttgctactaactttcagtgtgttaattaggaagaatcatttgaatgtcacctatccatccttccattatccatccattcaataaaatctatggaatgcctcctataatcaaggctacatgtaacgtaaactgaaaatctgaaaaggaggaatttatcagtttatggaaatggtcctgttttagaacctctcactattgattgacactatacttttaagaggtgtgtatatatatcatatacatatagttaatatatttattaataaattctatgtgtgtatatgtaatatatatatatagtgtgtgtgtgtgtataatatggcaaaaacctcaattacttttgcaccaacctgatataattatgcaatgctggaagcccagaaaactggtacgatcattctggaaacaaatatgacaaaagttagcaatagttacacatctatccgtaccaattgacccaaaaatcacactcttggggcttgagttaaattactcaatgaaaggtaaacaattgtgaaacattatttatcattgtaaaagaaaaacactaattatcaaataaccmataatagcatgcttttgtaatttatagcacctcaccaaggtaaactattatacagctattaaatatcatttatttaaaaaggtggagaaacatggggaaattcccatgatacaatgttaggtgaaaaactttaatatataatatccacrcatagtgttcatgcagatggacaaggactgaaatgtaatacgtacaaatggtaggtttaggagtgacttttttcttttactctgaaaagttttagtaatcatttttttttgtttgtttgttttttgtgtgtgktttttttgagacagagtctcactctgtcgcccaggctggggtgcagtggtgcaatttcggctcactgcaacctccgcctcctgggttcaagcggttctcctgactcagcctcccgagtggctgggactacaggcacggaccatcacgcccagctaatttttgtatttttaagagagacggggtttcaccatgttggccaggatggtttcgatcatcttgaccttgtgatccacccgccttggcttcccaaagtgctgggattacaggcgtgagccaccgcgctgggccggtaatcattgctttaatgtcctaggcatatgtttctttattaagtgttttagaaaaatttttgaaagtatacatttagtagacattaaagaaaatatattcctggacatgggcaatggctcacgcctgtaatcccagcagtctgggaggccgaggcaggtggatcacctgaggtaaggagttcaagaccagcctgaccaacatggtgaaacccgtctctactaaaaaattacaaaaattagctgtgcgtggtggtgggttcctgtaatcccaggaactcgggaggctgaggcaggacaatccctttaacccaggaggcagagattgcagtgagccaagatgaygccattgcgctccagcctgggtggcagagcagactctgtcttaaaaagaaaaagaaaatatattcctccatctcccaccagcccagcttggtgccttttctcaacgatgtagtggttgacagcacagactcttgagccagaacaccaaatcctggctgtgccccttactaactgaggggccataagcaaattactacccatctttgtgccttagtttccttatatgtaaaaagggggttacaagcagtttccactataagctaaaaggaactcggaagtcaccactccatcttagcaagtaaaaatctcaacaaactaaaaaatcaacatctctttgtatatctcttagagaagggaggtcacagggcacactgcttctcccaaaattggaaaaacagacagatacagagacttacaacttactggagtagaaacacaagtagaaatctctgcaggaaccagcacagggtaagaaaacgtaagcagtaactgaagaattgttggaggctcaatattgacaactctgagagttaaaagctccaaggaaacccagtcatagggagagctcacacttttgtgagttttacctccaggaactctaccaggtcctcaaagtgaatatcagagaaaaaaaatctccttgtgcttccagaaaggggaaggaaaaaataactactttgaaatatgccagcactttctcttcttattcacagggcctgcacgcagcagaaactattttaccagaaccttttgctggctggggttttatcagagcctagaacctacctgggggaaggaaaacactcagctctagtttcctctagccttccacatgggggaagggacatacccaacctcagcccccttcaggcaccttatcccacgtaagagaaaaaaataaaaacaactgagaaacactgatgaagttcacagaccaggagcacaggctcaccaaaaggctgagactaatcatagaactgtagagcacttttccctcacacacaccttaccagtacattactaaatgccaatttaccacagttcctttcacccagtacatcatgcccacttttcaaaaaattacgaggcatactaaaaggtaaaaaacacagtttgaagagatggaacaagcatcagaaccagagtcaaatatggcaggaatgttggaattaccgggccaagatttttttctaattatgattaatatgctaagggctctaatgaaagaagcagaacatgtagagagatggagaatgaaaaagagttctaagagagatttaaaaagaaatgctggagataaaaaacactctaatagaaacaaagaatatctttgatgggctcactagtaaactggacactaatgtctaaacttgaggatataacaatagaaacttccaaaactgaaaagcaaagagaaagaagactgataaaaagccagatcagctgggcacggtggctcatgcctgtaatcccagcactttgggaggccaaggtgggcggatcaccrgagctcaggagttcaagaccagcctggccaacatggagaaaccccatctctactaaaaataaaaaattagccgggtatggtggtgcatgcctgtaatcccagctacttgggaggatgaggtaggagaattgcttgaacttgggaggcggaggttgtggtgagccragatcgtgccactgcactccagcctgggcaacaagagcgaaattccgtctcaaaaaaaaaaccaaaaaaacaaaaaaaagccataacagattatctgagaacagtgagacagctacaacaggtgtaactttacatgagagaggaatacaagaaggagaggatggagaaaggaacagaagcaatattagaagcaataataacagaattcccccaaattaatgtcagacacctcagattcaggaagctcagagaataccaaacaagataaatgccaaaacaaacaaacacaaaccaaaaaactacacctaagcatatcatattcaaacttcagaaaaataagactttaaaaatcttgaaaaaagtgagagggaaagaacatcttacctatagaggagcaaagataagaactaggccgggttcagtggctcacatctgtaatccctgaattttgggaggctgaggtgggtggatcacttcagcccaggagttcaagaccaacctgggcaatatggcaaaatcccatctctacaaaaaatacaaaaagttatctggctgtggtgcatgcctgtggtcccagttactcagtaggctgaggtggaaagattgcttgagcttgggaagtggaggttatagcgagctgagatcacaccactgcattccagcctcagcgacagagagagaccgtgtctcaaaaataaacaaacagaacaaacaaacaaaaaagataaaagataagagttatatctggccaggcacagtggctcattcctgtaatcccaacactttcggagacacagcgagacttagtctcaaaaaaaaaaaaaattaaccaggcgtggtggcgcgtgtctgtaatcccagctacttgggargctgaggcaggakaatcacttgaacccaggaggtggaagctgcagtgagccgagatcrcgccactgcactsmagcctgggtgacagartgagactccmtctaaaaaaaaaaaaaaaaaaaaaaaagggagagaagagggcttctgcagggaaattcccatttttaaagccatcagatctcatgagacccactcgttatcatgagaacagcatgggaaagacccacccccatgattcaatcacctcctgccaggttcctcccacaacgggtgggaattgtgggagttacaattcaagatgagatttgagtggggacacacaaaaccatatcagttgcccaggatggacttgaactcctggccctaagcaatccttccaccacagccacttgggtaactgtggccacacagatataattattattattattattttttgagacggagtttttgctcttgttgcccaggctggagtgcaatggcatgatttcggctcactacaacctctgcctcctgggttcaagcaattctcctgcctcagtctcctgagtagctgggattacaggtgcccgccaccacgccttgctaatttttatatttttagtagagacagggtttcaccatgttggccaggctggtctcaaactcctgaccttatgatcttcccgcctcggcctcccaaagtgctgggattacagacgtgagccacagtgcccggttaccctcttctcctgtctgccaccatgtgacatgtgcttttcaccttatgccatgattgtggggcctccccagccacatggaactgtaagtcccataaacctctttcttttgtaaattgcgcagtatcaggtatgtctttatcagcagcgttaaaacggactaatagcaacatagcgaggcttagtcactataaaaacactcaaaaacgaaaaaaattgaaagaagtatatccaacttctcggaaaccatgcaagaacagagtgaaatatttaaagtattaggagaataaaaaaccaaaaacacccatctagaattttgtaccctgtgaaattatccgtaaaagtgaaagaaaaataaagactatttcagataaacaaaaattgagggaatttgttgccagcagaccttcaagaaatgttaagaagttcttctgagagaaggaaaatgacataggtcagaaactaaaataaaaactttcatttttctgttttttttttttttttttttttggagatggagtcttgctctgtcgcccaggaaggagtatagtggcaggatcttggctcactgcaacctccacctcccaggttcaagcgatactcctgcctcagcctcctgagtagttaggattacaggcacctgccacatctggctattttttgtttgtttttttttttttgttttttttttttagtagagacggtgtttcaccatgttgaacaggctggtctcaaactcctaatctctggtgatccgcccacctcagcctcccaaagtgctgaaattataggcgtgggccagtgtgcccagctcatttttctcattcgtaattgatctaacagataagtttgttcaaaatagcaattgcaaaaatgtatttaaatacatgtacatttatttatttatgtataagtgaaatgaatggcagcaatgatacaaggaataagtggtaggaattggaaatatttaattattacaaagtacttgcaaaacctgtgaagtgtcacagtgttatatgaaagtggattggattcgtggtaaatacataatgcaaactctagggtaaccactacaaagaggtaaaagagaagtaaaattagtatgctaagaaagaaaagaaaattcaatcacataaatgctcaatggaaaattattaacagcagaaaaaatgtgaaatacaaaaataagaagaaagagcaaaggcaaaaaaatagaaagtagtaacaaatatggtagatgttaatccgactagataaataatcaacttaacccttttcccatttagaaaaaaatgtgcagcttgctgccagtgctcatttaattttacataaacatgctttttttttttttttttttgagactgagtcttgctctgtcrcccaggctggagtgcagtggcacaatattggctcaccacaacctctgcctcccgggttcaagcaattctcctgcatcagcctcccgagtggctgggattacaggcccacgccaccacacctggctaattttttttttttttttttttttgagacggagtctcgctctgtcrcccaggctggagtgcagtgrcgcgatctcagctcactgcwacctccgcctcccaggttcaagtgattctcctgcctcagcctaccgagtagctgggattacaggcacayaccaccacacccagctaatttttgtaattttagtagagacggggtttcactgtgctggccaggatggtcttgatctcctgacctcgtgatccggtcatctcaccctcccaaagtgctgggattacaggcrtgagccactgcgcctggcccatttttctcattcttaactgatctaacagataagtttgttcaaaatactaatagcaaaaatgtatttaaatatatgtacatttacttactcatgtataaatgaaatgaatggcagcaatgatacaaggaacaagtggtaggaattggaaattattaattattacaaagtactcgcaaaacctgtgaagtgtcatagtgttatatgaaagtggattggggcctggagcagtggctcatgcctgtaatcccagcactttgggaggccgaggcaggtggatcacgaggtcaggagttcaagaccagcctagacaatatggtgaaaccccgtatctattaaaaatacaaaaattagctgggcacggtggcacttgcctatagtcccagctactcgggaggctgagggagaagaatcacttgaacccaggaggcagaggttgcagtgagctgagatcgtgccactgcaccccagcctgggcgacagaacgagactccgcaaaaaaaaaaaaaaaaaagtggattggattcgtggtaaatgcataatgcaaactctagggctctagggtaaccactaaaaagaggtaaaagaaaaataaaattagtatgctaagaaaggagagaaaattcaatcatataaatgctcaatagaaaactattaaaagcagaaaaaatgtgaaagacaaaaataagaagaaagaacaaaggtgaaaaaatagaaaataataacaaatatggtagatgttaatccaactagataatcagtttaacccttttcccatttagaaaaaatgtgcagctggctgtcagcgctcatttaattttacataaacacactccttgaggccgaagcaaatatgactgattttcaatgtgaaaataaaatgtaaaaactgttcttcgagttatttctaaacagaactaacatcagaatcatctgaatcatcagaatcatctatttcagaaaaattggattcatcaratgaatctyggccacaactctttgaggacaatgttaacatcacgtgtaggaatgctacgttttctaggatttgccattttcagcaatggagaattactatattttctaaatggaaataccactgctaagaccagaatgctataaataggatgatgtytttgtttccaaagtcaatatactagagcaatgtgaaaataataataaaacaaaatattttgtggcaaagttatcttgggttaaaggctgtagctgcaggtgccaccagcaagtattctcagggcaaataggaacagggttaaacattagtattttacatatatcattaaaagacagagattgtcagagtrgataagaaaacaagacttaactatatgttgtctacaagaaacccactttaaatataaagacagatatagattgaaaagtaaaggaatggaaaaagagaaaatgtctagcactaataaaaagaaagtgggagtagaaatattaatctcagacagagcagacttcagagcaaagaaaattatcagggataaagatgatgataaaggggtcaattctcaaagaagacataaaaatctttaacatgtatgcacctaccaacagagtttcaaaatacatgaattctagctgggcccggtggctaatacctgtaatcctagcactttgggaggccaaggtgggcggatcwcttgaggtcaggagttcaagaycagcctggccaacatggtgaaaccccatctctactaaaaatacaaaaaatagccgggtgttatagcacgtgcctgtggttccagctactcgggaggctgaggcaggagagtcacttgaatccaggaggtggatgttacagtgagccaagagcgcttcagcctgggtgacagagtgagactcagtctcaaaacaaacaaacaaacaaacaaaaactacaaaatacatgagttcttgaactgatagaactgcaaggagaaaaagatgtatctactattataattggagacttcaacaattctctatcagaaatggacaggtcaagaaggcaraacatcagtaagcacacagttgaatgcaacaacactaytgaacagctaaatatagttaacttctataaactacttcatccaacaacaacagattacacattcttctcaagctcatatggaacattcacctagatagggcagaacatattctgggtcataaaacagatcttaaccatttttttttttttgtgagacgaagtctcactcttgtcccccaggctggagtgcaatggtgtgatcttggctcactgcaacctctgcctcctgggttcaagcagctcttttgcctcagcctyccgagtagctgtgattayaggcacccgccaccacgccaggctgatttttgtatttttagtagagacagggtttcaccacgttggccaggctggtcatgaacaaatttttaaaattataaatcatatcatatctgctctcaggccacagtagaattaaactagaaatcaacaacagaaggatagctggaaattcccaaaatactgagatttaacagcacactttaaattacaaatgagtcaaataaatctcaagaaactaaatattttgaaataaatggaaatacaacttttttttcttttgagacgaaatctcactctgtcacccaggctggagtgcagtggtgygatctcrgcccactgcaacctccgcctcccaagttcaagcgattctcctgcctcagtctcccgagtagatgggactacaagggcacgccaccacacccagctaatttttatatttttttagtagagacggagtttcaccayattggccaggctggtgtcaaactcctgaccttgtgatccaccmacstcagcctcccaaagtgctgggattacaggcgtgagccaccgcacccggcagaaatacaacttattaaaatttatggaatgaggcaaaagcagtggttagagggacagttatagcattgattgcatgtattagaaaagaagaacaatttcacatcaattatttaagcytccaccataggacactagaaaaagaagagcaaattaaatccaaaataaacacaataaaagaaataaataaaattataacagaaatcatgaaattgaaaatagtaatcagtagagaaaaatcaacaaaaccaaaacctgactctgaaaaaattaataaaatgataagcctttaactaggctaactaagagagaagacacaaattactcttataatatcagacatgagcaatccatatgccttggcctcccaacgtgttgagattagaggcatgaacyaccttgcctaatcaacagtttcttacaaaactaaatatattctttaccatacaastcagcaattttgtttcttggaatttatccacatgaattgaaaacttatgttcactcaaaatcctgcacgtggttatttataacacctgtatttctaatcacccaaacttggaaccaaccaagttgtcctttagtaggtcaatggataaataaactgtggtgcatacagataatagaatattattcagcactaaaagtaataagctattgagccacaaaaagacatgggaaaaacgtcaacgtattattactaagtgaaacaagccaatctgaaaaatctatatactgtatgattccaactatgtgacaccctggaaaggcaacgagacagtaaaaagatgactagttgccaggggttaggaggaaggaggtatgaataggctgaggatgtctggggcagtgaaacgattctgaatgtataatgcaacggtggatacgagaatgtacaacaccaagagtaaccctactgtaaaccatggactttgggggtgataatgacagccagtgtaggttcctgaactgcaccaaaagtgccactctagtgtgaaatgtggatatnagttgaggctgtgtgtgtgtcgggggaaggggtgtatgggagttcyctactttgtgctcaattttgctgtgagcctaaaactgttctaaaaaaacaaagtttattaattttaaaaaggggttggaggaaagcggactatagcattaacctcagtgtgttgtcctggggtgttttgtttaatacatgtaaaacttttagagcaatacctgatatatacaatgctctgcgtgtttcctagtctattaagsactcaaatagaatctctctaaagaaagaagtttcaagataataattatgctgccttttcttcaaaaaaaaggaggagaaagtcgtctcctttactttacttcaaacatttctcctgcaatcagccagtctatctttccaggtttttaaatttatttgtttatttatttattttttttgagacggagtttcgctcctgttgcccaggctagagtccaatggtgtgatcttggctcactgcaacctcygyctcctgggttcaagcgattctcctgcctcagcctcctaagtagctaggattataggcacacgccactacacccggctaattttgtatttttagtagagayggggtttcaccatgttggtcaggctggtctcgaactcctgacttcagatgatccgcccgcctcggcctcccaragtgctgggattacagacgtgagccactgcccccggcctcaaatttcatttccacaataatgctaaatattgcattgtttggtcatacctagtagcaacctaaaaaactttatacgagccatttttatcattwttttttaaagttgaactttatttgaattattgaagtttgtagaatggtcagttcctcagtaaactgagtaaaatatttaaaactcatccccaaaacggttggcaggccaattttagtacttagctttccaaaacatacccttcttcaaaggtcactttatagttaaccactgtaaagtaaataagcattgaaattgatgttaatgattgttttcaacctctccaaaagaaatccattgtcaaacaggaagaagggattaccaataccttctgtctctaacttaattcttttatgattttgctggttgtaattcatttagataggatcttaaaaagcaatatcgggcagatgggattacttaatgacagctgaggggtattttttttttaattatctggtgataaaggtgaggctgttgttttcacactgaatggccagttaacaacttatctcttcctttttcaaataaacagactgataaaagacagcaacctaacaaaaagtgagaaaaagaaagaaaattgagctgagaaagagatagtgcaaagaaatgattaaaagaccttgtaagaggccaagggactcatttccttttgaatcaattataatttaggaacaaaaactaacccagcaaggcccacctaactgattgatctattaaggagtagacttctaaatttagtgtggttttcagtgttccaaatcaaaacaaaaagaagttaaaaactcattagtaaaaactaaaatgcaccaggtagccctatctgcttcaataacaggagttgaaatggagcatcacaaatatccctgttacatttgcaggccaccatgacattctcaaaatgccatggatcgcaaatgcacattgtccattctctggggctgcctcgcggtgaggaccgtggacagaggaatgctgtctgaagatcactagtttaaatgccgtggcagcaggaagccagggataatgaatgcgtatgtcgttttgaaaggagactgctcctctcaagccagtgcagaaacccatcatcttcatcaaacattagctgttttcccccaattcctgtttcacaggtcagctagtggtaccgctctataggacacacatagcatgtgtttgctgatatgcaggactgatcctaagtaaagcaggcaaatcttggcaacatctccccaaggggcactcacctccgccagtggccccatgcagaagtctccagcatcatgtcccaattgtctctcatccttttgatggtccccaggaatttgtatgaggtccttttgtctttcaggctgataattagcaaatctagtaagccaatcctttctgttgacttaggtgagaaagctaagaggttcccaggaatctcccatttccttccaaataacaattctattttaacagtggcttcaaactagactttcttacattagcccattagtgactctaagactccagcagtggacacaaagaggaagaatattactgttttcattacaaaagtagtatgcaaatttacttggaagaaaacatatcttaacatattaacagtttttaattttgataggctttggagtaattttttaaaaaactatgtgtgggccgggcgtggtggctcacgcttgtaatcccagcacattgggggaccgaggtgggtggatcacctgaggtcaagaatttgagaccagcctggccaacatggtgaaaccctgtctctactaaaaatacaaaaattagccaggcatgatggcgcacatctgtaatcccagctactcgggaggctgaggcaggagaactgcttgaacccggaagacggaggttgcagtgaactgagatcacgcaattgcactccatcctgggcgacagagtgagactctgtctcaaacaaacaaacaaaaaacaaaaaaactatgtgtgtatgtatcttctttttacgtattatctaccttttccacagkaattacatattattgaacaatgcaattaatgataagaaaaacaaagtagtatttacattgtaaaaatgtataaattacagaaataaaataaagtcgcccataatcctatccattaaccatgaacaaataaataagtatatttttacccacactttttccacgaacatttaaagagttggtggaataatcctatgtatagtcttacaacatctttaaaatcaacaaacattatttaaaaagttttctttttactattgaaaattcatagcaaacacctcttttaatgaatgcacmatactcaaattcataggaggaccataatttctgcccctttctccttctgccggattatcaacattacttttagatgatttctgtttaaagatggtgaaaaaaaaggatacacatgtatcttggaggccttctgaaactaaatgacmataaaaggaatttttgtttgttttggcattaactcccwaggaggaagagaacaagagagaaaaaaaaaacagcaaaatttagcaagctagaaagcagatatggaagtgacaaccgatttggcagaccagagaaagctgaatcgaaagccagtagtgcaggaatccaagatgtaatcccatttaaatttaagaacccacaaaatgcatgtggatgggtggcattgggcgctctgaaagcggggatgaagatggagctaaaaagtccttgaatctgcggagccaagtgacagtccttccttaccctgacagagactgagggtgtctcttcttcagaggctaaaactaagggtctctggcctggaggagaccagcatagttgagagcagggtgactatactgaaaataggaggattaagtgaagatatacaaacagtgttgaggcacactgccctgagccttcttaggctcgctcagcccccagggtcccgacagcaaggcacagaaccctctacatggcagtgtggcagagtccattgtggagggctgacccttctgagcccaaagaccagaagatgctgacatccgggattttgcaagatgaaagcccagccagatcaccctacagtgaggattagagaggataagctcttcccaaaagcatagacttctaagctgggtttagtgtgcttctcaagaatgagaagacaaggatcagcaaactcagggagataagacmagagccagaaaactagaaacmaaaattgttcaggaacattcagaaaattaaaaagttatttttgagagaaaagagaggaaaggtgagtaaagaagcatccatgagggatgtggaagttgtcaaggtcttcctcaaagaatcttcttatccacctggaagagatgagggaaggggcagaagtgaaaagtgctcttgctaggagtggtagctcatgcctaatcccaggtctttaggaggccaaggcaggaggaytgcttgggcccaggagttcaagaccagtctaggcaacatagtgagaccctctatctacaaaaaataaaaagaaagaaaaaaaaaaacaatttaaaaataaattagccaagtgtgatggcggctgcctgtagtcccagctacttgggaggctgaggtgggaggatcccttgagcctaggaggcagagggtgcagtgagctgagattgtgccactgcactccagcctgggtatcagagtgagaccctgtctcaaaagaaagaaaaaaaggaaggaaagaaggaaggaaggaaggaaggaaggaaggaaggaaggaaggaaggaagggagggagggagggagggagggagggagggagggagggaggggagggaaaagaaagaaggaaagagacaaagagagagagaaaggaaggaaagaaagaaagaaaaagaaagaaagaaagaaaaagaaaaagaaagaaagaaaagaaaagtgttcatagaaataatagtggaactgtggctgggcatagtggtacacacctgtaatcccagcactttgggaagccaggagggcagatcacctgaggtcagaagttcaagaccagtctggccaacatggtgaaaccttgtctctactaaaaatacaaaaattagctggtcatgatggtgggcacctgtaatcccagctactcaggagcctgaggcaggggaatcgtggaacctgggaggtggaggttgcagtgaggcaagaccaccactacattccagcctgggtgtcagagcaagacttcgtttacaaaaaaagaaaaaaagaaatagtagcagaactgaaaaattcaaaaggacttggaagataaatttcagaaaaaaagcatttatatgtatgtgtatatatatatatatatatgtatataatattagtcagtttgggctgccataacaaaatacaacaaactgatgtcctaaacaacagaaatttattttctcccagtttggaggctagaggcataagtctggttctggtgggctggacgtggtggctcacgcctgtaatcccagcactttgggaggcctaggtggtggatcacctgaggtcaggagtttgagaccagcctggccaacatggtgaaaccctgtctctactaaaaatacmaaaattagccaggcgtggtggtgggcccctgtaatcctagctactcggaagactgaggcagtagaatcacttgagcccaggaggcagaagttgtagtgagctgagattgagccactgcactccagcctgggcgacagagtgagactctgtcttacaaaaaaaaaaaaaaaaaaaaaaagggtctggttctggatcaagatgtcagcagtgttgatttctcatgtggtctctctccctggcttgcaaatggccatcttctccctgtgtcttcatgtcgtctctcctctgtgtgtgtctgtgtcctaatctcctgtttttataaggacaccagtcatactggattagagcccacccttggggcctcaatcacctgtttaaaggccctaaggccaggtgcagtggttcacacctgtaatcccaactcttagggaggctgaggcaggatgattgcttgagtctaggagttccagaccagcctaagcaaaatagccagaccctctctcttaaaaaataaaaaaaattagctgggcgtggtggcatgtgcctgtagtcccagctactcgggaggctgaggtaggaggatggcttgagctcaggaagttgaggctgcagtgagccgtgattgtgccactgcactgcagcctaggtgacacagtgataccctgtctcaaataaaaatacaaattaaaaataaaggctctggccgggcgtggtggctcacgcctgtaactccagcactttgggaggccgaggcaggtrgatcmcraggtcaggagttcgagaccrgcctggccaacatggtgaaaccccgtctctactaaaaatacaaaaattagccgggcatggtggcatgcacctgtagtctcagctacttgggaggatgaggcaggaaaatcgcttgaacccgaaaggtggaggttgtggtgagccaagatygtgccactgcactccagcctgggcaacagagcgagactccatcttaaaaataagtaaataaataataaataaattaattaattaaataaaggtcctatctccaaatacagtcacatactaagatactaggtgttaggacttcaacatatgaatttagggaaggggcccacaatttggcctgtaacacatattcagttgtgaatgatatttcctggtcataacaatatagtcataaaaaacaagttctgaatatagttatccaaattaataatacagctatatcaggggaatggaaaaatacagggacagaccggaagtgcatgtatgtgtgtgtgtaagaaaaagaggccaggggtggtggctcacgcctgtgatcccaaaactttgggaggccgaggcgggtggatcacgaggtcaggatttcgagatcagcctgaccaacacgctgaaaccctgtctctactaaaaatacaaaaattagctgggtgtggtgacacgtgcctgtaatcccagctactcaggaggctgaggcaggagaatcccttgaacctgggaggcggaggttgcagtgagccgagatygcgccactgcactccrgcctgggcaacagagtgagactccttttcaaaaaaaaaaaaagagagagagagaaagtgaggaataggagtgttggaaaggtgagagaaatctaaatcttcagcattcctaaggacagacactaaaaaatgtgtaaagatttatttttgttatttagaaatagtgtttaaaagtggctgcctctgaagtagaaaattgctctataattgggccaggcatttctatttttcataaccagccttttagaaccatttgatattttaaaactgtgcatatataactgtgataaaatttcctgaaatgaaataatccagacatttaaaaaatattcttttttcttcgagatggagtctcgccctgtcgcccgggctggagtgtgcagtggcgcaatcttggcttactgccacctcccactcccaggttcaagcaattcccctgcctcagcctcccaagtagctgggattacaggcatgtgccagcacacccagctaatttttgtatttttagtagagagggggtttcgccatgtttgccaggctagtctcaaacctctgggctcaagcaatccacctgtctccacctccaaaagtgctggaattacaggcctgaaccactgcacctggcctagtgcaatgttgagtagaagtcatgaatatggacatcyttgccttgttactgatcttagrtgaaaatatgtagtttttcacctttaagtatgatgtgcagtggcgcgatccgaggtgtaccaccacgcccagctaatttttgtattttttgtagaaacggggtttcaccatgttgcacaggctgagcttgaactcctcagctaaaagcaatccacacccccctcagtctcccaaagtgctggattatgggcatgagccactgtgcccggctagctttaggttttttttttttttcttttkatagatgcctttttatttacttgaggaagttcctttcttttcctagtttgttgaggattatgatcaggaacagatgttggattttgtcaaatgcttctttgacatctattgagatgttaaaaaatttttcatttttagactgttaatatgatgaattgaattgctgatttttttttagaaaaattatactaagatacatataacacaaaatttaccatttaaaccattttaaggtatacaattcagtggcattaactacatttacaacattgtacaaccatcatcacgacttagttccaaaatattttgatcatcaccaacagaaatctcatacccattagtactcactgcattcctttctcctcccagtctctgtaactgctaatcggtttgctgtctctatggacttgcctcttctagatatttcttataaatkgaatcatacaatatgtggccttttgtgtgtagcctccttcatttagtgtgatgcttttgaggttcatccatgttgtagcatgtgttagtacttaattcctttttatgagtgaataatatccaattgcctagatataccacattttgtttattcattcatctgtttatggatatttgggtttttaaaaatctttcatctatttatccatcatgaatagagctgctatgaacattcatgtacaagtctttgaacatctgttttaaattctttttgatatatacctaagaatagaattactagttaatataggaattcgttccacagtggctgcaccgttttaccatccccaccaacaatgtatgagggttccagtttctccacaaactggccaacacttactttcctctttaaatttttttcccttatggctatcctaktgggtatgaartgrcatgtcattgtggtgtggatctatatatctgtaatgactaatgatgttgattgtcttttcatgtctctattggccatttttatctctttggagaaatgtcttgtcatgtcgtatgcctattttttaattgggttatttaattgggttgtttgtctttttgttgttgagtgttttaagagttctttatacattctggatactagatccttattaatatatgatttggaaacattttctcccattcttttttttttttttttttttttgagacggagtctcrctctrytgcccaggctggagtgcagtggcgcgatctcggcttgctgcaggctccgcccccgggggttcamgccattctcctgcctcagcctcccgmgtagctgggactaccggcgcccgccaccwcgcctggctaattttttgtatttttagtagagacggggtttcaccctgttagccaggmtggtctcgatctcctgacctcgtgatccacctgccwcggcctcycaaagtgctgggattacaggcrtgagccaccgcgcccrgctctcatttctgatattggtaawawgtgtccyttttttytttttatctgtctgctaaaagattatcaattttattagcttttgaaaagaaccagctttttatttctttattcttctgtatagtttttctgtttactccttcattgatttctgcttttatcttataatttcctttattctgtttaccttgagctgcattcgctcttctatttttagtttaaggtggaagctgagcattgatttgaaaccttaattctttttgactaatggtgtctactgctttaactatrtcctacmaattttgatacattgttttttctttttcattcggtttgaaatactttctattttcctttttgattttttttttctttaacccatgggctacttagaagtgtgttacctagtctccaaaaatttgaggattttccaaatattttttagctattgtctatttaattccattgtggtcagacaacatactttttcttgaacccttgaaaatttatcgaaacttgttttttgggccaaaatatagtctatcttgttaaatgctctgtgtgtactaggaaaaaaaatgtgtactttgcttttttttttttttttgagacaaggtttggcactgtcaccaaggctggagtgcagtggctctatcttggctcactgcaacctcttcctccctggtctcaagggatcctcccacctcagtctccggtgtagctgggactacaggtgcatgccaccatgctcgactaatttttgtagcgaaggcgtttcaccatgttgcccagactggtytcaaactcctgggctcagacaacctgcttgcctcagcttcccaactgctgaggttacaggcgtgagccaccaagcctggcctgtttttcagtggagtgctctataaatgccaataaggtcagtatagctgctgaattcttctatattctctaattttctgtctagatgttttttaatctattatcgagaaagtattgttgaaatatctgactctaattgtgaatttgtctatttcttctagtagttctatcagtgcttgctttatgtattaagaaattctttattaaactcataaatgtttaggaatattatggtcttttgatgaattgatctctttatcattagaaaacatcctgtttcctacctggtaatatttttggatctcaaacctacctagtctgatattaagacaaccaatccagctttcttttcattagtattaccatgtatcttttttcatccttttactttaaactatttacgtctctatttttatttattttagtttagtttagtttttgtaattttagtagagacagagtttcaccatgttggccaggctggtctcgaactcctggcctcaagtgatctgcccacctcagcttcccaaagtgctgagattataggtataagccacggctcccggcctatttatttctctatttttaaagtaggtttttcataggcaatatatagttggtttcgctttttatttcaatcttacaacctcttcctttaaattggagtgattagaccatttacatttaatgtgactgactgttgatatgtttgggtttaagtatgccgtattgtatttattattcatatctcttcctatttttcatcttttgatgaaatacttggaaaagtatgaagtatttgaaaaatacttctttggggctaattatctttctatgattccatttcttttttttttctttttgttttggagacggggttttgctctgtcacccaggctgcagtgcagtggygtgatctcggctcactgcagcctccacctcctgggtttgactgattctcctgccttggcctccagagtagctgggattataggcatctgccaccactcctggctaatttttatattattagtagagacagagtttcaccgtgttggccaggccagattggtctcgaactcctgacttcaagtgatctgcccacctcggcctcccaaaatgctgggattacaggcatgagccactgtgcctggcctccatttatttttttaatggagaaattaaaatgactttattgttgtatatatacaaaatagaatttaatagagggcaaaatttattgaactgtatacactgcacctgtagtctcagctacacaggaggttgaggtaggaggatcccttgagaccagggaggcagaggttgcagtgagctgagatggagccactgcattccagcmtaagcgacagtgccagaccttgtctcaaaaataaataaataaataaataaataaataaataaaagcaaagtacacatttttttttccaagtacacacagagcatttaacaagatagacwatattttggcccaaaaaacaagtttcaataaattttcaagggttcaggaaaaagtacgttgtctgaccacaatggaattaaatagaaatcaatagctaaaatatatttggaaaatccccaaatttttggagactaggtaacacacttctaagtagcccatgggttaaagaaaaaaatcaaaagggaaaatagaaagtattttaaacctttcttatagggcatgactgctggcgatgaatactttcagcttctttttatttatttatttatttttctgagatggagtctcgctttttcgcccatgctggagtgcagtggcacaatctcagctcaccacaacytccacctcccggattcaagcaatctcrcgcctcagcctcccaagtacctgggactgcaagcacatgccaccacacctggctaagatttgtgtttttagtagagacaggtttcgccatgttggccaggctggtcttgaattcctgacctcaggtgatccacccacctcagcctccccgggtgttgggattacaggcgtgagccaccgtgcccggcctactttcagcttctgtgtatataaaaaagtccttattttgtcttcatttaaaaaagatatttttgccacatacagcactctagattaatggctatgtttttgtttgtttgtttgtttgttttctaaagaggaataaagatatcccagtcttggatagtcatgcattgaacagtacttaggtgaatatgctattgggacccgtgcagatctcagaccttcactctgtgcagttctctcctcttccatacrctgccatgcaaattccagctgccttgtcctcctcgtacccctagcaatgtctcattagtcagggagactgccgactccccatggggaccactccctggaaactcgctccagtcagtcaaaggccccatttgtttcccatatctcagtgatcactgttcttcattgtctgatatcaaatgtcttggaaacagttgtttcatatattttgccaggtttttagttgtttcagataatatagtaagttcagtcattcttactccatcattgccatgcacagaagtcgtccatataggttttatctggcctatatgtaagtaaggcaagccctgttatttagcactactctctggctttgaaggtcttggaatgtattggaaaaatattggagtcatggggccggatgaggtggctcacacctgtaatcccagcactttgggaggccgaggtgggtggatcacgaggtcaggagatcgagaccatcctggctaacagggtgaaaccccgtctaaaaatacaaaaaaatagccaggcgtggtggtgggcgcctgtagtcccatctaagggggaggctgaggcaggagaatggcgtgaacgcgggaggcggagcttgcagtgagccgagatcacaccactccactccagcctgggtgacaaagcgagactccgtctcaaaaaaaaaaactggagtcatgggaacaaaagagtattctagtttagagatccagattgaaagtcgctttacctctctgtctctaaaatttgggagttgactactattaacaacaataacattttttggtgtaagttctctgattcaacaccatcagtgtttcctcaactttagggttgtgttacatatagatagagactcctagttgaagtttaggacctatgtcctggattttgcctttctgcttattactatagttcccaggtagctatattgctgtcataatctccacttcagaaacaagagataagtgtgaataagtgtgtggtacaggttctggcttcctgcctccattccaactcggctacgtttcctaaagtgagatatttctgatgtaatttgtaataatttataaagcaatcatcgcccatcttcacaactgaaagtgttaaggggaggcagaaactttgcaattgtatactccttagttccttactgacagtgtcaaactgacaagtgacaactgtcattcttgggggtatgcaaagaagctactggtctcataacaatgttctggaaagcgaattccaggatgttatttttctggtgtatgtwtacttaatattttcatctgtgcctttacaaatgatttatccactgtctgaaatctttagagatcatccaagtggaattcagtgttgctgcgagaactcttttccttcagcatccagaaaatcagaagagaacacttttcctagaaaaagggatggcaaactactctgtggcctctttttctgcctcatcaactctccagccttatcaatttttaataaacaggtgaaattgactaatagtgaatgtctagagcaagctttgtgtgttcagaggtgtgtatacctaaagggaaagccaggatcttttcatttacrtcagtggggtggaaatgggagcagatgcgtattttgatgatttgcataaaagtttctgctctttctgatcttctgttggtggagcaacctccttctctcctagtataccttttatacattacacataacatttagacctccaggacatacttaatgtgaaagagaaaaaatgctggcattaaatatgcctgtgaatggcacctaccattccagtagatctgtgaatgcacagactgagtcagaggtgttgaaggaaagccccggtgacatattatgagagccactcctcgtctctagaaacaaatgcctcagtgaataggactgttaccccyttttttttttccaccaatattgcctctgtttccatttgcatttccagaagtgacccaattctgagtttttaaaatcttcctkgcttcacacatcaaagctcacagccttcgtaactgggtggaacaagcaagtggaaaggtagcattgttttctcttatagcacaatgtcagctactataaaagatctcttttgatcgcaagggacttaaatatgtaaactttagggcttgtagtgatttgtgccttttcaactaagcaggatattaaaacataaagccaaaattgaggcaacatctgacagccagttcagggaccacagacttggaaagacctttggcaatcaaaaaacattgcttctttgtcaacccaggagctttggatcagtccccactcttcaaagtttccttggagtacctcacagcccagtacccacccttgaaattgcacttgaaaagtaatctcttttctttgccaagttaacaatatcatgacctagccaaatagttccttactgtacacctgagttttaaaggcgtggcattcaggcgtttcaaatttcaaaagcctgaaacttggcataactcctgataagcctcacagcttccttttttcttttcttttccttttctttcccttcttctttctttctgccatccctccctccttctctttctctctctctttcttcctttttatgtatttttcaaaataacttagtgtgcagaaagaaaaccatcggacttacaagcctacagcctccatttgacaagactcagtaaaacataattgttagtgagactgctcatgctttgttagttacctcgggtcagtagccaaggagtgacctaaccttccagttgcggaggtaaagcagttccttctgggggcacattcagttcaaggatgttttgttgagactcctaaccagggttcctatagtgacagcccatcaaaggtattagcacctgcccagctggtgctaaaaagaggctggcagcatgctgggccctctcagaagttaccagatgacaacacgtccactctcattattttctatttcctccctttattttatttgagaaaaacatcacaattatttggggtagagaaaatttttttatagaaagcctatcctattttcctttactttaaagacatcttcaagcatgatgtatttaagcaaaggaatgatgaacatagaggatttgaaataacagatggatgtttgtcttgagatagttttaaaatctggtgataggacagtgctaaccgtatataaatggagggtaggagggttcctcccacctgaatttttgcacaagggatgcttatgcctgcgccctcccatgcatgattctaatttggaagctgatccaaattagtaaacctaagtaaacctcttttgggggagcttgaatttttttttttttttttttttttttttttgacacagggcctcactctgttgcccaaactggagtgcagtggtgcaatctcggcttactgcagcctctgcctcccgggttcttcaagccattctcgtgccttagcctcccgagtagctgggactatagccacgtaccaccatgtcaggctaatttttgtatttttagtggagacgggattttgccatgttgcccaggctggtctcgaactcctggcctcaagtgatctgcccgccttggcttcccgaagtgctgggactacagacgtgagccactgcacccagccaagcttgaattcttgatctcggtctcctcacgcccgtgccttattttgatctgtcttttattttatgtaatgagacatcttggtttttacatcagtgaaagggtgccatttcataaaataccaagatggttgcactttctaggagtagcatttcagatcccacatatattcagccttgacagaaggcttagtttaaaatgtctaaaggcatgtacaaagaaagaaagaatagcagagtgctagcattgctctctttgaaactggacttagccttgaaaagcagccattatgtgaatgagagggataaagacgctaagcagaggccaggggattctatgatggaaagactaagctactctcctaaaaataagttcatgacttgagtctcatcagttgagtgtcttgtagttccaaagcatggatgtcataaagataatgactgtgcttagtttttgtgcacaatttcttttgtttaactgcaactctatcagacagggggacaagaatggaacctcttcagtttacccatatatgttttgatttgtaacttgctgtacagaaaagttgtaggaagtgggagagggtagaaactcctctagttagaaatataaacttgtttcatagaaggaacataaagcaacagcagaagtgaatgctaacaagtgactttcttctggctattcagaacagacagagtattgtgttccatactggttgatccagtctttgctttcatggttttctgcttcttgggccagaatattggccagcatttttcagaagttgtaattattacacactgtgcctgcaggggcatgaagagccaaggaagcttcaagattgaaaactgtgggttgggaaacagcaagccactgggttcagcttttgggttgatatcatcaacgaggaactgatcaattctttcaaaaaataaagaaattaatctagggacctcattttgtgttcctatcaaaattgcagaaaaacaataacaacttgactgcactcttcacccaaaaggaactttgcttatgaaagacataaatcattttgtagagcagaacattctttgaaagctctgagtagaagaaagcacttgcttaaggaacttaattgatagaaactagcaggttggacagggctgcctgagttcaaaggcgccgcttttaatcccaaaccattttaattttacttaacttttctttctgagtgactacactgcaaactgcaaacttctattaatctactgccaagtaatttttctaagaaggtggatcctttgcaagatccatagccaggagatggctgttaggaatgcgggtagtacagttctgtgtagataaaaacagaggcacaggaaagtaggtcattctgttttatatgtggaacagattctggctgtggcagtttgstctgattgaaaacaatgagggactagtacttctttaagtttggaaatgtaatgcctctggcaatacaggatcttggagcgtggaggctaatgttttcatagttgggatttcatgttagcagaacagccaaaatgtcaactgtttgcaaggagagtcatccaattcacacatatgcagctggagagaaagcttagcttcagatgacagttaacattttggggatgaacgggaagaatgcagaaatagcctactgcagccaagaaatgagtggttgttggaagaaccactttcgcaaaattgttctttctttcattgctagcacaagagacttgtaacattgcattcagattttcacactatgtgattttttttttctttttctttcttttttttttttggctcatttgagagttaagagcttacaaaagtgactgggttggataacttcatcagaattgattttttgaaaacagcaaatgggtcaactttggctagtttatcttcgtaaaatggatggccagaatcacaacgtatttggtcattttggccatcttaataactgacacagatcaataccttagccactttttttcttgacttttattctctagagaaaaaattgatttattgagatgactcttcctttttgtgactcttagtctttctacagtcttgcaaataactacttgtctgtattgttctggtcattctttatttttgatggactagaatattagtttttattggcttcaagagcatagtccaggatagttttttaaaatcccacataatctggtgtatttagtgttgtataaatattgtttagtgcactattgtttaaggctggcactactgaatatgaaacagttgaaaatcaactggccaacaaactatcttaaaatggcacaatcatgagctactcaaagaaatgtaccacctcacacattcaaaaacacagaaatcacagaacacacattctgtcaaaaaacagaaaataacaaatgttgatgagaatgtggagaaataggaatcctggtgcactgttgatgggaatgcaaaatggtgtagccactatggaaaatattagggttgttcctcaaaaaattaaaaacagaattaccatgtgactcagtagttctacctcgggatatatattcaaaataattgaaatcagtgactcaaagagttatctgtatacccatgttcatagcagcattattcacaatagccaaaaggtgaaagcaacttaagtggccatcagtggaagaacgggtaagcaaaatatggtaaatacatacaatgggaatactattcagccttaaaaaggaaggaaattctgacatatgttacaacatggatgaaactttgaagatgttctgttgaatttaaaaagccagtcacaaaaagacaaataaatactacatgattccaccaataagaggtacctagagtagtcagactcatagacacagaaagtggaatgatggctgcctggggccagggggaggaggaaatggagagttagcatttcatgggtgcacagtttcagttggaaaagatgagaaagttgacatggatggtggcgatggttgcacatgcaatgtgaatatattaagtattgaatgccattgaactgtacatttaataatggttcagctggtaaattgtatgttatgtatattttatcataataaaaaataagtaaactattaggccaggaagcgactttaaaaaaaaaagacatacagggcatcgtaacagacacatggtgctatcttcagtggacttatattccgtcattgtttcctgtcttctccagaggcagcaaagctctttttgtatgtcttaaatgacatcaggcccacgccttccttgcccctcatctgagaaagagttccttgcttctctcctcgtgtctctcccctcccaccttccccatgttctccccttcatcgcagggttcagccagagatatatagggcgctttggttgagaaacactgatctcatggacatccatgtaaaatgctcagccttaatctgtgaacaaggtgtctttcatcacctcgctagaactgtgaaaagaaaattaaaggcacaggagagggcagaaatacagaaccctaatagagaactataagctgatgtttgcgcccaaggctttgtacctgtatgactaagagaaaggtaaacctttaccaggcaaatgagttttaattttaagaggtaattattgaaacctcagtttgggctgggtgtgttggctcacaccttgtaatcccagcactttgggaggcagaggcaggcagatcacctgaggtcaggagttcgagaccagcctggccaacttggcaaaaccccgactctactaaaaatacaaaaattagatgggcatggtggtgcatgcctgtactcccagctattcgggaggctgaggcaggagaattgcttgaacccaggaggtggcaggttgcagtgagttgaggttgtgccactgcactccagcctgggcaacagagcaagactctgtctcagaaaaaaaaaaaaaaaagaaagaaagtaagaaaggaaagaaagaaagaaggaaggaaggaaggaaagaaagaaagaaacttacttcagtttgctttcaggaagtcttaacttggtaagagttgcccctggaaaaatgtggctttgcaggattcatgatagttttggtccaggttaggttatgtttttcccatttcttttcttttctttctttttttgagacagagttgcccaggctggagtgcaatggcatgatctcagttcaccacaacctccgtttcctggattcaagcgattctcctgcctcagcctcctgagtagctgggattacaggcatgygccaccacrcccagctaattttttttgtatttttagtagagacgggattattccatgttggtcaggctggtctcgaactcccgacctcagatgatctgccygcctcggcctcccaaagtgctgggattacaagcgtgagccactgcgcacggcctttcttcccatttctttttttcttttcttcttttttttttttgagacrgaatctcactctgtcacccaggctagagtgcagtggtgcratctcagctcactgcaagctccgcctcccgggttcatgccattctcctgcctcagcctcccaagtagctgggaccacaggtgcccaccaccacgccygactaatgttttatattttttggtagatacggggtttcaccgtgttagccaggagggtctcgatcccctgaccttgtgatccgcccgcctcagcctcccaaagtgctgggattacrggygtgagccaccacgcccggccctttttccctatttctaagcaaattaccccgactaagatagtagtgaatagtttccttactcatcaccaacctgaatttcaggacttaagtcaccccagatttggggaggaagttggacacttcaggtaatggatgacagagctgcacattctactggctttaatagttcagcacttttccacctataaaatttctcttgatatgctttaatattccatattgagcaaaaatgagattcgtgctcttcacattgaagctatgacaatcaatatgcttgcctcaagggtctacccctgccaccaccacccccaacacacacacacacacacacacacacacacacacacacacagagaagattgagaagatgagacttctaatggtcacacctgccaagtaaagtagaaagtagttttgcttcaagawatatccttgccaggcacggtggctcacacctgtaatcccagcactttgggaggcagaggcaggcagatcacttgaggccagtagttcgagacccacctgttcaacacagtgaaaccccttctctactaaaaatacaaaaattaaccagatgtggtggcatacacctgtaatctcagctactcgggaggctgaggtgggagaatcgcttgaacctgggaggtggaggttgctgtgagccgagatcacgccacttgcactccagcctgggagacagagtgagactctgtcaaaaaaaaaaaaaaaagaaagaaaggaaggaaggaaggaaggaaggaaagaaagaaatatcctctaactaaatttcttttttctattctcccaagcttccgcaggttcactcgatccaacagtgtgacgacagcagtacaggccgacctggacttccatgataatctggaaaattctctggaatctatagaggacaattcgtgtcctggccccatggccagacagttctcccgcgatgccagcacctccacagtcagcattcagggctcaggaaaccattaccatgcctgtgccgccgatgatgactttgacacggattttgacccctctattctgcctcctccggacccctggattgactctatcactgaagaccctctggaggcygtgcaaaggtcagtgtgccaccgggatggccactggttcytgaagcttctccaggcagagcgagaccgcatggaggggtggtgtcaacagatggagcrggaagaacgggaaaacaacctgcccgaagacagtaagtaatgccaccaygtgccacacccgtcccctggggctggggttgctttgtgtgtgcagaccttgttgttttcttctctgccagcttcacttgtataaccttgacgttccacaccccaaaccagaacatgcaggagagctaggtgattccagctgagtccagaagtccctgcacagcacaaaaccaagaaaactcctgggtagatataacactgtccttagctctaggcccatgacgttctttttctttctgaaaataccaagctctgtgtggaggtgctttcatgtctctaacttggtccctcttctccaagatgatcctggaatgttgctgatcctcaggggattgaaaataattctaatcaaaacatctcatgtatcctatgaatatatacatctactatatacccacaaaaattctttttaaataaaaaaagaaaataattctaactagcccagtgcagtggtgcccacctgtagtcccagctcttcgagagactgaggtggaaggatcacttgagtccaggggttagaggctgcagtgagctatgatcacaccactgcactccagcctgggtgacagagcaagaacccatctctaaaaataaatatataaataatactaacttttttcaaggtccatagatacaggtacattggggatttatattctttatgattttgttattctcattaacatacagcattaaaacaaggcttataacgtataggccgctagaaacccccacctatttgtattcttaagcctgtttgacaggcactttctcttaggatttacaggggcaaaccctttagctgccaaagaaacacattttataatcttattacagttgaatgggctaaagtgaaatacacgatgaatacataaaataaataatggacactctttttcgcacactattcttttctttcttttttcagacagggcctcactcctcacccaagttggagtggcgcaatcatggctcaccccagccttgacctcccaagtagttgggactacaggcatgcaccccatgygcagctgatttttgtatttttggtagagacggggtttcgccatgttgcccaggctggtctcaaactactgaactcaggcaatccgcccacctcggcctcccaaagcgctgggattacaggcatgagccaccgtgcctagcctgcacactattattttcaaacttgaccttttaacatttgaaaaagaaaaattaacaattgaaaaagaaaaattgtcaaattatattaacagttgaaaaagaaaaataatcaaattacctcaattctgaggcatgttttacatgttttcaacaattctgaaattagaatgtagcttatatataatcagtatgtattttaatgttgtatgtttattttcctctgaaacattattattaaattaatggtggatcctccmactgatgatatttttgaaacaaggaaatttggtggtaggcattaatgcctgcttcatgtctgtgtgcaaagcatctaaaagagtattgctatgaagtaactttttagacttgttttttaaattactttttcaatttttattatgagctttttctttttttttcttttttttttttgagatggagttttggtcttgttgcccaggctggagtgcaatggtgccatcttggctcaccgcaacgtctgcctccagggttcaagtgattctcctgcctcagcctccaggtagctgggattacaggcatgtgccaccacacccagctactttggtatttttagtagagacggggtttcaccatgttggtcaggctggtcttgaactcctgagctcaggtgatccacccgcctcggcctcccaaagtgctgggattacaggcataagccactgtgcccggcctattatgaacatttttaaacatgcacaaaagtagagtttaacatgatgagtccccatgtactcgtcacctgcttcaacaactggccagtcttgtctccaccatttgtagttattgttgtcagagtatttttaagaaaatccagcaccaggtgtggtggctcatacctgtaatcccagcactttgggaggccaaggcaggaggatcgcttgaggtcaggagttcaagaccagcatagccaatatggtgaaacaccatttctattaaaaatacaaaaattagccaggtgcaatggcacacgcctgtaatcccagctacttaggaggctgaggcaggagaattgcttaaacccagaggcagaggttgcggcaagctgagactgtgccactgcactctagcctaggcaacagagtgaaactctgtctccaaaaaaagaaaaaaagaaaatccaaggcatcgtgtcacttccctatgtagctcacacttatagaaaacattttttatatgtataatcataggccttgtgcggtggctcatgcctataatcctagcactttgggaggctgaggcgggtagatcacttgaggtcaggagttctagaccagcctggccaacatggtaaaaccccatctctcgtaaaaatacaaaaattagtcgggtgtggagattggcccctgtgatcccagctactcgggaggctgaggcagagaatggcttgaacccgtgagattgagtttgcggtgaacagagatcgcagctactgcactccagcctgggtgacagagtgagactccgactcaaaaaaaggtaaaatattatcatgcattatcgtacgtaacaaaaacaataattttttttttaaaagacagagtcttgctcttgtcacccaggctggagtgcaatggcctgattttggctcactgcaacctctgtctcctgggttcaagtgattctcctgcctcagcctcctgagtagytrggattacaggcacctgccaccatgccyagctaatttttgtatttttagtagagacggggtttcaccatgttggccagtctggtcttgaactcctgacctcaggtgatccacccgtctcggcctcccaaagtgctgagattacaggggtgagccacagcgcccggccaataatttcttaattagatttaacatctactataaatcatgttaagtgcatttactaaatgcaccaaactagtggtgtcaaagagtagtgagtttttccctaggggaatcatttttttaatgaaatggagtctggaaaataacagttgtcatcagactggggatatcttcactgtgtccactctctcactcacagctccagtctgctcctcctgcctgacccctgtcaaatgactgactagcttatcgcttgcctttatgggcaagttaggaaattcattaacgggtttctgtaaaacccataaatgggtttcctttgcttcttcatattatgagtgcaaacaacttggcagtggaaaagtaaatctccttgacatttgcccctgttagtgccactgcagactcacctgagtgttgacccccaagcacaattaggtctttgccctggtgacaggtaaacaaggtatgtctcagcagcagtgggagcaggggtagttttcagtaagaaagtcttagttggatcatcttattcacttttctccttgtggacatactcacagtttatcagattttcctaggaaaaatgccagcaactaaggaacaatgacatcccgtgccactgctcaatggcacaaactttcagatttcaattctcaaatttggttctccttctagcttcctgattggtgttctctctctctctttctttctttttcttccctcctttctttggttttcttttctttcttttggcagagtcttgccctgtgacccaggctggagtgcagtgatgggatcatagctcactgtagcctggacgtcctgggcccaagtgatcctcccacctcagcctcatgaggagctgtcactacaggtgtgcaccaccatgcctggctartttttaaaaaattttatagagatagattctcactgtgttgcccaggctgatctcaaactcctggcctcaagcaatccccccacttctgcctcccaaaatgccagaattacaggcatgagccacccacccagctcctggctggctttcaacaggactcttggaaactacttatctgttgttttcttttaatgggcctttcagtctgagacttgatctacctctctcaacccaactctataatgatgtgtgaggatactcattgtataaagatttaggaaaaactaaaggagctaggaaaacaagtcagttgtattgtaatacaataacatatatttgaaaggttgaaaatcttgtcagaaaaccagcttctcagcctatgttcaggatgaaagagaaacgtatttgtattttgaaatgtacactgctggcaaagtcccaagataatgaacatgagggaactgcccaaccatctgttgttccaggcctaatttgttgttcaagctgaactgggtatcgccctggtgctcctgtaatgccctgtgtatttgtccttcaggtacttcccacattattttataataaccratgtatctttctcttccactaaaaagtaagctttctgaaaacagaaattattcttgtcttactcatcttcatatcaccagaccctctgacgcataacaggggatcagtaaatatgtatttgagtccttgaaatattctggaaattctgttttataaaagtattttacttagcaaaacctttcttcctaattagctaaaaaaaaacttcaataagtaatacctcagtcctttcaggctgctataacaaaataccctagactgggtaatttataaacaatagaaatttattgctcacagttctggaggctgggaagttcaagattaagatactggcaggtttggtgtctggcaagggctgctctctgtttcaaagatggcgccttcttgctgcagcctcacgatggaggcagcagacaagcttcctgggcctccttgataagcgtagtaaccctattcatgaggactctgcccctgtgaccaactcacctcctataggccccctgtcttactatttatacattggtaattaggtttcaacatatgagttttagaggagcacagacattcagaccatagcaagtaactaacagttcttgttgccaaaagctggaaaggtgttcccgtgacagatgatgagctcttctgatcaggacaaggatgtggaagagagagatgggcacctgccacagaagtgatggaaagcacttccgtgtgggacaggtggctagtccagatgaaccttgtgtgtcctgtctcattcttaagacacagttccattccacaaacacttgaaggctttctctattttttcatactttgagmgacacgaaataggagcttcaaactactgggattccaaaattctagtcagtgcmgtggcaaaccctgcgcccaggacagagtcaccaatttcaaatgcggccaatccagatcagggagaattggaccataaagcagtagcaaccctctccaggaagaagggaaaatatcagtgcatgaaagaatattcatcttgccctcacaatacccctgacgatggcctagagactttgacaggtgctgttttatttgccctcacaacagttctctggcagtatcttgtccaaggtcacagaaaacagaagtgtctgatagaacagatacacatgaataacatttgacaagataatgatactttgygttgcctggcactgtcctccttaaagcccgccatgcagatctgtccctgactccttggcaagcaccactctgttctgataactgggcctagagttgcagagggcctttgtttcaccaattctctgacttaaccttttctttttttgtaagaggggcggtaaggaagagaggccaatcccacttggcaggcatagccaaattctaagcaaccagcttttgtttgttttaattctgtgcacaccagaaaaatagcttcgataaatgggtcaagtacagatacctctatcccttggccaagccaagggatgtttcagacctgcagaaggagggcctctcttcagggtgcctgacaaacgtggtgccataacaaaatccccccaggagatctggtcttgaagtcatcatgaaaagataaataggatagagggaaaaaacggaagattctaatcacgcaatttattttgtggggtaccagaattatcccaatttttaaatattttaaaatgtttggtgaatgtacataatgcctccgaatggtacacttcactgtggttaaaatggcaaatcttatgtctattttatcacaattttaaaatacccccactgggcgtggtggctcctgcctgtaatcccagaactttgggaggccatgccatgaggatcgcttgagcccaggagtccaagattggcctgggcaacagagaccctatctctacaaaaatatatatttttttaattaggcaggcttggtggcatgcacctgtggtcccagctactcatgaggctgaggtgagagcattgyttgagcccaggaggtcgaggctacagtgagccgtgatcgtgccactgcactccagcctgggagacagagggagactctgtctcaaacaaacaaaaaacaacaaacacaaaacaaaacaaaaaaaactaaaaaaacaaaaactcagaaataggcagcagcagctaaagataagcagaacaaccatgttcatgttcatattcatgtaagaatgtattttgttaawtgactccctgaattcaaaatacagtgcatccatggcaaaaaaaaaaaaaaaaaaaamagtttggaaaataacctgtttactcactggaaatttgaggttcagatattgcatgtggggtagttgtaatcatctttctctattagagagttgaagaagaaagagtctatctaattttaaatagttatttagttattaattattttgtgatgtcattatgctaattgtgacagctgcttttggcctcacagggctggaaaacaccttcctagttcacctgaaactgactaaatgtgggtaacaaaaggcagaccgaaaacaagyatttrgagtagccaggagcctcaagctatcttttgaacagtgtaactatacattctttgggtgcctggagttactgttttccctgataaatgcaaagcagagcaaagactttagttcttgttttaaaccttcaaccccaaccgtcgacagtacctttttttttttggcttgataataaaataatgaaactgcagtgagtgaggtttcctccaagccaagacagctgacagaatgcttgttcccgcagcacttgaagtaaaatgatacgagctcttctcagacaatgaagcccttgtgtgaaacagctgtctcagggagatggctcagtgctatttgacagtggcttgtatgttacatagatacgtctggtattatctaaccggggatgamacgaccagatggagctgaatgcctccaactaggaatgcagtctaccactgtggggaaagaacataggctcaggtttcaatggccctaagatgaaataccggtgatkgtacttctaaatctgtctttgccttctgaattgtagacaacaaatacgtggaattttcaggctttatctgaaacaaactgataaacctagagcatgtgccggaggcagattaattcttccactttaattttgcctggtaatagcatccaagctagtgaaacttggccttcagtcccctagaaggcttgggacccttggcagcgaatgcggggctggtaatgacacctgaaatggggtttgcctggtttcaggtttggttacggaaactgtgcacagtcattgtgatggtctatcggtgccatcacccagggtttatccgcctgggattgcctctgctgtgtctctgcggcctgtgaaacagtgggtggcagacaaagctgtatctgtgagttctgcaattcatctgcctccagcccgtgtgtgtttctaagtggggagcaatggctgcattctagcctagctcctttctgttttattctcatctaactcttgcaatgaaccctcaaaaggtccctcccactccaccacacacacagacacacatacttgcatgtctctttttgtaagctccagacaacctgaaattagtgaccgcagaggaagtggcagtaatgaaaaggaaatcggctgtaatgtgccatatgtttaaccttgagaatgctccattcatgccgctttgcacagcgctggtgccagaaggccattagacaccatccttttgtggatgtgcttcttgagggtgstgtctcccagctcaggagggcacgaaagcatgaagaggtgaagtgatgtggttaattgggggcagaactgggcctggaaacagatctgttcctaggccagtggtgtttctgtcattccagagatggcaaagaragggactggctcacggagcaagacctcctatcattttctccaataactgtttctgtgaaatataaatgcaatggactggtggggcgcagtggctcatgcctataatcccagcactttgggaggccgaggcaggcagatcacgaggtcaggagttggagaccagcctggccaacatggttgaaactccgtctctactaaaaatacaaaaattagctgggcttggtggtgcatgcatgtaatcccagctactcgggaggctgaggaaggagaactgcttgaacccaggaggtggaggttgcagtgagccgagatcacgccactgcactccagcctgggtgacagagcaaaactccatgtcgaaaataaattaaaaaataaatgcaataaatgcaatggacttcaaataaaatatacagtttttttcatttagattacctagggaaatagaaactaatttcatttcatccaactttcaaaggctcaaaactgtctttatctatatgatgtatatgatgctaccatttcgtggctgatataagtcaagatattgatccmaagaatgaccatcttctacgagtaaggctcctggaggggttggaactgggraaaaaaaawtaaaattagctgagtttttgaaaaacttgctctttaaaaacmaaataatgttgttgatttttttttttttcccccagaacactgtggaaactctggtgttagtctatgggaaaacttctactagagaatccattctttattcattagccaccaagtttcagctaaaaacaaaacaaaacaaaaaaagcactgttgtgcaatgcagatcagcaactgccagtcaggaatgaaacagatccacgttttctatggagacgttttgttgatggcagctccggatcacaagtgtgtctgagaagcagctgctgggcagtaggttggggaaatttttgccgcaaggacacactcgtaaatgagaatgtctccacatggataatcccaatgccatgaaatcacacagactcagaatgacaaatccacatgactttcatttatttatttattgagacagggtctcacaatgttacccagtctggtcttgaactcctaggttcaagcgatctgcctgcctcagccactcaaagtgctgggattataggcaagagccactgtgcctacctgactcgatatttttgaaataaattttgtgtatatttgaggtttatatgctattgaatacagatagaaagtaagttggtgactattatgaagcaaattaacatatctgtcatctcacatagttactttttttgtgaaagagcagctaaagtctacttattccacaagacgccctaatacaagataattttacttagcataaggtcctccagtccatctatgttgtggcaaatggcaggagctccttcttttttagggctgaataatattcactatatatatgtggtatatatataccacaatttctttctttcttttttttttaattgaaacaaggtctcactttgtcaccaaggctggagtgcagtggtgtgatgatagcttactgcagacttaactgcccaggctcaatcagttctcccacctcagtctcctgagtagctgggaccacagatgtgtgccatcagacccaactaattttttaaaaattcttatttgtggatacaagatctcactatgttgcctgggctggtcttgaacacctgggctcaaacattcttcctgccttggcctccaaaaatgctgggattacagagaagagcaaatgcacctggcctgttgttatgtttccyttagagaaatgtctgttcagatcttttgcccatttttgtttcttctggktttgtttgtttkkttttkktttgtcttgttcaaaccctgtgtcaaggacctttgccctccttttttttttttttgagacaragtcttgctctgtcgcccaggctggagtgcagtggcgctatctcagctcactgcaagctccgccttctgagttcacmccattctcctgcctcagcctcccagtgtagctgggactacgggcgcacgccaccacgcctggctaattttttgtatttttagtagagacggggtttcaccrtgttagccaggatggtctcgatctcctgacctcgtgatscgccctccttggcctcccaaagtgctgggattacaggcgtgagccaccgcacctggtcggacctttgcccatttttaaattgagttttttggggttagttgctttcttgctattgagttgtaagagttcttcattaattttggatttatagtctgcaaaccttattggttatgtggtttgcaaatattttttcccgggttgtaggatgcctttttatttttattttttttaatttttttttttctttgagatggagccttgctctgttgcccaggctggagtgcggtagtgtgatcttggctcactgcaaactctgcctcccaggttcaagtgattctcctgcctcagcctcctgagtagctgggattacaggcatgcaccaccatgcccggctaaatttktttgtattttttagtagagacggagtttcaccatgttggccaggctggtcttgaactgctgacctcaagtgatccacctacctcagcgtcccaaagtgctgggattacaggcgtgagccactgtgcctggcctttttattttgctgagtgtttcctttgataacaggagctttttcattttacacartctcatttatttatttttgcttttgtagcctgatcttttgttgtgatatccaaaacattattgccaaggctaatgttgaggaacctttcccttccgttttcttctgggagttgtgtggtttctggtcctacacttaggctatccttttcccattgtatcctcttggtgcccttgtcaaaaattagttgactgcagctgggtgcagtggtttacacctataatcccagctctttggaaggccgaggtgggcagatcatctgaggtcatgggtttgagaccaamctggccaacatggtgaaaccccgtctctactaaaaatacaaaaaatagccaggagtggtggtgggcccctatagtcccagctacttgggaagctgaggtgggagaattgcctgaacccggaaggcggaggttgcagttagccgagattgggccacttcactgcagcctgggcgacagaatgaggtytccmaaaaaaaaaaaaaaaaagagttgactgcacgtgtctttaaagtaagtggatagacccacttttaaaattccctttctctttcttcacccctaaagtctacaacattgggggaaaaagctaggtgggaggccgagtacagcggctcacacctgtaatcccagcactttgagaggctgaggtgggcagatcacttgaggtcaggactttgagaccagcctgaccaagatggtgaaaccccgtctctactaaaaatacaaaaattagctgggcgtggtggcacgcgcatgtaatcccagctactcgggaggctgaggcaggagaatcrcttgaayccgggaggcggaggttgcagtgagccgacatggtactattgcactccagcctgggcaacaagcgtgaaactctgtctaaaaaaaaaaaaaaaaaaaagcaagaaagaaaaaggcaagtgggtaaaaaaaaaaaggcaaaacttgaatataaggaratataattcatcatccacaaacacaactcaacttatcctagatggtgtgacttttccaggctagtcactrcaactattgcatgacaaacagcaatgcaagaggaataataccccagctaagactatatcagctaattagtcaacactataattaaaaagtggtgctagacatgataaaaccctaaagaattagaatgctcaaggatcagaatatcacaggtagtttgtttttctggttgatatagaatctgtaaataactcagttaatttcaaagcatattccttcagtggagataataggagttagttacatgggcacagtctaggccatcaaagagctcacattctggtcggaaatctgacatattaacrgaacatgttgaaaagaatgaggaaaaggcagagacagctatgcaggggaattttaggagcagtgaggagggagaggtgaaaggaggtaaggctttctggcaaggtgcacccaagctgaatcataaggatgaggactttgctagatacagggagaggggcttgcctagggcaccaaagggaagagacagtctcagcttagtgcttggtgtgaagaagacactcaggagagaaagaccttgggggatttgggaagccgtgggcgcttggagcaccgaaggagtcagcagagagaaactggacagcttggcctgcacctgccctgctgaagggggctggggcttatcatatggagcaggggaaccaaggaaaagttgtcagcatgagaattacatgagataagaaaaccctatagttcccttaatgaaacccaatctccaagattggcaagggatggataacatttacactatggatggattgatcaagccttgtacccctaattgtaatcaacaagggaatcctgaggggaacacagatttggggagacaggaggtgttgagctagtggttacacatgctcctctaaagcgtctggggtcagtacacagtggagtcacaaattcgagaaagtggaatgagggaagtgagtggagaagtgagctcrggattacattttgtgttcaacatttacaaggtggagtgagagaaattctaccaagcacagggaaggcagaatcggggaagggcagagtcagccagagagcgttgttgggagacccaggggatctgagtttcctctgtgccaaaggcagagtccagaaggtgaagagggtggaggcagctgggctgcagggagtggagacaatggagagcagaagaaatacgagagcgaaggcatgctgccctttggagaatggggatttaaagggaatgtaataatttgcyaaggctgccataataaagtacccatggaacaggtcacttaaacaggagaaattaattttctcacagttttggaggctggaagttcgagatcaaggggctggtttcccctcaggtcgctctccttggcttgcagtccaccaccctttccctgattctcccctctgtgtgtgtgtctgtgttctcatctccagttcttataaggacatcagtcgtagtggattagggcccatgagaatgacctcattgtaatttaatcacctctttaagaacgttatctccagagtcacattctgaggtactggaggttaggaattctacatgtaaattttaggaaaatgcaattcagcgaataacagggggagaagaggaattttatgttagctggaggggaccatgaggttgggaggagttgccccacttagaatgggaaagacttgaggatgctgccagacatctcaggtaaggcactggcagaaggagttcggagagagggagtggctcacacagcaaggcctcagggtagcagggagagaatcagaccaaggacacacgtagatgggaatagtgggtgtagagaagacactagggtgggggcagaaaggtttagggaattggtgggggaagagtattaagagacacagaacattaagactatttgtctttgtttgtttgtgttgctccaacaaaataccaaagactgggtaatttttttttwaattttactttaagttctgggrtacatgtgctgaacgtgcaggtttgttacataggtgaacatgtgccagggtggtttgccacacctatcaacctgtcatctaggttttaagccccacatgctttaggtatttgtcctaatgctcaagactgggtaatttttaaayaatacaaatttacttctcattactctagttgcggagaaatccaagatcaaggtgccagcaggttgtgtgtctggtgagggctgctctctgcttccaagatgaggcctgttgctgcatcctccagaggggacaaaccctgtgtccttgcatggcagtagggtcagaagggcaagaggcggtcccttcaaccttgagtcctttaataaaggcactaacckcattcaggacagccgagctctcatgacttaatcacctccyaatgccccaccgcttattgttattgccttggggattcagtttcaacatatattttggaggagacactatcatccaaatcacagcagtgttcatgcctgattccctccattttcatctcataggaggcaaggttgttgaagatgagggaataggggttgagttgagaatggataagattcaggaaattagagttagagagrgaggtaaccaaayacattgcaaaggactaacgggcagcagtgaaggatcagccaagtttggggaccattggtttatggtgtcatcaagtcacatggctaagcacaatctggaaaatacgatgggactatagctgtacaggctagtggggtttatctgccatcatctctgtacctgaaggtggaccttgttttgccatagaagctgccattcttaaggtgggctctgacccttcgttttgcagtgagtctgttttccgagcaaggctctgattgaatgtccagtgtgctttaaggtcctgtctcctctgtgtgtctgtcacccagcagccagttggccactgttctagctctgatggctgggggaaactgtgctagattatacagagaggcactaaaatctgagcccctgaaaaattgttatggatttcttatactcataaaaaaagaaattattcaccaatcagtgacacttgtgaaaatctgcctgaattaaagtcagcaaaaaaggacatcaaattagtccacactactggggagggaggttggagtgtgaagatttgcaggagaaatcatgtccttttttggatactgccaccttttaggtaaatgcccaagaactaaagaatgtagatcagttataggagttagaattcctactgmattctcacgtttacctatattattccattaagtaatcagcaatgctatggagatgatattatggccattaaaggaaaaagagtctgagtctgatcaactttcccaagatcaatagctggtaattggtgagctgattgttcctgaccccacacctacactttttcccacacacaggtgtacctcattttattggcattgctttattgcactttgaagacactgcttttttttttttaaacaaattgaaggtttgtggcaaccctgagttgaccaagtctaccagcaccatcttttcaaaagcatatgctcattttctgtttttgtgtcagactttggtaattctcacaatatttcaagtgttttcattattattctatctgctatggtgatttgtgatcagtgatccttgatgttactattgtaattgttttggagctccatgaaccgtgcccatataagactgtgaacttaatcaataaatggtgtttatgttctgactgctccaccgacctgccattcccatctctctccctctcctcaggccttcctatgccttgagtcacaataatattcaaattaggccaattaataacccaataatggcctctatgtgttcaaatgaagagttacaatctgtcacttttaatcaaaagcaataaatgattaagcttagttaggaaggcatgtcaaaagtcaaaataagccagaagctaggctttttgtgccagatagccaagttgtgaatacaaaggaaaacttcttgaaggaaatgaaaagtgctacccaagtgaacatacaaatgataaggaagcgaaacagcctttttgttgatatggatgaagtttgagtggtctgragagaagaacaaaccaggcacaacattcccttaagccaaagcttaatcagagacacattgtgactctcttctttttttttttttcccgagacagagtttctctcttgttgcccaggctggagtgcaatggcamgatctcggctcactgcaacctctgcctcccgggttcaagtgattctcctgcctcagcctcctgagtagctgggattacaggcatgcgccaccgtgcctgactaattttgtatttttagtagagacttggtttcaccatgttggtcaggcttgtctcgacctcctgacctcaggtaacccacccgcctcagcctcccaaagtgctgggattacaggcatgagccaccgcgcccggccaactctcttcaattctatgaaagctgagagaggtgaggaagctgaagaagaaaagtttgaagctagcaatcgttggttcatggagtttaaagaaagaaactgtctctgtaatataatgcaaggtgaattcctagtgatgatggagaagctgcagtaagttatccagaagatctagctaagatcattgatgaagatgattacactaaacaacagattttcaatgtagacaaaacagccttctattggcaggagatgccatgtaggtctttcatagcttcaaaggacaggctcactctcttgttaggggctcaggcacctggtgacttgaagtcgaagccaaagctcatttaccattctgaaaagcctacggcccttaaaaattatgctaaatttgtgtgctcttataaagtgtgctctataagtagaacaacagagcctagatgagagtatctctattcacagcatggtttactgtacactttaagcctactgttgagacctatggctcagaaaaaaagatttcttccaaaatattgctgctcactgacaatgcacctagtcaaccaagagctctgatagagatgtacatggagatgaaagttgttttcatgcctgcaaacatgacatctgatttggtttggctgtgtccccatccaaatctcatcttgaactgtagcctccataattcccayatgttgtgggagggacctgatgggagatgattaaatcatgggggtggttcccctatactgttctcatggtagtgaataagtcttatgagatctgatgattttataaggcgtttcccctttcgcttgtctatcatcattctctcttgtctaccaccatgtaagacgtgcctttcatcttccaccatgactgaagcctccccagccatgtggaactgtgagtccattaagcatcgctgttttatgaattacctagtctcaggtatgtctttatcagtagcgtgaaaacagaggaatacgacatccattccacagcctacggatcaaagagtcatttggacttgcaagtcttcttagttaaaaatacattccataaggctatatctgccatagatagtgagtcctctgatggacctgggcaaagtccattgaaaaccttctggaggattatttgtaatccaaaggataaatgcttgaggggattgcttgaggggatggataccccattctccatgatgtgcttacttcacagtgcatgcctgtatcaaaacatctcctgtaccccataaatttatacaccgtgcacccaaaaaaatttgaaaaaataatttaaaaattaaaaaaaaaagaaaaacttctggaaaggaatcaccattctagacgccattaagaacatttatgattcatgggaaaaggtcaaaatatcaacattagcaggagtttagaggttgattccaaccttcgtggatgactgaggggttcaagacttcagtggaggaagaaactgcagatgtggtaaaaagtgcaagagaactagaatgcgaagtgaagcctgtaaatgtgactgaattgctataatttcatgatcaaacttgaacagaggagtagttacttcttatggatgagccaagaaagtagtttcttgagatggaatctactcttggtgaagatgctgcgaacactgttgaaatgaccacaaaggctttagaatattacatcaacttagttgataatatagtggtaagcttcgagaggattttgactccctttttttttttttttttttgagacagggtctcctctgttgcccagattggagtgcggtggcacaatcacggctcactgcagactcaacttcccaggctcaggtgatcctcccaactcagcctcctgagtagctgggacttcagggatgtgccaccatgccgactaatttttcgtatttttagtagagatggggttttgccatgttgcctaggctggtctcgaactcctgggctcaagcaatcctcctatcttggcctcccaaagtgctgggattacaggcgtgagccaccacgcccagccttgaccccaatttttttttttttttttttttgagakggaatctcgctctgttgcccaggctggagtgcagtggcaygatcttggctcactgcaagctccgcctcctgggttcaagccattctcctgcctcagcctcctgagtagctgggtctacagtgcccgccaccacgcctggctaattttttctattttttagcagagacggggtttcaccgtgttagccaggatgggctcgatctcctgacctcgtgatccacccaccttggcctcccaaagtgctgggattayaggcgtgagccaccgcgcccggcmccttgactccaattttgaaaaaagttttactgtgggtaaaatgctgtcaaacaaatattgcacgcaacagagaaacctttcatgaaaggaaaagtcaattgatgtggcaaacttcattgttgtcttatttttaaaattgtcacagccagccggggcagtgactcatgcctgtaatgtcagcagtttgggagtccaagatgagtggatcgcttgaggccagaagcttgagaccagcctgggcaacatagcgagatcctgtctctacaaaaaatacaaagtgaaaaaaaaatttattttaaaaagagacattgccacagccacccctacctttagcaactaccaccttgatcacagcagccatccacatcgaggcaagaccctccctccgcaagaagattatgacttgctgatggctcagattaccattagcattttttagcaataaagtattaggtacttttttgtgacattatgctatgacacacttaayagactacagtatagtgtaaacataacttttatatgcactgggaaacaaaaaattcatgtgactcactttattgtgatattcatttattgtagtggtctggaactaaacccacaatatgtctgaggcatgcctgtattgcccagagagaaagttagactaaaatgaaacatactaggtgaattatagtgtaggtggcagaaaaatgtgacgagttctatgtagcatatctaccgtagtaaccttcaccacggggagccagtcagaggtaatccattgcaggggtgtctgtcgtatccaggcttcagggaacctactttgagggtataagaaatatgtctattcttctctgtttctgaggccttaaagtaaggtctgatgatcgtggagttaggtgtagcatcatgtaagaattagaagcagtcagagaggcmgggcacagtggctcatgcctgtaatcccagctactcgggaggctgaggcaggagaatcacttgaactcgggagttggaggttgcagtgagccgagatcgtgccrctgcactccagcctgggtgacagagtgagactcttgtctcaaaaaaaaaaaaaagaagcagtcagagaaatgagcacgtctgcctttttagttctagagacctaactcctcttgaaataggaaaggatgcatatgmtaattatgcttaaggatttgtaatcctgattttaactcagcaaaaagatcaccagcacactgaaactccttgcagctttgccatagacccactgggagggttaaaagaaagtgttttttctcttcatccttgtgcctcttatactacctccttttctcaaaataacaacctatcccacagaggtcagtgggaaagaggaggtatgctctcttctaaatggctgggtctttgaatgtagtcaggagatttcaaatcatagattgcataaaagactcccctttcccacagccaacatagttgttctctgcttctcattatgacacataatctgtaaaagaaaaaaagagcttgaaacacccaccatctctttcaaggtgtccctggttcctcttttctgttcaggattgaaattgccttgcctgccagtcacttcaggtagatggatgtgctttgctcttgcttcctaatgtgggacagtgatcaggcttggcgaatttcttccaactctcccactgacttattatgccactcacccctatccattggcactggctgggaaatgttgataaagaaattacatgcagcctggcatagtggtgcatgcctgcagtcccagctgctcagaaggctgtggcaaggagttcagggctataggaccccatgttcatgcctatgaatagccactgtcctccagcctggacaacacagtgagacctcattcataaataaataaacacataaataaacagaaatcacactcagtggataaatggaatgtggtataaacatacaatgaaatattattcagctttgaaaaagaaggaaattctgccatatgcaacaacatggatgagcctggaggactatatgctaagtggaataagccagtcactggagaacaaatgctgcatgattctgcttatatgatgtatcttaaaatagtcaaaactcaggaaacagagagtggaacggtgggtgccatgatgtagrgggagagggaaagggaaaggggaattgctgtccagtggatctaaagttatgcaaggtgaataagttctcgagatctgctgtacaacgctgcgccaccattaacaaaactatattgtgcacttaaatatttgttaagagggtagatttcatgttaagtgttcttaccacagtaaagaaaaaaaagaaggaaatcacactcggatagcttccacttaagtagattcagacgcaattttctgcgagtgttagagagaagagagcccaaatagactggggtcagaagacggggattggccacagcagatgtccgtggggaagaaactttgtagtttgagtacaagttttttcaaatgaagttatctgctctgcctcacagggtcctgcgaggatctaattagatgcctgtttgtgagttttgaaatactaagtgatgataatttaagtaaacacatgttcacaaaggcctcccaaaagttcctcctgactttatgtgattcactaacccaggcctgtactctctattgtgggtcttcttaaatatctgttgtggggtgagaggtttgaagaattataagtgggggagtttataaagaktgcttacttcttaartaggaagaatcccattcaactgcattttctgttttgttttgtacttccactgagggacagattaacagagtagctggggaaagaaaggaaagggaggagtctataagcctcaccatcaggtgcctatacggtgtctggggaggctagatttacttatgtaaaaagaactgcccagcaatacaaggcttattatctgattaagtattacacaaatagatggtatgagtcatggttaaacggcttgcctggctgacacagcagagaaaattattctgtaagatgcatttgaatgtgccctaagggagatgggtggcaaaaactgttaaccacatctgggttgaacaatctgtaaaaaaaaaaaaagcwtgaccagaatgtgaaagagatcaactcaamacccatagagctttaaaacccccattctaactttcagagaaaatctgctgatgttgactatgggtgctactgtgctggtgagatkgccccagtctaacactcaaaatgacccttagcgatcacctttccaggaccagaaaagagaccttatgaattcagtgatgggactgaaatagtcattctctactgcaatggtttcctctggggatgaaaaggaatgggataggagtggagaacawatattttatctgtagggcttcatttcataggagtgagagaaaagggaaaaagaaaacaaattcagcaggatgcagtggctcatacctgtaatcccagcactttgggaggctgaggcaagaggattgcttcagcccaggagttcaagaccagcctgggccacatagtgagacccaacattggtttaactcacagatgcmaaacccatggaaacagagagccaactgttttttttttttccaccgtgaaggtkggtattgaacattttagagtagtttcaaaacaacatcgagatgcttctttcttcttcatttcatttctttatcaactttcagtctttttatttccactttttacttctactggtgtttaccatttattgtttattaatttcaacttcctcaaggcatgtgcaacaaatgtgaaatttacttttggaagaaagaacttacctcacacacagagtgagtgtctaatggmaaaaaaataaaacaaaacaaaacaaaaaaaacctccattacagcttctttcttaaaattaaagtgagtttttagttctccggaaaagaaagtgtggaggacaaggaaatatgagttgtcatctgcttctcccaagcctccctgtttcatgatctcattctaggcccaagcagtcatctccccaccctgggcctaggaacggtcatctcctggacacaggaattgcaagtatcctggagccagtagggaatttccatgcaaggaacatgacggcaaaagcccgggaaagagaagggccacaactccaccccagatactttgccagggctcttgccaggccatgctgaatgaagaaagatatcccttgttttacttttgagaagacatctgacttagccccaacttgtgtggttgcatgttgccctaataatggcttagaacagtgctgtctcctcttttgagaatcactrtcttactcagttacttttattatggcagtctattatatagctcaggcatcagacrtaattgagaaccatcagctcaaagtttttaggtaagtcagaatagctggagtttctgcgatagctcccaggagctatggaacccagccatcaaagtggagacctaggtaccctggtcataacctcccaggattcattctgagatttgccgatctcacagtcctacccttcagcaagataattcagaggtttccataaacctcagagcttacctacagccacatgctcacttaggaagtgcctgctccatataccttcttggagctggaacaggtcacccagagagcatacctgtcccaggagaccaagatgtccagtcaccttagatcatccagactttgttttttccttttctctcctagccagggcaagtgtggctctcacagtgggcacacccatagaagaggtagaggtttctgatcctagataataacaaataattattaagtacttactgtaaatccaacacagtcctaagcaattcaaatacactaacgcttttaaccttcccaacaaccctccagataggtaccattagccccattttacggatgggaaagtagagatagtgacttgtccaggcagtagctattgaggactctggcccactcaggccctgtgtctccataagctgtcctttctggggatgttaagaaaaggagaggaggtcttgcacaattgatttattagttaaagaggaaaaggataaccatcccaagagattttaaaagcagagcagaaaaattgttaaaaacttaggcctaagaaattgctgctagacagctgtcaagggagaccccctcgagatcacggagggagggggcaaatatctgtctgtgagctgtttggtgtggctggtgacatattagaggaaatataaatgcactgagtgacttgtgggaacgctgaaatacttgagtaacgcctaggtagaatgtgcatcagaaaccattatctagcctagcagtttaaaacaaataaaggagcaaattgctagaaaaccctgggccagaatggagtttcttattcttcagtttccgtcgctcagaatgtgtggggaatgaggttgagaaaggcttattccactcgggtacctggctccgtaaattcagaacaacaggattgcttaaatcctgtactatatcatcccgtgaagatttccagagaggcaagtgctcttgtgagaagttctcctgctctagtttttgattccttcccgaccatgagagcatgttaagaacaccctggtgggtagcagggcagctgcacccagtcccaaagggtgcaggcgagccccagggacactgcagagctgggcattgctcagcggaaagcagctccgctcggtctgagcacgcctgcaggcagctgaaaggtgccttagactgctggggagacaagaagtagcctgcttgcagagacggagattttcagcacagtgcctagggaattcaccctatattaacaaaatgattgggctgcagagtgtaaaagctgggacggccctggcgttttctaggccacaggctgaacatgttcgctccttagaaaatattttaatcagccacagctctttcctgacggtaccagtggctgagctccggraaaataagaaaggatgtggatgggatatggtragtgccmagagattccccctctagtttagtactgctttccttgtgtttgggcttgttttagaaaaacaagccagccgaccatgacggctgactccatcaatccagagctatactggtaaacacttgaaattcatccttgcggtaaaggaagtttwaaaaaaaaaaaaagcaacaactgtttgcctcttctcttggtaacatccagttcttggtaacatcagtgctggaaaactccattgctcccaagaaatatgcaggaggagcatgtgtttttccaagttgattttattactttaacccaggagcctctgtgacacagaccaacagggtgacaacagtgattgggctgtctgggtgggcatgagtgttcagtgtgtgtgtgtgccattttccctaattattacagcataacttcctctttgctttaccagactaaatctcaacaatgaagcatgatgtgtaaatttctcgtatgtttgctctttccagttctaggaaaaatccgaaccgcagtgggcagtgcccaacttctcatggcccagaaattctaccagttcagagaactgtgtgaagaaaacctggtaggtaacactctcyttctacaatttccctgctagtgccatgagaagaacatgtcaccaagactggcccaactaaagtaaaactgattttgaaccaagtcaaggtccattggagtctctcacttggaacagagaattttctgatgaatcttatttcctgattgtcttaaaattaaaatatttatttttcacttaaataatcttagaaaaaattcagtcaagttaaaattatttcctgcttcttttgtaactgaaaattttccattttcctggctttcacatagcttttctgattttattgttcttatcaaaatatgaagcagcttgatatttcaaaaataatattgcccaaaaaaaatcattttggatagtgattttctttctaaaatagcagtcaatgactatttcctaatctgagttctctgttttaattcaagagctagaagtcaagggcatcacaaagtgtagatttgatcttcttgaaacaaatgaagaattcatccttcttggacatgcaaaaacaaagcaaaacaggctgggcgcaatggctcaygcctgtaatcccagcactttgggaggccaaggcagacggatcacctgaggtcaggagttcgagaccagcctggccaagatggcaaaaccctgtctctactaaagatacaaaaattagctgggcatggtggcaggtgcctataatcccagctactcaggaggctgaggcasgagaatcrcttgaacccrggaggcggaggttgcagcgagctgaggttcattgcactctagtttgggggacagagtgagacttcatctccaaaaaaaaaaaaaaaaaaaaccttcaagaatagcttttattgctcaattgttggtcaagctggatctaaaacaaagaaaatgaaaagcaatttgtttaccttttggcaagtgaagacaattattagcaatctaaattacttaaaatatgatcttagaggtttttgtttttcttttatccccaacaattgacaggcatgatttttgagggtttgttttgtttttgtttttgttttgagatggagtctcgctctgttgtccaggctggagtgcaatggcacgatctcggctcggctcactgcaacctctgcctcccrggttcaagcgattctcctgcctcagcctccgagtagctgggactacaggtgcatgccaccatgcccagctaattttttgttttgttttgttttgttttgttttgttttgttttgttttagtagagacgggttttcatggtgttagccaggatagtctcaaactcctgacctcatgatcctcccatcttggcctcccaaagtgctggtattacaggcacgccatcgcacttggccagttttggagttttaaccacttcttgttaacaaggagaaatacagactgaaagaaatttatgtagacagggatcaaccgagagaaaatataaagtatggaaaaggtggtagtctccatccctcttttctctttgtaatctctccttagggctattcgcacaccctcccaccccctgccccatacacacacgtttataatttgttttccctctctcagaaaaaataaactcacccttcttccaatttttcagaaatttattctggcttatgagatcatttatattagtaaatgtattaataagtgaatttaaaccaacgagtattctatcaagcttcagctgtgggccaggtacagaactcctgttaatttgcaaacttgctaatgtgtcacagatctcaattaacatgattctctgtgctttaaatataagaaagcttatataaagccgtgttgctcaaacatgtacatgaagaataggtacataaggaagtccatgtgtacacgatacagggaaaacacaacataccttgttaaaagaaatatgtgatgagcaagtatattatgaagaagagtgtaaacattgtacatattttaaagatgaaattgcaaacaaaagttttgaaaaatttgcagatttcttttttttttttttgacatggagttycactttttttttttttttttttttttgagacggagtctcactcttgttgcccaggctggagtgcaatggcgcratctcggctcactgcaacctccgcctcctgggttcaagaggttctcctgcctcaccctcccgagtagctgggattacaggcatgcgccaccacagccggccaattttgtatttttagtagagacagggtttctccatgttggtcaggctggtctcggactcctgacctcaggtgatctgcccgcctcggccaccgaaagtgttgggattacaggcgtgagccaccatgcccggccgagtttcactcttgttgcccaggctggagggcagtggcgtgatcttggcttactgcaatctccacctcctggttcaagctattctcctgcctcagcctcccaagtagctgggtttacaggcacccgccaccacacccagctaattttttgtatttttartagagacggggtttcaccatgttggctaggctgatcttgcactcctgacctcaggtgatccaccctcctcrgcctcccaaagtgttgggattacaggtgtgagccaccgcacctggcccaaaaatttgcagatttctagaaaatgttaacctccttaaagccagcttttgatgtttcctagttcttgatgggctcacattccttggccactagaagggcataggtggtaaaatgtgcttctcatattttaggtagactgaggcacaatgggggaagacagtcgcaatgctggtcaaaccaggcccctccagaaaaaagtcaagagcctaacatgtgcctgacaccctgctgaaagcgtttagatttctgggctggttacatgctcaaaaagaacacatggagttgatagtgacttttttttttttttttttttttagagggagtctcactctgttgcccaggctgggagtgcagtggcgcaaactcagctcattgcaatctctgcctcacgggttcaagcaattctcctgcctcagcctcccgagtagctgggactataggcgcccaccacgacacccagctaattttttatctttttagtagagacagggtttcatcatattggccaggytggtctcgaactcctgaccttgtgatcctcccgcctcggccttccaaagtgctgggattataggcatgagccaactcgcccggcccgatagtgacattttaatgacagtttacagatgaggaaaatgggcacggaaaagctaagaaacttgttcacagccccatggtaaaaggcagagccaagattcaaatcccagtctattcaaccacaatccttatacatcctacccaggatttgagttcactactcctgctcatggagcagactcagctccatgctcctttgccccaggaggcacagtggcctggtggcggcactgcttaggtccacagctgcatgaaagtggcaccatgattggtcagaaccagacccagcytcctttcttgagttcctattctgaggaraaaaatcatagctctattttgaaaacacttactcattatcctaactagactcccaggcttagaatgagtagacaaaagttggcctcttccaacgtaactaaaccaaggaccccagcctcccttggctctccccactctcccctccagcacccacctctggtctccaaggcagcatgtcttggattaaggagtgagctgccactgttgtgcatggtatgtcacatgactcactgatttggagaatggctgaggctaaacgctttctctctgtttctctatctatcttcttaatgatgtgggagcaaagagattctttatgagaagggaacgagttgcccattatacagagttaaatacattcaagaaaacactggcggggyraagtggcttgtacctgtaatcccagcacttgggaggtcgaggcaggaggatcttgtggccaggagttcaagaccagcctgagcaacaatgtgagaccccatctctacaaaaaaacacaaaaattagccaggcatggtggcacacacytgtaatcccagttactcaggaggctgaggcaggagagtcgcttgaacctgggaggcagaggttgcagtgagctgagattgtaccattgcactccagcgtgggcgacaagagcgacgctatgtctcaaaaataaataaataaacagatatatctataaatttatagttcccaaagtgcctaataattctaaagttcatttaaaaaataagttttaaagtttgtaagtgtctgattcagtattaaaatctattctaacgatgtctgaattaatgaaagggtttctctgtagtattctgatttagtaaactaaaaaaaactttataaactttaaaatttatttcttctaatgaactttagaacttttgggcactttaggaactataaatttataaatatatctatctatctatctgtttatttrtttatttttgagacagaatgtcgctcttgtcacccaggctggagtgcaatggcacaaccttggctcactgcaatctccgcctctcaggtccaagcgattctcttgcctcagcctcctgagcagctgggattacaggtgtgcaccatcgtgcctggattatttttgtattttcagtagagatggggttttgccatgttggccaggctggtctcgaactcctgacctcaggtgatccacccacttcggactcccaaagtgctgggattacaggcrtgagccaccaygcccagacttcatttatttttattttgaggtaggccaataatactggtgcacccaaggacttaaaatgtctttccaatccattattttgatggtcttcaaccttgtactttccaaaattctgatatcatttttattaggggttagttttaaaagcatacactggcctcrtgttatcataggacatggagtttcacagtctgtccagttgcctgaaataccaagaggtcaccaaaacagataccagctaggatctcttgacatatggaggctgccacccgtctaatcatgaatgcctttagctactgctgcaggtagtaattaacaaagagtatgatattttcagtctcctagctgtgtttttcctgtcttagggcatataaattcaggtttatatgttctggtatcagggatatgtggatggggcaaagaaagtcaatcctgaaacactgaagaatgtttactatcacttagcaaatgggtcattacagacatatagatgtagagatgtatgtagagataatgtgttctcacatttgctatattattttatggtcaatttaaaatgaatgaattttcaaatgattttgtcaaagcagtcatatgataaaattacttcctatgataaaattacttcctatattagtaaacatcttaattattaaacacatagtgcttggaacatccaatattttattactwatcatttgtgttttacttaacatgaatatttaaactaatcttattttagattccttatctgttctctgaataaattgtatggcatgtagtggaatacaaactctaataataatacactgtattttttttttcagaaatgtcattttcatttgaatatggtgttttaaaatacgtcctgtagtagatcacacattctggaatttttcatatgtttagacccttcccccataccatattgaattgatagatgtggtatcacaacagaagagttttacaaccttgacatttgagaatcactgactcaaacggatgagtgtataaaattaacatttgtaacctcacttttacctcgtgtcggaaaaccaaaaggaactagtcctccttatgttgtttgaaatatttgaaaatgcctttttggccctgtgcttgtcaagaattgcttctaaagcatgaatgtttttctttctcttgtgcagaatcctaatgctcatccaagacccacctcccaggatttggcggggttttgggacatgctgcagttgtccatagaaaatattagtatgaaatttgatgaacttcatcagttaaaggccaataattggaaacagatggatcctcttgacaagaaggtagaacaatgtagattttgtatggttcatttaaaaacctgcacaaacactggacagtctaaataggcttctgcattcagtcctgctgtttacaatgtgaaatggagctgatatcatattaatttcattgtaatgacaatgtttacatagtaatcatttgggatattatctgtaatatgtttcaggcatatttttaaagaaaaacctgtctttgtgaattggaaaatgggaatgtggctttttttgttaattaaactttaagttaaaccattttagtcactggaaggaactgcctccattttgctttttaaactaaaataaatgacatcttcagtgcatgaatccatagaacaagagttcaacttccttacacccctaggatgtgttttcaagaaaaataggatgccctgaaaaataactgactttgataatcatttcataaatatagtaataaagaaattactgttgttcaagtctaaaaatatataccataaagtttcacagtaattacataaatgttgggtttttttttttttttttttcaaaacagttttgcttttggttgatttgcctkggggaatattgctcactggggtcctcatgcatcagtttagaaataaagacttaaattcttttactttaattaatcaactctaattttcacatttgattatggtgttccacgaggctcacacgggtatccaatgtccagctccccaggctggcatgtcaaacgtgacttttttaaccctttgctttcctatggcctcaggtcaaataattccaagagaatcaacctctgaaaattggaatggctgttcccttgaaatgctggtggccctgttcttttcaggtcccctcacctaccagaaagctaacagcaatctaatccattctgctaccgcatatcatgttttcagggttcttggggtcaatggtctcccaggaaaaatccagtcccaagggaccatctgtaagtgacaggagggtgatgctctcatcactgtcccccgtttccaattctgtcaccatcaaaatgggggtcgtagtgttaagttggaaagtactgttgatgtacatgtggcctctcacttgggaagccaaacatttgtacccaatctagttttctttaatctgtgtttaaaactatctgctagataagctttaaatcagtcttattttaagaaaacactacaaatgcacacatactggtaatttagtttccagagctgatgcatctaatttttttttttttttttaaataatcattgttggctgggcatggtggctcatgtctgtaatcccagcactttgggaggctgaggcgggtggatcacttgagtccaggagttcaaaaccagcctgggcaacaatatggtgaaacgccgtctctacaaaaagtacaaaaattagctgggcgtggtggtacacacttgtagtgccagctacttgggaggctgaggtgggaggattgcttgaactcggagagtttgagtctgcagtgagccgtggttgcgccactgcactccagcctgggtgacagagcgagagcttgtctcaataataataataatagtaatcattgtttaaaaaatccaaatgtataaggaaaggaaaatgactaaaaaatatccaatattcatatttctaaaaatatccactgagttattccacaatgaagatttaaaatgtctaaaagaagagatgctaagaattgatatatgtaacctattgatatttacatagtaaatcattagttagcttgatttttacggtttttaatggactttgcctgtgatcagagcttttcatcaccccatgaacctgaggagaaaaatgaacaagcacaatcagagttgggagaatatagtttgcactccaggctctccttttttctcttttaagccacacagactccaccttagacagccggtggggtagctccagggtgagaagttgaactaggcacttgctctggcaagcagggaggaattgctgtgctgagcattggtgttaagatacaaagagtactctttggagaatcaccgaaactatattttaagataatgttcacgcttcattttatgagaatggagggtattttatttaaaatgaaaacatcagttttatgtgcaccctttcacagtctacaacttcaaccttctttgcctaaaaatcctttgtggtctagacgccattctttcctgctgcattttttttaatgccaaagagatgactgtcttttgtttttgcagtggcattgaaaatatccgcccatttcatagtttgctgctgataagaggaatgacctctttcatcctgtgtcaacttttcatggcacagtttctgcccctgtgattggaattgcttcctgggccaccacagttatcccgaggcccctagtcagagtcaccttggaactgacttaattaactctcgagtgtaggaaatatcaatggcctccctctcccgtgaccctgtatattgtatattgcttgtgtgttcgtgtgtggtgtgcaaaagggtctaacctggtgtagcaccaacaaagctaaagaacacaatctgatatctcttcttcctcctctgtttatttaggtttggtgggaaggggacggtgggcgggccggggacagagcggagatgtttttaagctctgaaccaagcttgcacccggtgacttgcatccttagaggggatgcaggggttctaagatgctgcygcagccgctgcttcctggcccatctctggcaccaggaggagtctggagtctccagagagaaccgcactcaatgtgctgggagccgcaggctttccgcagggggcctttaaaatacccacttccttcccttggagagacctagttctgcaacccagccttaccctgggccttaagcttaccgggatttttttttttctgcatcttttgaatgcccaagccagaataatgaagaaaaaagtagatatgcagtgtgcagatcagaactaaccacccctaggtaaaaaactgtgtgttctaactactgacctatcccagtttttcccaagcttgtcctgagaagctgtgtaatgtcctgaaccttctgctttgatcaggagagaagggcccctcctccagtgccaaagaagccggcgaagggccccgcgccgctgatccgggagcgctcgctggagagctcgcagcgccaggaggcccgcaagcgcctgatggccgccaagcgcgccgcgtccgtccgccagaactcggccaccgagagcgccgagagcatcgagatctacatccccgaggcgcagacccggctctgagcgccccgcagcccggccgccgccgccaagcatctgtcccctcctcccccggccgctcctctgccggctgcctctccccctccgagcccgtccgctcccgagctcggtgacttccactgtcgcggtgtagttgtccacctcgcaggagccgccccccgggcccccctcagccccccacttcccgtacccgtttgcccatctccttcttcaccgagcttcgccccctgtcctgatgccgtcgccctgcctcatactgagatccaaccctttattttctgggcaaagccaaacccacctgtgtagaagtgatgcctttaggtcacccgccgtcctcagttctctcgagctagtctgttcagcaatataaaaccatagggtatttcagaaatccagtatcacagggtgatcctttgggacttaccgtcttccacgtgaaagaaactaggcctccgattccctttatttcccctaaatggttattcttttaaaaaagcagatggagcactttattcccaacctcagaaatcacaccatctcactggaatccatgagggacacagagagaggggaccaagcctggcctgggggtgggggacctggatgtgtagcaaggatgggagaagcgaaatctgcaggtgctgggggcacctgcacactcacagctgcacaaactgcctcactgttacttcatcaatcacagcttcaaatgtctcaatcagcagaagattgtaaattcgatctttcagggaaattaatctattctgaaaggcaataacatgaagcaaggcaaaggaggcactgatggtttagtatactacataagggatttttttgttctattattaagaaaatctagacctgaaatgttttctcaactcttattgtactgtgtatatttatattgttgtcgtggcggctgtttttaaagggaaagtgttggttctattaatttgttaagtgtccatccaggtgggcctacctgattccacatatataagtacatatctgcttataaagcgctgtaaatggcagcaaggctgtttttggagaagagtttgggttttcctaccatccctttgaatgctacacatccgtctattttaacccaagtagttcatatttcagatatattttctcctttcatctcctctcactactgcagagtccagtaatacctagcataggattctgtcctgtgtcaaatggctaaaataaatttttgccccaatagacatgctgcctcattcaaaagagctgccgctgtcatcttgaggttccaggtagtgagagaagaaactcgacctgccagggtcaacagccatgaagaggtggggggagtcatgattcataaacactgaaagaagtcaaggcttttggcagagagtgttgatttagatttttagtcttgattgatgggcagtatgcatcggtgtctagctgaagttgtctttaaatgcccttactcgtcacagtttaaacacttaggatgtggcaatcttaagtatcaatggcattttatgtccagctaacatcctaaagcattagaaattaaaaacgaaagacttttaaaaacatacatcaaacatgcttgcaccagagaagctttttaaaataatacactctcatagccaggtgctaatttaattttacttatgaaattaagagaggtgatgggttctagcaacagatattttcacggacatattctaaaaccactagagaattcgctacctctcagagccatcgatgctttgagctacctttataaacagggcacaaatgtttactgctgtggtttacaagaaaagggctactcacttattttgaaaccaacgaaccaacttttaactagggtgaacaaagcactcaaagtgctttgtgaaattggagcatacagagattttgagcttcaagtatttgctagttttaaaaagaatacaccttttctttaccttgtagcagcaattaaaagtcacacaaagcttgcatcgagtagggccaactgccacttgggtagcctatggtcacattcaatactgagaatgacttggaactcacagattaatatgaaagaagcagcgttcatcccaagacccatgctcacaattacagctccgtgccctgaggtagagttgagatttggattaagaaatagatttctaatacgactcaagatcatcctacaatattttctttggaaactaatttagcccatgatattttaaagagagacaagagaaggcctatttatcttgtctaagtgaacggcatttgtatattcataagctatttttggtaagaattttaaatcttttagctcaaggcctacagggcatcatgatctttgccttccttgaaaatacaatttaaattgtacaaacactttataaaaagctaattattggtgttagaacatgaccccacacaatgctgcttgacccctgaaactgacattcatgagcataacctttgttacattgttctttttgatgtaatttgtagaaatgttttttagttcgtaatggaaaatgtatgtaccctgaaaaattacttattttgtttaactttggtataaaggtgttgggcattttcttggggagggggggattacaaaagaagtttgtctcccacatcaaaaaacgttcaaagaaattaagtatttattatattttttgcagatgtttccatacaattcacataacctttttgtaaagagagatgaagaaatggattaaagatttttaatatttgaaatggtaaatagaactaatttattgtaatatatttctgttatttatagatgtttccttaatgttttactgtgcattaccactttcatttaagccttatccttgtgaatttaccatttcttttttaaaacatgtctagatgcatattttaaataactggaatgtaaatcactagcatatctgaattcccaaatgtaatttttaaaaattattttggtttggaaaaaaaagattcatttgaaagccttcagatggaggggtgggaacatttttatggctttatgaattggaatttcataggcttatttacctagattgtgtgtgaacaaaaaaatattgtaaatagatgaatgtttcccataatgtaaaaagaagaaattaataaaataattaatgcactgctttcaggtctgtgtgtttttactagagtcccacttcttccaaaatatgctttattgtcttttgacgggaatacttctgcaattaagaagcgtatcattctaactttcactgtacagcacgtgtgctattcgttgttgatgacgtagggagaacttacatcctgtttaaaggggtttcaataccgaagaactaaaaagtccttttactctgataatcccactcgtgaagtttcagttcagaagctgagaataactgtctatcttatgaaggagtgatgagcctttcaaatgtgcaaattcatgtcagttttacctactttgatttctttgcatacatttcatccactttgtttcctacacaactctcaagtgtagggaaaatcagaaaaatgctttgtggcttccattccatccttgcaataatgaaaaactgtgcctcactgaggtttagtgacttgcccaatgtgccacaatgattaaaagacagatctgagtccagaacccaaggctttattgagctcctttagtgccgtctctgtcattcttgccacatttaaaattggaaattatttgccattgtcaattttatctggttttcatttaggtcatatttgtaaaccttactttatataaaaaaatacaaatttggccaggcgcagtggctcacgcctgtaatcccagcactttgggaggccgaggtgggtgaatcacctgaggtcaaaaatttgagaccagcccggccaacatggtgaaaccgcgcctccactaaaaatacaaaaattagccaggcatggtggcacatgcctgtaatcccagctactcgggaggctgagtgaggcaggagaaacgcttgaacccaagaggtggaggctgcagtgagctgggatcgcaccactgtactccaacctgggtgacagaacgagactctgtctcaaaaaaaaaaaatacaaattgacccccaaaaagggtaaattagaattttttatgatgtggacttgcacttacttgttgcctgaaaatgccacaactctaaaatttgtttccacagtgctttgtcctaatccccaccaacttttcaccgacatgcaacaaccttggaaattagtaagcacaggagccactttttctgatttttgtacagaagcaagacctatgccagtcaccagaataacacactgtacttttgaaactgctttgaaagaggaatgatcaggtgactgaatctctgtgaggttacaaaggcctcatcgctttggttcgtgcactgactattcatgtagtctgaaccgtgattacactttttgccttttcacaaattagttcatctgtttcatcggggctctttaaacattttagctaatcccataacaaaatgagtcagcttttgcatgtagaaatctgaatttcagtgaagccatttcccatatcacagagtctactctccaaaaaaaaaaaaagtgtaatttaggttttatacagaaattgaacaaaattgtttgttccgaaaatgacttttctttttatatctttgaaatccaccccttgagaatataaactgattttgctttaaataaatgacatcttaaaaatcaaagcgtctgaatgtgttcattctcgaatgccattgatactaaagggtgctgaaatttaccttgggtttgctcaataggttgtttgacttgcagctgctaagccaagatcgaatcaactcattttgcaaacaaactagtggccctgtctgaaaaccctctctcagctctaattcaattaccagcgcaagtttacttacagtgactgtaagtcactcatcctctcccataaagcatagagatgggaaatagcgtgctaccccctagtcgtatgctgtcctctgggtttgctgctggtccaggaaggcgtcatcagaaaatcacaggaatgtgaagctccagtgtgattcctgattcctgtgtctcgacttagacagccaagggattattccaataggtcttctttgtaaatgagcacaggcctcaacttagagaaaatggctgagagcaagcaaacattttcataaatgccagctcaagctctaccacgcagctgattgaactgttgctattcatggggcagaatattttcactagtgctgattatgattgccacgttccctcttcacacttcttgtctgtcttcttgaagaagtaggtgctaatttcatctggaaacttgatcgataaattagtgttattagcaagcttcttttgagatctcaatgaagaggttcttcagttgaaaaactcttcctttcactttggaaaaggggaagtcggagcaaatagagcctgcgttttctcttctgttactgagggggaaaatgcattcttcctgttgactctacaaggagattataagcaacaatttcagatttctgtagtcttaaatccagatgcttttactgcttgtgaggaccaatgctctacaaataaaaaccattccagcatagctacccttcagagatttgcatatatagttgtcagttgatgaacacttccttctttctctgagcaatttcaattatgaaaagtaagcaggaacatttaaggagctggaagatacaatagttgtccccataaggtattgtcgaagaaacatctccccaggtttcaataaaaatattctactctgtgtgtgtgtgtgtgtgtgtgtgtgtgtgtgtgtgtgtgtgtgtgtgtcttagggaataaacacttgctatatgaaaatgtgtactgctatatgtgacattttttaaaaataccagatttgtcacaccatttcctttctagaataaaatctaatatgctttataacctcagccaatatgatgtttgtctgtaattcccaagtgagagaagaagcaaatttcacagacagaacttgagcaaaagtgaaaaggggatagtttaaatcatttacccttagattcctttcctgtttggtttaatttaacatatttcttgagaagcccctcctcctcaacatgctcctggaaaaaagtcctgcttcctttactgaggaggggtttatcttttctcttctctgcagcctggccgctggccggagcaatacctgggaggtcttggtgagcctggcacttccaacattgagtttggcaaacatgaaaacaactcaagggctcctgaacttttcctcaacattagtcaagcaaggaaatgagtctggaatgactgaagagggatcctttccaaggagctggtgcctgtgtgtctagttttgagttaatgcaccagggataccttgaccagcaggttgttcaaaatgaaatccagggcatcttgcagagagagtgaaaactgatcaatagtttggaacattggaacagtggagaggggttggcacaggaaaatggggatttccaaaatgaattcaagtgagggttaatcact

SEQ ID NO: 98055 - DNA, 53942 bp, Homo sapiens
tgggtctacccactggactgcccaactccgctgtctttgtaaatctggtgtttggcctgcagtccatctaaagttaggctgcacattcacccactgttaagtgtctaactgtgacctcaactggtgataggtgaatcccaccaggattgtttctatcctgtgatgcctcgttcctgttttaacctagcttcccaagctcatcctagagcaacttagtttatcctggggaatttataaaggaaatcatgagaaatcaaaactcatcataaacatttattggaaaatgactgtgaattatgaggttctttcttgtcatctaacatatatagttgcttcatgatcatctgtccaccctgttgttcaatatttggaacagtttctttcaactttaaattttagggaaatcttaaataatggatggttctgcatcaaatgattcattttaccgtatttcactaatttctgatagtatggtgggaaaataattctataaaaagataactgagaattcattttcacaattattctaagttatttagcaaatatttaatggcctttcttgcttaggacaaatgtatcataatcatcaagtgtgcgagcttttctgtttaccaatggccagtgaaagttttaggctttatacataccagtgaactctttgaaaggtcaggatacataggcatgtgtatttatccagaagttgatatatatttttaatttcttacagattataccgaaaagaagttctagagaaattaatagaaaaatgtgtttctaaaggctacgtcttccagatggagatgattgttcgggcaagacagttgaattatactattggcgaggtatgcaactgatgctaaatagtgtgtcatgttcctggtaaaggagcagtaaggtttagaatttttataataaaaagtttaactttcataactgctaaattgtggaggtcttctagttgtttagaatattcatgcacaaagggtaaaaattcatattagtacatttgaacagtaagatttaaaacattaacagtcagcattctcttttaaataattaaaagttcctggtactttctcaatcctagccctttcttctaactaatcagcattatggactgagtctctttgcttcttttccttttgtcaccgccaatggccaccatactttaaaatgaatgatgagttccatatgtccatttcctgttagtaagagaagaccaggaattacagagcaaggaggtggtgatctgtaatatttagggctcgttagtgagctcttagggtagggaagactctcctcatttaatagtaaaactcttattcagagcaagaaaatagctatggaatgtcacttctcttgtggaagttacaagctattttacttaatgctaaaccattgtagctaaatttgacaagtgaaaaatctacgcacaaggccattttacttttggagtataatttttccttgaaatgcaaactgaaacttgagtaaaccaaggtaatacctagaatcagtgctttttaaacagttgcagatttgtttcatgtgacctatctttagataatgcatgtttaattttaaagacttggagatacacacagttgctttcataatcccctaattttatacttactttaaggacctctgttgtaggactaatcctatttctgttgtgttggtaatgtggtataccggctaagctgcctaattgtttttaaagactaacgttacttttttttttttaaactaggttccaatatcatttgtggatcgtgtttatggtgaatccaagttgggaggaaatgaaatagtatctttcttgaaaggattattgactctttttgctactacataaaagaaagatactcatttatagttacgttcatttcaggttaaacatgaaagaagcctggttactgatttgtataaaatgtactcttaaagtataaaatataaggtaaggtaaatttcatgcatctttttatgaagaccacctattttatatttcaaattaaataattttaaagttgctggcctaatgagcaatgttctcaattttcgttttcattttgctgtattgagacctataaataaatgtatatttttttttgcataaagtattgctgccttcattagagtatgtgaatgtagaattttttacatggggaataatttgaaatagtctttttaaaaactggaatcatagatctttatacctaattgatctcagaagtaagataatgttaactgatgaaatgtttatggctgtgtctgtatgaattgaaaaagaaatacacacctctgccctttccttaaaaatgtatctcaaatttcttaaactagaaaatacatttagagcaggcatttacagttcggttcttttcagctgttgaattgatgaaacatttcatctatcaaagcaggtctatttaaaatgcatattgtgaattgggaaacaatttgacagcagttgattacatagccgtttttttctcttttgagcaataacctctatcagtaaggaaaaatattaatgacactgaggcagaaacttagctgctacagtaatttttaaacatcttactgaattatataacaatttttttctcaaaagacttgttttcatattatttaaagaccctcagcaaagctcacatccctactaatttgaaaaatctctgccttaagctcttctctccatttagaaaagtgttctgccagttaaaatttgggctaagctatccaataaagccagggcaaatattatgtttacccactttctctaaagtaggtatttcagaagagatcagttaatttctaactgtagcataggttatggtcatgtagtatcttttaaaatttgagtaagggcatgctttgagcaagtaagtttaagttgactttcttctggaaataaaagtaagaggtgtctctaaattatttattgaacagtattcctaattactacattttcctggcttaacttggctgctgaagaaattgaggcccagcacaatggcccatgtctataatcccagcactttgggaggccaaggcaagaggatggcttgagcacaggcatttgagaccagcctagggaacatagggagatcctgtctctacaaaaatataaaaaaagctgggtgtggtggcactcacctgtggtcccagctacttgggaggctgaggtgggaggttcacttgagtctgggaggtcaaggctgcagtgagctgtgatcatgcctggacaacagagtgagaccctgtcttttttaaaagaaaaaaaaatgaaaatctgatttttcatttgcatttctctctgacagattctaccagaaatgaatcccagactataaaacctgtggtgtcatttcgaacattaaaaccaccccctcccacgcttctatagttgaacccatagtacacattccaataagggccactcttgttctgtttcccttatgtccagaactgtccagctggccagtgagggaactgctttccttagggaagaaacttctctcattcataacaagaagaaaattcatcagtgcttgatgtgaaattagttttaagctaagataatagaaatgtaatattctcagtttttttggagtggttagaatttattttttcttaacctaaactcaaagttgagttctcagtgtcaagtatgtggagcagaaattaagtaacaaccttagagaacctaatatagatagtactgccttctcagatactcactagagtagataatgtttgccttttaaatctttttagttattcacacaatcattatcacaacactgtcactcttggaatttaccatagagtatttgagcagtgaagactcatagcatttggaagtcatttagaaaagaatctggaatatttagatgcatttttgtagtaaatctggtgcttaaacactgtaaaattaaatatttacatctgaatccagcatcccattttgctttgtaaatgaggccaaagatgaaatccagatgttttcccttgtatttgtattatcactatatggaatctaagtatatctaagaaaaactaaacttaaacttactttgcttatttcatattagtttttatctgtcttctgcagtgtgtaattagattctttagttttctgaatcaaatgctttgccccaacccctttttccacgacttttttcagctgttttcccttgaaatactgacttggcttttaaagatacattttatcacaattgcagaaatgtgttgtataaaagtttgttaaacagggctaactgaagtcttagatgttgaacagctatgtgtaaccacaatttatactacttgcagcgaactcagattattttcggatgttaagtatggcttgaaactatgttaacttgaaatgtaaagaaacagcaaaagacaggtgtatttacctaaagatcacatattaaggaaacaggcttggttaattcctcactattgacatctattacttgtcaatacatttaaccaaccaatgatactttaaatcataatgttactttgaacaacctactttaaaaggttggttcaaaaatgttgaggagataatgtattggttgggattgacctaaatttacaaagcaaccatgtgctgtcttatgctacccagattgtgggagcaccaaaagctatgtccctaggactacaaagtgtgttgtttaaggatcttgcagagagccaatgcccctattggcaacatcacttctcatccttaagtttcaccagttgggtggcctcaaggcactaggattcccatttttttttttattcaggtcagagaagagtccatcactgtgactgggaagaatgtcaagtcacagggtaacggcggaccttaataaaatctcggcccctctgcaccgaataccccaccaggaagggctaaggcatccatggggttgtgtctcatctcaagtcgctgtgtgaagcacgaggccctcacacctcatttaaggcaggaggcgtcaggggcgaccggccaggtgtcccggcgccttcccgccgcttctcagccgtggaagcgcgggcatctgagcacgtggagccgccccaggccgccccgcacacccctcccgccagatgtagtccaggcccagctgggcccgcgcagggatccccagcacggccacctgactgagtgctgggcgtgctgcggcccgctgcttctgcctccgccgccggcgctgcggccagaggaaggcgcccgccgagcacacgggccccgggagcgcactgcggccattatccgcggcgcctcctagtgggtcaatggcaaatccgcctggttctcgcgagagctcccccctcagtggggattatataatttccctcaagcgggggtgggggtgctgagagcaccctccctcaggaaaagttaggtgcaagcaggggtgggagtaagaggaaccccccctggggaaaagggggttaggggtgctgtccccactgcccccccctatttagctggacaatgagtcctcttatgctaatgaggcacttacgtcacttccgctctttctcggccgccattttggctagggcaggttcggggactcggtccgaggcgcttgtattgtctgctgaggggagacgcgggatcagccccctcccccgcccgttgccgccgccgcctccgccggcccggtctcccctccgccgcccgccgggatccatgagctgaactcccgcccccccccccccggccgccgccatcttgtgccccctccccctcccgcaggcagcgctaagggggattttggcgtcttctcagacacagctccctctctcggtccccgctgctgaggagcgagaggagcgcggccgccgccgcccgcgccggtgaagccgcctctcccacaccctccgtctcctccctccgcccctcctttgtctgcaccgctcgacgacgccgccgccgcccgccgctctgctgcgcccgccgcgccccccggcagcacccgcggccgcggcgcgagccggagtccgccgagccggagcgcgacgaggccccgggcgcgccctccccgctgccgccaccgccgtgccgccgccatccgcccgccgccgccgccgctgtccggcccccgagcacgccggccccgcgcgcgcctcgaggccgagtcaaggtaagcccggcgccgccgcgcgcggacccgcggccctgccctgcctggcttcccgaccccggcccgcgcggccgccagtgcagcctggccccgggcgcgggcgcattgttgttcgcatcgccgccctccagccgcacacacgctcctttgcacaccccggcgccgacgggtcccccgtcccggcacggaccgctacccgactctgctccggaggtccaggcgcctcctcctgcagcccgacccccttctccgccctgtgagcccaccgaggccagcactctgcctggccgcccggagcttttgcagctaagggcatctcccccagccagaaccgagcttctcccatcctggaactaatcccgtccgccccccacccccaaaaggagcccccccacgcacacccccatgccttgaaccagccttctgccaggtctgcccacccttacctgggggaggggggacggggttggggggggcggggagcatgcatggcatggagtgagtctttgcctcccctgtgcaatccttcttccccaacctgccagctttcctcttatcctgaccacagttcaccaccatcccttttccccaatctcagctgcctggtcagcacctctttcgaacattctgagccccaactttgcagtaaggtggtagaaaatggaaatccagagagctgcaaaaagatttttttttaatgtaatgaatggggagtagttttgtgaacacactcgtattcacctcttctttcctctgggaggcctgcctgccttcccctcccccccaaccttgatccctgtctgctggaaaaggcgcgattgcttctcttcctcttctgcccaagaccaagactctaggtctgatatcctttttagccacacacacacaccccccacacacgaagtcttcttaaycttcttgaatttaccagttactctggacacttcttgccataaccccatttcacagacaaaggcttaggagggaaaaagaaccaaactgtttctgtgtttgtcatgttaatgatgtccatccccacacacccagttcccatccctgatgcttcttgtgcctgtatcttgaaccttcagaatgaaaaaaaaaaaaatctcttggatagcttgatacagtttctttagaaatctgcattgttgcttctggtttatggccatggagaaaataccagcccccacccaaaatgcaccgcagccaagtcggctaaaggcgatgagtgttggagtcagtagggggcgcattctctgcactgggtaaggctgcagaggggggaagggcccccgagctagaacaggatgtgcttcacagcgccttctacagaccatgggaaaatgggcccagcaagacacactcgcactcttagttggtgagctgacagcaacatggcgaaggattaagtgagtcaagagcagtgattttacttcttttaaagagcccaccctgcattttagaagttttctccttttactttttcaaaactgttggcccccagtccatatttgttcttgacgaatcaccttggcacatccttggttcggattcccttcctctggagttcttccacctcaagttttgaatgtgtcaccatatctttcctaagtctggtggtaaaggagaaggtttgaaacaaagtaacaggtttgggggcatagctggttaactcccttcttcataggccaaatctttccaattctttgagagttaaaaatcattcttgagagatgttggattaagtgtgtagatgggtgtcatgatttgcaaagccttgttggtaaacatcaagcccatgttgggttcttcattgtcgaactcaagtgttgattgtaaaaatttcgtttccctccaaatttggacttgtaattgccattcattatctcagcagccaaccacctttacaaaaatgttgataccagtcttctgtgagcacccaccttcttagggtgtgttgatttccatagattttactcctcttgttatttccataggtgtgagatgcacaatgcgaaacctaggccccagcttttacaccatgatgcgcagggttgtactttttgtactgaactgataggtggcctagtggttatgccctgtactaccattttgaggatctggactccgtttcctgccttgctctttggaccacattgtcaattcacaccggtgggtatattcattttggagggtgggaactgcagcaacagggaagccagagacttccttctccttggtcaccaccaaaaccaacacttccaaaatttcagcctagccacattcctcaaggaaccggttagagctggttgcagtagtgggttctgaacacttattaacataagaaattacttacagcttttttaagagaaatttttacagatgctaatattgtaatcatttgcattctacacccctttgtataaagtataagtattcagttactattactttgataacccaatctctagagttgctaagcttctaaaagccttaaatgtctgatgaaaacatggttttccatgaacttgttcttgctaccaaagattgacagtggttgatgtttgtgggtacctttaagactttgtatgttacataaatacaccaagataagtttatggagaactgaatgggtgtattctttgatacctagttaaccagttggtgcttaacaggagaatttttcattggagaattgctaccaggtaacattttggtgagtgaaaaggaggccctttggtacaggtatttgactagagacattgcttctacaatttcttagtcattgtgaaaaatcacatatttaaatgggattatttaaatttttaaatactgtatagtatttgtaggcaggtatagtttttatctttatttggtgttttatatgcagttatttaagttctgaaaatgaccatataatttgaagacaacttatttgacggaatgtttgaaatgaagtttgttgaggggcttttgtttgatttagcgaatgggatacagtgttgaatgatgtcctaagtggtaacagccattttcccttaaaggaaaacttgctgtgagctcttagaaagcatgtattytactgtttcaaaggtttcttggttttaacactcaaaaaataaggtgaggccaggtgaggtggcttacgcctgtaatcccaaaactttgggaggctgaggcaggagaatcacttgaggccaggagttcaagaccagcttgggcaacataatgagaccctgtctctaccaaaaaaaaaaaaaaagtgaaacaattgggcttgaagactggaatttatagtaggtaaactatatacttcattaaagtatagtaaaaggttcaattaactagagtgtggggaatgggtattctgtttaactgaactttaagtagaaattccttttttatcttggcctttgttgaaaaatttcctgagactagcttattaggagctatatattgaaactaacctctttgattttggtttttatagttcctgtatagaaaatataggagattgggctgaaaatctcttaatgacccttggcccttccaaccttggaagtcattgattttatacatgcccactgtgaatttgctttgctttgcttaagtttatctttttctccttataccagagtgcaggaagagttttaatactatttatattaaaataagaacttcacaaccttgaacagatggttttggtaccacttgcaagtaaccaaccagtaggcttttatcaggcaaaaatggcttattatttatatttgattattaaaagtataggtatataaggcatactatgtgaagttgttgctttccttgtaactacttacacgttttgaaagtattaaaaagttagtattttgaaaactaaaatactcaagtttattgattaaataagatgatgctggctacaaattttattttgaaaattgcaacttaataaggaagataaagctgttttgtaaaggagaaagtagagattgatacttcatagggtaaaaaaaagaaaaacttcagcatttatgtttcttcttttgagaatcatatataagtaacaaaactgcataaattgcaatagacctaggtcacttgatttcacaattgggtgtgtgtatgtatgtacacatacatataaaatatatgtaggttttctagagctggaaatgattgtcatattattaaatacagatgaaaagttcaagtatcacgtgtagtttggggaaagtacatttagttttgagatgtagtttggggacaatacatctaagtgtagtaaaaaaataccagaattaaactttatgtatgtattttttccaagtaacctatttaaatcttagtgaaataaagatttttaaagtaatatgaaagaaaaaaataggaagtttttattttacaacattagaagcattattgtggtttacaccaaagtacccatgactgttgtgtaaataagctacttgttcaacctggagttccaaaggagtttttaaaagagcatcataaagtcagttatgtcttacataaggtaaaataactttcagtgggagtttaaccttcattctcttgactgagaggcatgtacattaagagaaacattgctcccctatgtgtaaataatttaattatagttggattcacagagcttgacttgttattagcatcgtataaacttaaagtttttcctcccctagtttttgtgtgttgtttgtttgtttgtttgagacagtcttgctctgtctcccaggctggggtgcggtggcccaatgtcggctcactgcaacctctgcttcccgggttcgagtgattttcctgcctcagcctctgagtggttgggattacaggtgcctgccacaacgcttggttaatttttgtatttttagtagagatgggatttcgccatgttggccaagctggtcttgaactgctgacctcaggtgatccgcctgccttggcctccccaggtgctgggattataggcgtgagccaccgctcccagcccctctcctagttttgtaagagcttgtgatagtaactggagtaaatgccgtattttgctgatgtacctcactgccagttaacaccttctatgttgttagtttggaaactcggtgtttgaaactagtataaaccaaagccccatgctaattaactgaattgatactttgaatgtaaaagctgtttcttgtttttactttggcactttccaccttgattgttgagatactttatttgataaaccgtccatgctttgcccattgtgggtggccattgtgatttcatggttttttgttgtttgtctgatcctgtttattagaaagtgaggagaggatgattatgttccttcatcctctcagtgtcttagtactccctacacctgcgttatgttatgacctacctttgcgatctgccagttttggggtcagcttaagtgagaattcatattctgcttcactggaatgagaaggctctcctcacatattatcatgcttctcaagttggtatatatgagccaacttgattatgtagtgtgtgtgtgtgtgtgtgtgtgtgtgtataggaagtcacagataaaaattgagccaactgtggaaagtgacagttttgattgcagggcacacgtttttttattctaatcaatgaaaaatgcaaaattcatattactgtttttagtcctgggtcctgtcatctctgtgtattaattcagtcctctgccttaaggagttccttgagatttcactcacaagctttggtattattgatccctaccttggttccaagacagcagctagagaaagcctggaacctctcaagaatttcagcagtgttctggaaataaagatttagaaaataagaggaaagcatagacaacgttggatggagtttacaaagggaagcctgctctgaatatatgccacagttttagatttaagttaaagatttaatttaaaagcatacacgtaatctaaaagagtcatgcattatttgaccagctgttagaattaaaaatgaatctgcatatcctaataccctcttcagtaagggtatagatttgtaattgagtcacttagctgtgggttgtgtttatatgtcacttctcatgtgactgtgatgactttaataaggatgtgctgcttaagtgtaaaggcccccttgctggcctttatggtattatagtattggtggcttgtctgttttattttccaagcactttataaactattcccaattttctcaggactatccttgtttcacaagtagggaaatcaaggcactaccacatacaatgatgaaatgagccacagagtatgtctgggctggttcccaggcctgtgcttgcaacacaggcctttatggtgctcttgtaagctgtttggctaatgggggctcacatgaatgcttcccatttcacagtgaggttttatgcttccatgtgagcttaaacccaaggattccaatggcgtctacatgtaaagaagctagccacacccccagcagggagagtatgggtgtaaattgtgcaggtggcagttaattggagtagcatatttctgctgggaagttaactgtataagaatctaaaaagaaacgttgtttatgttcccttttcttttcccagttttttagtttaagacagtcagtctgtcctgagcagttacttttttcttagataattgctggcttttaccctttctttttctgaatccttcatgctccatttaagagcttgtggaaacctgtgcttcagttgacaatctgtaaagctctgctcttctggtggaagctcatgacctgagaaccttttgagtggtctcttttgagaaactcctgtctagtggaaatatggtggaatttattaaaattttcaattcgaattataaatttaggttgacagaatccttgctcttgtgaaagaagtgagctgagactgggagtatscaaatgcaagaagtgctcagaatcctgcttcaagatcagttacacttaaaaacagcaacaagaggatgggtgcggtggcttacatctgtaatcccagcactttgggaagccaaggctggcgggtcacctgaggtcaggagttcaagaccagcctggccaacatggtgaaaccccatctctactaaaaatacaaaagttatcctggtgtggtggcactcacatgtagtctcagctacttgggaggctgaggcaggagaatcacttgaacctgggaggcggaggttgcagtgagccaagatggcaccactgcactctagcctgggtgacagagtgagactcagtctcaaaaaaaaataaaaataaaaaacagcaaccaaaaaaaatgcaaataaaacttctctgaggaaagtgtgaaaacttgagccatcaagtggcaaaacctggtacaagaacgcttttgaaaagctaccttcggtgaagccttgatcctgggaaatggcttcgaaaaacttgagaacatagtttaaatattctgttactcaagaatagtgaaagaaatatatttcctattgtgggaaattatttctgagtagtttcggtagagcataaaaatgtattattaggggatcaaaataacgttttatgtcatttagatacaaagacttggcatgcttctgaaataatttataaatggacatatctgcgtgtcctcttgtggtgttgtgatacatactggttttcatccaccacggttcctggctcataacacccataaccccattaccgtgttttgttataatatagggtacgttaggtctcagaaaataatctctgatcttctcctgctctccttacacgtgtcccaaggcaagattctgatctttacccagctttctgattgtaggtcttgagatcctctctagagagagggtgttggccctataccccggggaagggaagtaaggtttcctatatgaagcttttataaaaacccaggagggccaggcgcggtggctcacgcctgtaatcccagcattttgggaggctgggggcgagcaaatcacaagtttaggagtttgagaccagcctggccatcgtggtgaaaccccatctctactaaaaatacaaaaaaaattagctgggtttagtggtgggggcctataatcccagctactcaggaggctgaggctggagaattgctcaaacccgggaggcagaggttacagtgaggcgagattgcaccactgcactccagcctgggggacagagtgagattctgtctttaaaaaaaaaaaaaaaaaacgcaggaggactgggttcagagagcttccagatagttgaacacacctggagggtggcrcccccagagagggtatggaagcccagtgcccttacgcatttctttatctgtactttttataataaaccggtaaacataagtgtttccccaagttttgtgagatgctccagcaaattaatagaactcaaggagggggwcttgggaaccccagcttgaagtgtcagtcagaagttctggaggcccagacttacagttggagtctgaagaaggagagagcagttttggggactgagcccccatcttgtggaatatgacactrtatccaggtagacagtgtcagaaccaaattagaggatactcagctggtgtccgctgcttgggaaaaaaccctacacgtttggtcacagaagacaacttcacgacttctgtgtggtgtgagggcagaggaaaaacaaagtttgagagttttcccctaaagcaccccttaagggctacttgtgaattatttccctttttcacattgatcttaagccagattgtccacttacagcgacagcaagtggctgtatgcctgtggagttcttatgtaggcagtggagtgctagaatcactctttatgctgtgtccctgccttgctgcaatacctgtttagagtgaagtaaactgggaagtgctcctcacctcacactctccctaaatctaaattggtatattataaagtatcctcagtctgtttttcttgtttaagtaccgaggcatcttcccccgctttcaaatacaattttaggtgaactcttaaattgatgaagggtcggggggccagacctctggctgcccagctttcaccttgtccctcaggcatcatcttccctctrtttgtatacatatcttaaactcttagaggagttcagcctgaaaacaactggttctactggtgtactggaaattctggtggtcactgctagaattcttgcctgaaatctgaatacggaaagtatcaggataagcagcaacacagtagcagttttccagttgtgggcaccagtcttgtagtctgaaaatcttcctaaaagaccagtgactccacatattttttaaaacttaagatacgcaaaatctagatgacrcctttatgtttctacataactgtaagtcacctgggtttatttaagatagttgcagatgttcagttgcctaaatattttaagtgtcactgagcttgttaagaatatgcaaacctgagtatgaatggctcacacagatgtaaaatattgtataaaaacactactgtgcatgatgcattgtaatgtgtacaggaacagatgttgttatggcaaccacatctgattctcagtcataatagtttgagctttttggagaggttatgccctggtgtgaactcagaattttgaaagtgattattttagtatctcatctggtttaaggtgataatggtaactgacttaagcattaacttgcatcatctcatttaatccttctgccattaaaacaatgagatagtgtccttctgcttatgccataagaaaacagacctctagaggttaaataacatgtgtaggatcacaaagcttgtaagtggcagagcaaggatttaaatacagatctgtcyaactgtagggtggaccactgcatctttattttctagcaaagaaaagctttactgtgctatgtcaccctacctcttgttaaggaggtttgaagttataaggtacaaattttttacatatggctgataggtaagtttttgtccaggaaaatagtattattagcacaaattttgacttaggctataagcttcacctgtgaaccttttcttttcccctcgttttactcttaccccagtatcctattatctcatacctaaggcagtgatggtttctcagacytcttagattgagaagatgtggcatgggtgtaaggtccctcaggtaattctgagggttgggtaggtctggtatctactcttttacttaattgacttcctccaggctttttttttttttttaatggagtccaggctggagtgcagtggcgcgatctcaacctctgcctcctgggcgcaagaaattctcctgcctcagcctcccgagtagctgggattacaggcgctggccaccacaccgagctcatgtttgtatttttagtagagatgggtttcaccatgttggtcaggcttgtctcaaactcctgacctcaagtgatctgtctgccttggcctcccaaagtgctgggattgcaggcatgagccactgctttctttttctttctttctttcttttttttttttttttttttttggaggtggaatctcgctctgttgcccaggctggagtgcagtgactgcaacctccgcctcccggattcaagcaatttttctgcctcagcgtcctgagtagctgggattacaggcgcacaccaccacgcccggctaatttttgtatttttagtagagatggggtttcaccatattcgccaggctggtctcgagctcctgacttcgtgatctgcccatcttggcctcccaargtgctgggatttcaggcatgagccaccacacccggcctggattaatcctcttaaagtgccrttagaatcatgtcccttctgtacttcgttacctgcagcatctcctcggtgcctaccagacatggcagcagactccagcttcacattcaagatccccatcctatcctcaccctgcctttccaatcatgtcgttccttgttactcagaagcttgacatagcaaccattctgactcagtggagttgagcaagaagttcctagaacaccttgctttccggcctctggaactgcgccagaagtcttttgcagtaaatgcagattcttcacctaagttaatggccccaactcagcagctgttgccaccctccctgctgagaatgaactaaacatgaagcctcctaggatttagtttgtgacacatctgatacatcgcctcttttactgcaaatatttattggatgtcatatctgtaagccttttctaggcagagattcattcattcwgtctgaatttattgagtgcctgctttgktctagtcattgacatagatgatagagatacagcagggaaaaaaaccaaagttccagggtctccctttgtaacgcaggctggagtatagtggcaccatcatagctcactgcaactcaagccattctcccacctcagcctcccaagtagctgggactataggcatgcaccatcacacctggctttttacatatatatatatatatatatatatacacktaaatatatgtattttttcaggctggtcttgaactcttgggctcaagcaatcctcccacctcagccttccaaagtgctgggagctgtgagctacacctgtgagatggcacccttgtcctgctgcatattttaagagttctgtttagtccatcaattgaggtcaggaaaatgaacgtgctgaaagataatatgtaatgataataatttgtagacataaatgccagccgtgtctgttaactatttcaggtgatattgtactaaatctctgaaatcacctgtgatgaacttttaaaataaataaaacttttaagtcacagtgtgattataatttttgtataattggtaggtaatgtgatgaaccaggctgtttatttaccattagattgttggtttgctataaatgaactacaccagcatgagagaaaacaaaacttccttaaagtgctaaaattaaatttttcatcattctgttacctttcaaaagctttccatttcatttttcccaggacctctcctcttgttcttctacttttgtagcggaaactgaaggtaatttgaaattttaacacatgggaattctctgaagatcttttctctactgccacatgctcaagtttgcaaaacaaggtagttgaacgtctcactgaagtaacccagctgtactaaatctattagttaaggcagagtgaatcagggccttcattgccaaaagtaatataatatcctgttcctggcctcttggagtggagcagatttgccaataacgtgaacactctaccatttttttttctttaagtacttaaaggttttggggccacctaggttccattaatgtattaccactcatattaaatgattatagtgtyaaaaatggtctggaaatttgtatagaccttcaaaatgctgtgttacatccacggtttgttctagaggttctctccttttctgggtaatattaacaaatgcttaagattcacattttggtaaagagatccatcagtgataaatgcccctgattttgaacccagaccaccctgctgttgaaattataagcagactttgtctccttccctaatcaatactgctgccttaaatttcccagtagccactttaaaaaaaaagaatgtgtttatttttaattgttgtaaagtatacataaactttaccattttagccttttttaatcttgcagaactgaaactctatacctgttaaacaataactcctcttttcttcctttacccagcccctggcaaccaccattttacttttctgttgctatgaatttgtttattctaagtacctcatgagtggaatcatacaatatttggccttttgtgattgattttattcatttagtataatgttttcaaggttcatgttggaacatgtgtcggtactttattctttttcatggttcaatcatatcccattatgtggatatgaccacatttcatttatcatcagttgatttcagttgttcctattttgggggtattatgaataatactgctgagaatattgatacacgagtttatgtgtggtcctgtgttcccgcttcccaattgcttatgtaactttttggacttttactgttctcccagtttgactggagcctggaggtagttgagaacagaccaggctcctaccaactccctcctttgaaaaaaaggaagcgtctagtttcccaagggactttcagaagaacatgcttagagtattcacaatgggaagataataaaggggagacataggatacatctgttttttgaaaagctggcctgttatttaagaataccaaggttgtggttttcattttacaagatattaccattatgatttgcatagaaagagattsttcaaatgtgactatctagtgactcttggcctccatggtgatggtaagagtgatttaagacaagtgtccttagagctgaattcttctctggatgtgatggaatcatctgactgacttgagatacgtacagattcttaatttctgtgttgctgcttcagctggtttggctgagccttttaatttttgaagaccatttcaaccttgggtattgaagttctggcactttcagatgtacgtagggaacatgctgctgtttgtttttagtgaatgccaaagatagagtttggtctgcatgggtagtgacaggagtgctgcatctcaggtctggagggtggcttcaagacccagctcgctcatgggcaagcagttgcttcacctcagctgctaatttgtaggatgagaagagtttagattaggcagctcctaggttctttcagtgattsagagtgctgctttttcataacagatttctgttgatggtgtgatttggaagatgaatctcaatcttttgactttcctaaggcctgcactggacacttgttttttagtttttggttttgttttgtttttccccctcatttcagaaacagaatgcttgtgttcctgcagttgaggagaccctgaagactggtgattgttacttagattccatccaaactatctttttcctcatcagctgaacaagctaattctgaaaaggcactgcatatttttaaaaatattttttatgtcatatgtatgaagtggatgccactgacacaaatgtatttttcaggagcattaattgaaaaataatgtccagaattagagtattgttgtctcactcgaccatctcctgaatatgtcacatccgaataacagtttatccagggaactagggagactgacaagctggagcttatcctttggagagtggcctatgagatcatggaaggaatggtgagaagaactgatcctggttaactgggagaagaggggcgtgtcttaaagttttgaaaggctgtcatgtgactagggaatttatagcctgagagctatgggcaggttacacagcgttgtaaagcataaacttgtgaacagaagctgtccagtgtggaatgagctgcctgatgggattttgtgcgccctcttacttgaggtgatcaggcaacaatctttcagagcatctttttttttgtagaaaggattcacacatgttgatggaaggtgacaaaaaatattactttgactaaacgtttttgtaaagaatgctatatttagataaataccatctttcgccttgcataaatttacactcctaactaaagaaatagttataaaaaatataaataattgataacagttaaaaacttgaagaaaatcagtgtttatttttggaggcagttttgtatttggttatcttttattatcaaactgggagaatagtaaaagtccaatgaagttagtaagaatagaagaatacagaaactggttacatttcctgcctgcttatctttattaagagtgttataatatgattatcctaggcaatataattgatgttcattattcagatttagctttcagtacatacgtgtgtcatcatttgcaaagtagttttctttcttatcttcctggttctctaattccctcacccccctttttagcctcagtactactgtacattttctagtaaacttaaggaaagaggatactaaactttattttcttacctctgtcttgctgcacagttttatctgctaatccagaagaacattctgcccctggatagtcagaattacgtgttttgtggattggggagggaggggaggaaaaggaggaggcatcagagctgcctttctatgaagagtttccggcatctggaagctcttttgcccaagcttataggagaatggaaatcagctacctctgttcagggcggtgtattttagaaaaagattgagtggggtgattgtttccagtctggctgtaggctctcaatcttaaagctgtgtaagattaattttttaaaatgcaaatatataaacctttttgcaactggtttgatttaaatgtagggcttaatggcacatgtaaagcaaataaagtatgttcactacttcagatgcaaatcctaaaataggaagaataagggcttattggctataagaagaaatagggttttaccgtgaccacagtttttgactcaatgagtgatatagacaggtattaaatatgttgctgaggtaaaggcaggaaggaaagaaaatgcacaaatacaagaatgatgtttttttctttcaacattttattttttagtttctgaaatacaaatcagaatacattttgttacataatcattttaacaagcttgacattttttcaatgtaagctgactcgatataggtactttaaaacttcctttttaaaaaaccatacgttttatcttggcaaatagctcatcaaaaaaaaaatacacgtgtacatgggaagttgtttttcattattttctagcacaacccccaacttaaaatttggtccactgaaatacgtaaatattcctcctatcacaaaaataaaatctcatggttggggaaaaaaacaactgtctggcataggcctgagtgagcttgagaaacaagttaggatgtttaactgtatggaggaacatcacggagtccacctagaaccatctagcagaacgactagcctgttgctattggagctattctatttcagagactgatacaaggtgcatgctcggaggttgctgaagattaacaacagccacggaatcacttactcagaattagccgaaattcagtatacaagaatatgtgacaacagtagaacagtcagcagttactcagtgcccagaaagcaagccgtaagtttagaataagaacctcagcaggaacaatagtcaacatgtttataagactttgaaggtgagaaaacatttgtagatgatgtcctgtgcccaagtatgttagtttccaggacactggggacagcatcacaacatagaaagtaagaagaaatccaagctgtttaaccttctaccattctcttgagtactaaacccagggcacctttggccacttgtggggtttcttttcttctttattctctatgtaaatattgctccttgggacaccagcagttttgcttcttccactcttatcacagactaagtgtggaggagtgttaccctcagtgtcttggatgattgtggatgctttgtagtacagaaggatatgaatcatcttgaagttacccttggctgtggcctggtgctttgctgtagcctcataatgatccttaccatctggattagccccaccttctagtaacatgagagcaatctcatgcctgtttttggaagctgcatgatgtaggggagtagagccattttgattgacagcattcacttgagcaccttttcccagaagggcttttacagtctcattctggccagcacaaacagcagtctgaagaggagaccaatctcgcatagtctttatcattcactggcactccaagttgaaacaaaaattcaataatttatgtatgtatggctgagcatgcccaatgcaatgcacttctgtcctggtcagttctcatagccaggggtttattggccagaatcctctccttcacctcctccagcttccctctgtaggccaagttgcagaccataagtttagacacacacccgtctgttttgctttcccaggattgatgttttctttctgattagtttttatcttaacaggtactaaatgtttccacagagacataacaaaatctgttctttaaataaataaaattatcgtcacaggtagcagttaactgatgctttgattctgttcatgagagtcaaatgcttgtccctcttagaaaattgccagcataacttaacattttttagttagatcattggtttaaggaaacttcaaaaatcttactcttaaaccccagtgggggttataagagatatataaaaattcttgcatcagcatcaattggaataatttaaatatcaaggatctgaaattcttacatagtaacttgggttgatgttatcaaaaaatgaaattgtttatattgtagtagcctgattgtcttcctaatttttattaacttagaaaatacagataccttttttttttttttttttttttttttttttttttttttttgaracagagtctcactyttgcccaggttggagtgcagtggcgtgatctctgctcactgcaatccccacctcctaggttcaaacgattytcaggcctcagcctcccaaatagctgggattacaggtatgtgccaccatgcccagctaattttattgtatttttagtagagatggggtttcgccatgttggccaggctggtcgtgaattcctggcctcaagtgatcaccctccttggcctcccaaactgctgggattacagacatgagccatggcgcccatcctgacagctgccgttttcttcactagtaatagcgtcattcctagcccttgattccacactcttctcttctcccaaccccaggtaaaagataatcccagagagactgtgtttttctttacaactttagggtagaaatgtttttttaaaaatcacagtgtgaactttattttctgatcctttaggtttactgtggattccctatcacttcatactttgatcagactaataataattggtgaagattttcagtaaactatcagaattctgctatagccatcaaacttcatgctttggtttgattgcccactaggcccagattctacatttcagtaacctgccacttttgcataaatttgcgtcatgggcttagtttagatgagtaactatttcgtggaggtacttgggggcagggaacctttttttctttcaacctgagcacctctagtttttatcttttttatatttcacctaagattcctttggaaacgggtttcacagcttttaaaaaataaaaagtttgaagctaggcgcagtggctcacacctgtaatcccagcactttgggaggccaagacaggcagatcacttgaggtcaggagttcgagaccagcctggccaacatgctgaaaccccatctctgctaaaaatataaaaaaaattagcccagcctggtggcgcgtgcctgtaatcccagctactcgagaggctgaggtgggagaatcgctggaacctgggaggcagaggttgcagtgagctgagattatgccactgggtaacagagggagactccgtctcaaaaaaaataaggtttgaaaatcactagtttaggctaagtgcagcttatgtttaggtgttaaccaggaagaagtaaggatccttgtgtagctctcagtgcaatattagatatgcttttcttagtggaaatgaaagttttgcattcactagtgtaactgatacattagtcatcactttgggttatgttcaggttttggttcccgaacattataaagtagcaaagtttacacctgcagttgaaggaaagtaggacacactatgacacactagatcctcacttggagtagtttaaaatgtaatctggacaagttggacttagaggctagctttttcttctggcttatctgtgcctgttcagaggtagctgggttgtcttttgcttatctaaaacaggcttatctttttgtttgttttgtctttctttcagatgatactagtaaatgcttttctgctttttttctgcccgtaaaaatacagactatatggtgccatccttgatgtggtagctctgcagaactaccatagacaagctccactaattcttggtgtgccagatcctgcagactttaccttgagcctgctaaactgggactgtcatctgttgggtgatgccattgcactccagcctgggcaacaagagtgaaactgtctcaaaaaaaaaaaaaagaaaagaaaagaaatctgggttttagtgtatccatcacccaaataatgtacaaggacatctttttcagttagtgttggtaggaaaattggattgccatagtgcagaagaatgaaactagacccctrtctctcaccgtatgcggaaatcaactcaagatagaaaaaagactcaaagtgagacctgaaactagggaaacctgggggaaactctcatggacattggtctaggcaaagaattcatgactaagacctcaaaagcacaagcaacaaaaccaaaaatasatgggacttaaactgaaaaagtttctgcacagatacaaatatcatgcatatggttttaatttatctgtagcctagggcctagatgaatcttagattttcattccagctgtctgactcttgctttgtaagaaagcacatgaataggatatgggcctggattagtaaaacgttaatgtttgggccctaatcagtagatgtgggtataatttgcaaagactaataggaatgagtatggctagttcactcaacagtgttagtctccagaattgaacgttggctgggcacggtggcccatacctgtaatcccaacactttgcggggccgaggtgggaagatcacttgagctcaagagttggagaccagcctgggcagcatagggaggacccctattaaatttttttaaaaaattagctgaatgtggtggcgcatacctctagtctcatctacttgcgaggctgaggcagaaggattgcttgagcctggagaattgaggctgcagtgagctgtgatcataccactgcactccagcctgggtaacacagagtgagaccctttctcaaaaataataataattgaatgtttacatgtagttcatcagatggcatgtgcttaccaaaaagctagttactctctatttatttagaggcagggccttactctgtcacccaggctggagtgcagtggcacgatcattgcccactgcagtcttgaactcctgggctcaagtgatcctcccacctcagccgcctgtatatctaggaccacaggtccacacccatgctttcttatagaaacataggtcttgctgtgttgctcagtctggtcttgaactcggccctctaacatgctgggattatgggtgtgagacattgcacccacacctagttactttcagtcgtaaataaaatacttgcaaatgttaattctgttattaataggtcattgagctttctctgaattctagaatttagggtgtttaactcttctcatatagtgttttttgtttttttacttcatgaaatcagagtcaaagcattttttagagtaactttcatctttcaaactcctgttctttctactagactcagttcacaagtgtaattattttgcataaataccctatcttccctcttatttattcactttctcttctgtgtccgcctgcccagtgggtctgtcaagacttttggttgtgggtgacaagaacttagcttaggcagaaacgataatgtgtgtgtttatatattggaaaaggctggcatagggaagtgctgttcttcgggcacagctggattgaggaccttaaacaatatcaataggaattgttccctttgcttccttcatgtgatggcaggtctcaactctccttttcagcgtcacgtcatccctgttcgggggacatgtccaactctactggtcattatcttacatagatgaaatattcttaactagtcaaactgagtcatgtgtactctgctctgctggaaaagtgactttctgtcttccatcaatcgtggcagaggcgtttccaagaggaggctgggcaggcaaaaacaggtgtctaaaccctactgattgagggctggctatgtgtattctaagctggaagaaatggactgttgaaggggaagaagaaccatgtcttactcatctctctattcctagcacagttgagtggctaagtgcaagtgctctgaaaatgattgtctaacagatgaacaatatataggtttgttaaattggatatttttctttttttatgtcatgagctgaaaggttcggctgaagggagctagttctccttggtgttggaataatgatgctcatctgatttcttttttttttttttttttttttttttttttgagacagttttactcttgtcgcccacaggctggagtgcagtggtgcaatttcggctcaccacaacctccgcctctggagttcaagcgattctcctgcctcagccttcctagtagtaggattacagacatgtgccaccatgcccagctaattttgtatttttagcagagacggggtttctccatgttggtcaggctactctcctgacctcaggtgttccgcccgcctcggcctcccaaagtgctgggattataggcgtgagccaccatggctggcaaattttttttttttttttaatggccatcctaatgaggcaaaagagaagggattagctatccttctgcatgtcaaaacccatctctgggacaatttttggcattagtgttaaggtttctttctccctaagagtaataattacctgtattttagtttttagctctctttgcattcgaaagtgaggaaagggccytgaatttcaggcagagacaatttcttatctattctgttcccacccctcagttacttaagtatggatcccttgtccacatttataaaggagaatcaaatagataactttttttttctttttttgcagacagagtctcactctgtcgcccaggctggagtgcagtggctcgatctcagctcactgcaagctctgcctcctgggttcacaccattctcctatctcagcctcccaagtagctgggactacaggtgcccaccaccacgcctagctaattttttgtatttttagtagagacggggtttcaccatgttagccaggatggtctcgatctcctgacctcgtgactcgcccgccttggcctcccaaagtgctgggattacaggcatgagccaccgcgcccagcctagataacattaatgaaccctggagccagctattgatttgaacttatgtttcttaacagcaagcagtagctgcaaagaaacatagggtccttctcttctttttcttatcacccataatgattgactgatagagtttggttgaaacttttttccaaagaattgtttggcttgttatagttcaaaacactcacaagaaagggtaacagtggccccttctgggatggggagctgcgtggctggagggataagagtgagaaggaagccttctttgcttatatttctgaattgtgtgcttgttttatctactgagaaaagtatttaaagcaaaaaaaaaaaaaaaaaaacagaaaaatctttgcaaatgcttttgaaggtgccagtgtatatgactgttacttcagctgcaaatggagaaaatcttagagaaatgatctccatgaacaaatgcatggagggcacactttgttctggagaaagggagattatggaatttccaaggttattaggaatgtcagaaatacgcatatgaagagcattataatctttacactgaaagttgtagaatgttctgagttaatgtgaacatacattcctggccaggcatggtggtgcacacctgtaatcccagcactttgggaggccaaagccagcagatcacttgagctcaggagttcaggaccagcttgggcaacatggcaacaccccatctctacaaaaaaaaacacacacacacacacaaaatatagccaggcgtctaggtagtgtgcacctgtagtcccagctggtggggctgaggtgggaagatcacttgtgcccaggaagtcaaggctgcagtgagctatgattacaccactacactccagcctggatgaaaagtggaaccctggccaggcgttaacgtgagttaacatgaacatacattcctggccaggcatggtggtgcacgcctgtaatcccagcactttgggaggctgaggcaggtggatcacctgaggtcaggagtttgagaccagcctggccaacatggtgaagccctgtctctattaaaaatacaaaaattagcacgatgtggtggtacgcgcctgtagtcccagctactcaggaggttgaggaaggagaattgcttgagcctgggaggcagaggttgcagtgagccaagatttgtgccattgcactccagcctgggcaacaagagcaaaactccgtctcaaaaaaaaaaaatgccgggcgcggtggctgtaatcccagcactttgggaggctgagatgggcggatcacaagatgggcggatcacgaggtcagatcaagaccatcctggctaaacggtgaaaccccatctctactaaaaatacaaaaaattagctgggcatggtggtggcgcctgtagtcccagctactcaggaggctgaggcaggagtatggtgtgaacctgggaggcggagcttgcagtgagccaagatcgtgacactgcactccagcctgggtgacagagcgagactgtctcaaaaaaaaaacaaaaaaaaaaaactggaaccctgtctcaaaaaaaaaatacagatttctcctagttgccaagcctacagcaagataacattttttggtacagcatttcccagtaagcagtgtcactgctttatttataagccttttaaattcaaaatagataagtaaacccaacaccaactctgtggctgaaataccgctttttataaattacaagtttcttacaactaagttcccttatgggcatactcactttttcagaaaaaaatacctaccaggcagtgagatgcttcatcttaatgtcttaaaccgactttttaagctgtgggtaggcacttagaagaatgggtttttctttcccccaagctgccgcttgattcttttttatgttttctatagactaatgaccccagtggtggctgcatttccaaatctttatgtctttgtttttctgagattgttgagccactcatccaggaggcagggaaaccattaatggctggcttctggacacatctgttatgaagtgtgaagcagagttaactcaggaagttcccaaagaactgaattttggcccatagagagtttatgaaatgaacagagaaacaagatgtctcttcccagtcttaggtatctgtgggcatccattttaatacctggtttcttcagaattagcctgtgacacttttctgtatttctgaaatatttttctaacatgtgcttctctctaaaagacctggtttgtagtaactgtatgtgttttttgtttgtctgtttttgagatggaatctcgctctcgccatgctggagtgcagtggtgcgatcttggctcactgcaacctctgcctcccgggttcaagcgattctcctgcctcagcctcccgagtagctgggattacaggcacgtgccactacgtccagctaattttttgtatttttagtagagtcrggttttcaccatgttggccaggttggtctcgatctcttgacctcgtgatctgccctcctcggcctcctaaagtgttgggattacaggcgtgaggcaccatgcccagtgtgtactaactgttttaaattaagcaagtgataaagaatttgctggttttaagccaccacaaaagatggtttaaaacaatttagcaataaaatttggacaaaaaataattgatttggtcttaatttatatcagaagtgacttctaagtctgtagttggcttcacaatatgcagattattagcatagcagagagagcaggggacaccatagtcattgcttcatagtgagcagcaattctatcttgagtatgataaggcctagaaggtttttttgaaatacttttcattttcggccccaattagactttggtacttcatatagaatattttgagacttctaagttagagtaacgtacccagtttcaaaatttctaggggttactctttgattttggtagatttcactctttctccttttattttccatttttttatagttaacgttgattttggattagaataataaatgaggcagcattttattacatttggattagttgacttgccatttacagatgatattggtattacagagtaacagcctttgttaattagaaaactggatttgcatatattaaattttaattcctggtgctttgtcttttgtttttgctgttttgggttttagaactactttatatcctgcgaaattgtgttagatttggattattaaattgatamatttttaccatattatgggaagcatttctgatctcattagaaaccatacatattctcagctgcccaggttttactgattttattttctcattaaagacaaacttctgttttaaggaacttgggaaagttgatatgaatttctaatttaatgtattaggtcattaaaataatttttgagttcccttagacacatacaggcttttcatttttttcaaaagtaccctccttaaagtctgtaacagttaacatttttgagtacctttgcccaggtacgttgcaggcaggggtggagtgggggcatgcattggtcgagtcacatatcattactgtatttagtttggggagtatacagaaacttaaggtttttttgtttttgtttttgtttttgtttttgttttaaagaataccgtagcagtaggcaggacagttccaattcaacaaaaacctctttaccctggcactcaaaactgtaatgatgatgaactggtaagcatttttctgttttcagatgttcaacatcaaaatgagaaaagcactaacacttgatttaaaaataattgattgctagtatttctctaattttcatcttgaagttcattactgaactgttgttaagtcttatcagaattatgccagattagactcatagtcaaaatgtcctgttaaaaactgggaaaatcagagagtacttattttgcctgcctgctttaagtattcaaaatatagtagatatgtgctcggctcagtggctcacgcctataatcccagcactttggggtgccaaggcaggaggatggcttgagtccaggagtttgtgagcagccttggcaacatagtgagacctagtctctacaaaaaaattttaaaaattagttgggcatagtggcgcactcctggagtcccttcctcttgagaagctgaggtgagaggatcacttgagcccagaaggttgaggctatggtgaatcgtgagtgcactgcagtcaatgaaccatgagtgcactgcactccagcctgcgygacagagtaagactctgtcttaagaaaaggaaggaaggatggatggatggatatatcaagccatatgcacatgaaagcaggtgtgtgtctgtgtgtgtacacactagatgaggatatctatgcaccttttttgtcagatgggtaggttttatgatcctrtcatcagtggaattagtaaatattacaagttgtacgtgttttgactttgacttaaatttttttttccaatagaaactatgttccaacttcctgtcaacaatcttggcagtttaagaaaagcccggaaaactgtgaaaaaaatacttagtgacattgggttggaatactgtaaagaacatatagaagtaagtagcatgtcatttttaaattttaacatgactcagcttctgatccattactttgtgtcagtggccaagatggctaaatcttagatgtgattctgaatttcagccacagcagtagcttcacgaaaacattctcaatagcattaacttgtgcctttctccctaaaatgggctttttcatttttgcatcctgaagcagaaggctaccattgaggacttaagcatgtcaggcgttgaactaggtgccgtaaagttgtctatacatttaatccttagaacaaccatggaggcgggaggcagtgtagcagttcttatctccacttcacagatgaagaacaaataaataggcccagccttgcagctgagaaagtggcagtgtctgtgggactcaaagcctgttctcattctgatacgcctgaatgttctggttgaccttcttctaattgttgaggcgtgcttgtgtgggtgcttgttgtctctttccttaggatttgagcatttgttgccccttttgacccatcatagactattactttcccccttgtataacagtttgggctttatgaactgtttttcaagctgttttattctatgagctttataacagctctgtgggatagccatgcagtggtctccttttcaacatctcactgttccaggtcttatggtttgttggtcagagcccctgattgaaaagaaatgtttgaagctgtttcccccactaacctttaagttctaggtggctagggaacatagctaccttgtttatccatttagccccagcacctagcacagtgttttgcacgtaataggtgatcagtaagtgtttgaatggaattggaagtaaaaaagcaaattcattcatacaacaggttttcttaatttgagttccactaataatacttgaagagtatggcatggaaacagaagctgctcaaaagttgacttctctagtcacgttgttccaagtgtggaagtagcccttctccaaccccagagttcaggtagatctgcccaaatgaaacagtccattcactttgcactctgtggggtcatcttcatagaaataattaataccaacatcacagtacatttctgtcatgcatttgatttgttcctcctatgattatttatgtgtagacttcattttccaccttgaactgtgaactttttaggaacaagtgggattttaccctaagacttttaatcttcctagtctggagggaagtggaccattaaatttttacatgagagtataaatttaacatcatactgcttaactttctttgaatagctttctttctgcctttttgggtttgaaatttgagttttcttcctgatctgatctcctgccccctcccctcgaaaaaaatcttttttttgcacagaaccagaaatcatatttgcagtgctgtaagcaaacattgctattttagacaccattccagtactgtaactgacgagttagagtacagtactctaatgaaaagtgctttgatattagtgtgtggctgaattttttacttaattagaacttccagcaatttccttggaaacctgactgaccatcaggaaagtggttggttgatataaaatgtagactgcaacttccatatgcctttttatatttaagagccttatcactcctagtttaagtccttgttgacgttggttttcctgtgcctctccccatcttagttaagaggtgagatttacatgtaagattgggttagcgtttataccactatgtttttgtaaacttatttcactgttttctaggattttaaacaatttgaacctaatgacttttatttgaaaaacactacatgggaggatgtaggactgtgggacccatcacttacgaaaaaccaggtaagtggcacaggagacttcctcagatggcagcatgcttggtatactcccttttcagctctaggccttttatagcggtgcagtgattgcgggcaagtgccaaacatcgaaagtgtcaaaattgcatttcatattttcctgaccagtgggaagactaagaaaaactttttgtccttttttgtcattggactaaaacttgaggtgtaagaagaaacaaaattttgttacttaaaagttacgaagcctgctgtatcccaccatttcccctaaaagtgctctggctctatttttctgcatctgtgttgccattcttgttttttctgcacagaaaaagacaagacccttccttacatttaagcttttcttatttccctatgttgatggcacccaacttctatgggaggcctggggaagtgactctgtaggatgtcagtgacagagagataaaacttcttacaaattggcattaaaaacaatattagcactgccagcaagtatcaatagatgatgatgatgtcatataggtgatatttccttctgcatagagagaggtaattgtcaatttaatttttaccattacctattttaggagtgattctcattctgcattaatgatctgttcatctatcggaacatacttttcaggaaattagtactcagatatttgacttttttttttttttttttttttttttaaataccccaggcaaagttactaaccagcagtcttagaatgagaatgctttccagtgggacacatcatttatttaattcagttttatcaatctgaaagcctcatagctgaatactaaagaagagttgagctttgaggagaagcagagtatttcatcatggttcaaaccagtatctgaaacaagtaggtttctagggagaaaagataatctcttaccaagcatgtcagttcacctgccttcatcaaaggactgactgcataggtgttaacaatcataattctgaaagttgctctttgatatcagtatattctataatgtattattggcttttaaatacctcaccctcctcacagtctgtaggacatttttatttaacttcttgatttgaatcaaagcagctattacttcattagctcttttgaagtgttcttggttgagaaggaacagcaaggcttatagaagaaagccaacttttcaaatcagtctttcttttgatcagcgctgaatctgatactacactgtactttaatcagaggaaaaaatggagatttgccttttttctatgaaaatttatccataatgaggaaaggaataaaagatatagctttatctcttgtaattgtctaattgcactaaaacatcgtgggccctgaattttaccgcagtcattcaccacataacgacattttggtcagtgatgaactacatctacgacagtggtcccataagaatataattgagctgaaaaacttgctaccttatgacatcatagcgcaacatatgattcatgtttgtagtgatactaatgtaaacacacctgtgctgccagtcatagaagtatagcacatacagttatttacagcgtataataccgtcgtgcattgcttaatgatgggatgcattctgagaaatgccctgttaggtgatgtcattgttgtacaaacatcataaagggtacttacacagacctaggtggtatagcctcctattacccctacgctatatggtatggcctgttgctcctaggctacaaacttgtatggcatgttactataagagaatactatatactgaatactatragagtgattaacacaatggtaagtatttgtgtttctaaacatagtgaagcatagaaaaggtacagtaaaaatgcaatataaaagaaaaattggtacacctatattgggcacttgcgggactggaagttgctctgagtggtgactgaatatgaagggacattattgtacatcactgtagactttataaacacacttargctacataaaaagtaaaactttaaaattcttaacttctgaatcttttgtaataacacttagcttaaaacacaaacacggcaacctgccygggtccccttccacactgcggaagctttgtcctttcactcttcataatgaatcttgctaccgctccaaaaaaaaaaaaaaaaaaaattgtacagctgtataaaaatattttgtcttcatatgcttacaggctttttcctagtcttaaactttttttttttttttaactttttaaactgttgttaaaaactaagacacagacataattagcctaggcctacacagggtcaagatcaatggtattaccattgccaccttcacagcttgtctcactggaaggttttcaggagcagtaacacgcatggagccatcatttcctgtgatggcagtgtcgtcttctagatacctcctgaaggatctggctgaggctgttttagagttaactttttttwaaaaaatatagaagtaagtggtacactcaaataatgattaaaaactcattaccggccgggcgctgggctsatgcctataatcccagcactttgggaggccgaggcaggtggatcgcctgaggtcaggagttcgagaccagcctggccaacatggtgaaaccccctctctactaaaaatacgaaaattcgccaggtgtggtggcagatgcctgtaatcccagctactggaggttggaagtgggagcggggaaggcaggagaatcgcttgaacctgggaggtggaggttgcagtgagctgagatcgtgccatcgcactccagcctgggggacaaaagcaagacttcatctcaaaaaaaaaaaaaaaacctcattaccaaaatccttgcatacttaagtcccacagttggccctggagaacctgcatataccaaaagctagccctctgtataagagggtttgagcatcccaagaatactgtatctttgatctacatttgtttggaaaaaatccacatataagcagttcaaacytatgttgttgaagagtcaactgtatagtaaatactaggtgacagaaatttttcagccccgttataatcttgggggaacatagtcccatatgcagtctgtactagacagaaaacatcagcacatgacttcctgataatgacagttaaaaaccgtattgccagtttatgtatttactatatatactttttattttagagtgtactcctactttttaaaacagcttttcatggtaactggtagcagcctcatacagcttgtgttcactgtgtctcttgattgcatcattcttgtgcatggtttaatctcatggtattttgttcatcatggcccctaagcatacaaaatccataatgttgccagtaaggggccatgttgagtgattgacctggaaacagaagtgattaaggactacgaaggtggagaatcagtgatggttatttcttgccagtcaggcttgtcccattttaccatagctatgatcttgaagaacaagaacaaagtgacagaagctgttaaagcatctgcttcattgaaggcaatgagactaacaaaaattcaagaagggcctttatcagacacacacaagcttctgatgacctggattgaagagcagacacaggtgcacacggtgctgtgtacctctcagcaccatgatgatcccaaagcaaaaagtgtgtttgaggtgttgaaagaaaaggctggacctggctgtgatgttgaattgactgctagttctgggtggtgtaaacaattcaagaatcgttattcattacataatgggaaagtggtgagtttgtgagtgctgatgtaaaggcagcggaagaattttgggaaactctagataagctgagtctggaggaaaatcacttgccagaacaaattttcaatatggatgaaacctttctattctggaaacagatgcctgaaaggactttgatccatgaggtagaccaaagcaatgccaggcttcaagtcttttarggactggatgacagtcttgcttgggggcaatgttgcaggccacaaattgaamccctttgtgatttggcatgttgagaaccctaggggcttcaagcatatcaatacacacacacttggccagtgcactgcaggagatataagaagtcgtgggtgaccctgctcctctttcaagatgccctcctgaatagatatgcctgcgaagtggagaagtagtattgagagaataacatacccttcaagcttttgcttattgtcgctgataagcaaatgcctcctttaagtggtgtttttcatcccagtatcaaacaccacctctttgatccaactgatggagttacagcagcttttaaggcgtactatctgagaaaggcctttgtcctgtcgtcgcagcttagggagacactgagaagattctgatacaattctggaaggattgcaatatctgtgactgcattaagaatcttgcttgggcttgggttgatgtcatcaaggagtgtatgaatggcatctggaagaatacactcaagaggtttgtccatgacttaaaaggatttgcataaatcacaaagtctgtgattgagatggcaaacaactttaaccggggtgtggatgaggacaacaggagctcctagaggtgattcctgaggaattgactggtgaggagctgtgggaactagaacaagttcccgcataggtgaagaggaaagagaaaaggaaactgcaggaaaagcaaaagaagaaccctcaagaaaattcagtgaaggatttagcagtgcagacctcagcaagctccttaagtctgaaaacacgtggccgggcttggtggctcacgcctgtaatcccagcattttgggaggccgaggctggtggatcatctgaggtcaggagttcaagaccagcctggccgacatggtgaaaccccgtctctactaaaaatacaaaaaaattagccgggcgtggtggtggggcgcctgtaatcccagccacgaggctgaggcaggagaatcgcttgaacccgggaagtgcaggttgcagtgagccgagattgtgccattgcactccagcttgggtgacaagagcaaaaaaactgcatctcaaacaacaacaaaaaagtttgaaaacatggatctcaataccaaaaggtttttattaatagagaagaatattcatggttcattatctgcttacaatcaaatctatgatgaaaaaaggaaacaaagcaccgtgggcttattcttggtaagtgtgagacctcctcaagaaaagcctaaggcaggtccttctgcagttatccagaagaaggcattgttaccatgggagatggcagttccatgtgtgttactgttcctgaagaccctccagtgggacaagatgtaaaggtggaagatagtgatactgttgattctgactctctgtaggcctagactaacgtatgcgtttgtgtcttagcttttaagaaaaaaaatgtttttaaagtttttggtttttttttgagacggggtcttgctcttgtcgcccaggctggagtgcaatggcacgatctcagctcactgcaacctcagtctcctgagtagctggaattagaggcgcctgccaccacgtccggttaattttttgtatttttagtagagatgaggtttcaccatgttggccaggctggtgtcgaactcctgtccttgtgatccacctgccttggcctcccaaagtgctgggaaagtttttttttaaaacaaatttttttaagcttatagaataggcatatgaagatagaaaatatttttgtacrgctgtacaatgtgtttgttttgggggtttttgtttgtttctgagacggagtctcgctgtgttgcccaggctagagtgctgtgctgtgatcttggctcactgcaacctctgcctcctggattcaagtgattctcctgcctcagcctcccgagtagctgggattacaggtgcctgccaccatgcgcagctattttttttattttcagtaaaggtagggtttcaccatgttggtcaggctggtctcaagctcttgacctcaggtgatccacccgcctgggcctcccaaagtgctgagattacaggtgtgagccactgtgcctggccaatctgtttgtgttttaagctaagtattactacaaaagagtcaaaaagttaaaaatttaaaagtgtataaaccacagcaagctgaggttattattgaagaaaaaatattttttagggctcggcacagcggcttgcaatcccagcactttgggaagccaaagcrggaggattgctcgagcccaggagttcaaggccagcctgggcaacagagggagaccctgtctctacaaaatttaccctagtgtggtggcacacacctgtagtccccaggactgaggcggaggtgggaggatcgcatgagcccaagaggttgaggctgcagtgagccgattgtgccactgcactccagcctgagcaacaaagtgagactttgtctcaaaattttttttttagtaaaacttgtgtagcctaagtgttcataaagtctacagtagtgtacagtaatgtcccaggctttcatattgactcacccagagtaacttctagtcctgtaagctttgttcatggtatcatttatcttttacattgtatttttactgtaccttttctgtgctcagctatgtttaaacatacaaatatttaccattgtgttaatcattgcctatggtaatcagtacagaaacatgctgtacaggtttgtagcctaagagcaataagctatgccatgtagcctaggcgtgtagtaggttctaccatctaggtctgtgtgaatacacacttgaggatttcacaccatgatacatttttcagaatgcatccctgtggtttagcaacacatgactgtatagtaaacctgaagtctttagtaacttccttcatttaggttattcttgttatttctagctgcaaaatgtttatcttcaagtcatttgtctttggtttagctaaaatgtgactttttttccctaaacattgagaaagaacttagcatttttttaatttacactgacaaaaatatttggtttaagatagctttttttttgagtttctattttataaagttactatacaaaaggggaaaacatactaaaatcagtgcttttttttgagacagtttcgctcttgtcgcccaggctggagtgcaatggccgatctcggctcgttgcaacctccacctcccagcttcaggcgattctcctgcctcaccctcctgaagtagctgggattacaggcgcccaccaccacgctcagcttatttttttgtatttttagttgagatggggtttcaccatgttggccaggctgctcttgaactcctgaccttgggtgatccacccacctcagcctcccaaagtgctgggattacaggcgtgagccaccacgcgcggcctaaaatcaatgcattattaagaatatccgggggggatctggaatctgttaactgcctatctgaagtggcattctaattctagtttttgtgtttactttaggactatcggacaaaacctttctgctgcagcgcttgtccattttcctcaaaattcttctctgcctacaaaagtcatttccgcaatgtccatagtgaagactttgaaaataggattctccttaattgcccctactgtaccttcaatgcagacaaaaagactttggaaacacacattaaaatatttcatgctccgaacgccagcgcaccaagtagcagcctcagcactttcaaagataaaaacaaaaatgatggccttaaacctaagcaggctgacagtgtagagcaagctgtttattactgtaagaagtgcacttaccgagatcctctttatgaaatagttaggaagcacatttacagggaacattttcagcatgtggcagcaccttacatagcaaaggcaggagaaaaatcactcaatggggcagtccccttaggctcgaatgcccgagaagagagtagtattcactgcaagcgatgccttttcatgccaaagtcctatgaagctttggtacagcatgtcatcgaagaccatgaacgtataggctatcaggtcactgccatgattgggcacacaaatgtagtggttccccgatccaaacccttgatgctaattgctcccaaacctcaagacaagaagagcatgggactcccaccaaggatcggttcccttgcttctggaaatgtccggtctttaccatcacagcagatggtgaatcgactctcaataccaaagcctaacttaaattctacaggagtcaacatgatgtccagtgttcatctgcagcagaacaactatggagtcaaatctgtaggccagggttacagtgttggtcagtcaatgagactgggtctaggtggcaacgcaccagtttccattcctcaacaatctcagtctgtaaagcagttacttccaagtggaaacggaaggtcttatgggcttgggtcagagcagaggtcccaggcaccagcaagatactccctgcagtctgctaatgcctcttctctctcatcgggccagttaaagtctccttccctctctcagtcacaggcatccagagtgttaggtcagtccagttccaaacctgctgcagctgccacaggccctcccccaggtaacacttcctcaactcaaaagtggaaaatatgtacaatctgtaatgagctttttcctgaaaatgtctatagtgtgcacttcgaaaaagaacataaagctgagaaagtcccagcagtagccaactacattatgaaaatacacaattttactagcaaatgcctctactgtaatcgctatttacccacagatactctgctcaaccatatgttaattcatggtctgtcttgtccatattgccgttcaactttcaatgatgtggaaaagatggccgcacacatgcggatggttcacattgatgaagagatgggacctaaaacagattctactttgagttttgatttgacattgcagcagggtagtcacactaacatccatctcctggtaactacatacaatctgagggatgccccagctgaatctgttgcttaccatgcccaaaataatcctccagttcctccaaagccacagccaaaggttcaggaaaaggcagatatccctgtaaaaagttcacctcaagctgcagtgccctataaaaaagatgttgggaaaaccctttgtcctctttgcttttcaatcctaaaaggacccatatctgatgcacttgcacatcacttacgagagaggcaccaagttattcagacggttcatccagttgagaaaaagctcacctacaaatgtatccattgccttggtgtgtataccagcaacatgaccgcctcaactatcactctgcatctagttcactgcaggggygttggaaaracccaaaatggccaggataagacaaatgcaccctctcggcttaatcagtctccaagtctggcacctgtgaagcgcacttacgagcaaatggaatttcccttactgaaaaaacgaaagttagatgatgatagtgattcacccagcttctttgaagagaagcctgaagagcctgttgttttagctttagaccccaagggtcatgaagatgattcctatgaagccaggaaaagctttctaacaaagtatttcaacaaacagccctatcccaccaggagagaaattgagaagctagcagccagtttatggttatggaagagtgacatcgcttcccattttagtaacaaaaggaagaagtgtgtccgtgattgtgaaaagtacaagcctggcgtgttgctggggtttaacatgaaagaattaaataaagtcaagcatgagatggattttgatgctgagtggctatttgaaaatcatgatgagaaggattccagagtyaatgctagtaagactgctgacaaaaagctcaaccttgggaaggaagatgacagttcctcagacagttttgaaaatttggaagaagaatccaatgaaastggtagcccttttgaccctgtttttgaagttgaacctaaaatctctaacgataacccagaggaacatgtactgaaggtaattcctgaggatgcttcagaatctgaggagaagctagaccaaaaagaggatggttcaaaatacgaaactattcatttgactgaggaaccaaccaaactaatgcacaatgcatctgatagtgaggttgaccaagacgatgttgttgagtggaaagacggtgcttctccatctgagagtgggcctggatcccaacaagtgtcagactttgaggacaatacctgcgaaatgaaaccaggaacctggtctgacgagtcttcccaaagcgaagatgcaaggagcagtaagccagctgccaaaaaaaaggctaccatgcaaggtgacagagagcagttgaaatggaagaatagttcctatggaaaagttgaagggttttggtctaaggaccagtcacagtggaagaatgcatctgagaatgatgagcgcttatctaacccccagattgagtggcagaatagcacaattgacagtgaggatggggaacagtttgacaacatgactgatggagtagctgagcccatgcatggcagcttagccggagttaaactgagcagccaacaggcctaagtgccaggttccctggcgttggtgacatgctgcagcctggaactctgatmtccagtgtgactgcaaagctgtcttctcactggtactgccttgtgagtactggttggactgtggggcatgtggccgctgcagttccagtggttatttctaagtctatgacaggacaggctgttcttgcttcagaaccttctctgacagacacggtaactaaatgtgaaaaaccaataagctggtgactcatgaatacacacgaggaaaagcagaggtttattttatctgccttttcaacatttctttccctctgtgaaatgattggtcagatgtctttgagaagtgttaaactaattcacatggtagtgtagggccaacatacaagctaccagtctaatgtgtatagtagactttgggaaaagcgattttttttcatgtattcattctgaatagttgaaatgtatatttgtacagtcttttagacctattcaagtgatgctcatgatcctgttactgtgtgcccatcatagatttctttttttagtgttgcccttgctgtgtaataaacgctctatctagtttacctagcaaaagctcaaaactgcgctagtatggactttttggacagacttagtttttgcacataaccttgtacaatcttgcaacagaggccagccacgtaagatatatatctggactctcttgtattataggatttttcttgttctgaatatccttgacattacagctgtcaaaaacaaaaactggtatttcagatctgttttctgaaatcttttaagctaaaatcacatgcaagaattgactttgcagctactaattttgacaccttttagatctgtataaaagtgtgttgtgttgaagcagcaaaccaatgagtgctgcattttggatatttagttttatctttagttcaacaccatcatggtggattcatttataccatctaatatatgacacactgttgtagtatgtataattttgtgatctttattttccctttgtattcattttaagcatctaaataaattgctgtattgtgcttaatgtaaatatttgctttattacacatgacagtcctgtgtgtccattatatcttttgccatttaatgccataactctttcatcagagatggcagccacagtcacagaggaaacttgtggaaaacccaagatctgtcatctgcaaatagaatgctttctcttgaggcacctggtacaaaatctgtttttktttttttttttttttttttttttttttttaactgaaaaacaaacacccttgagtttttcagttcaccttttgttaaggagcagagcctgcatatatatgtaaatgtctcaatgataaaaaaaaaaatgtaaacatggattggcattaatttgcaagcagaatcttaatagcctgatgggttttttgtttgttttttcttctagatgaagttaaacgttcgttttcaccttacgatgggaacaactgtagtgcaggcggctctgcctctatttgccactcttggccctcttgctattaagggaaaggctttgaagagcacagcactgacagggctgtaaagatggaaggagctggtatttttaccatgcgtagattcccaagagaacttgtactaaaaagcagaaagttacaaggaagcagaattaggccaacatttccagcaattaaaacaatgatgggaaactccaatccatgaggaggctggtcagtcacctcaaggatastggcctaaagaagtctgaagtggctgatgtccataacttctgagtctgtttccaaaagaaagactcttgttaatgctgttaccagagagtagagatttgaccagcctctccctaaaatgtaagcttctcaacaacagtacaggaagaagtgcaagagtagactagaacctttaaggaatttggggctggaacggagctatgttgcatctgttgttatacaggtagattataagttctacatgcaccagccaaaacttaggacaggatgtccccaaattaagatactacagattaccaaatcagaaataaccagctggatttaggccagctcacatttatttggaaattaccctccctgattaacaggcttytgagttgtacgtggaggactaatgagacttgtacaagacaccacggggcttggggtccaggtcccagttggatatcggaacagacacagataagtgtgtttcctcattaaggtggtgagagtgtgccttttggcattcagaaaagggtttagccmccctaagagttggaaataaagattcccaactggaaatgttgcagaatccctacaagtgtctcaataaaagccattttaaaagaatattgttgctactgtttgcttttcaaataatctggagatcgttggctatggcaacgtgctgccacctaattagagaatgcctgtaaatgtaggctgaacacttctaacatgagaaaacctaagtatcctacagaggtttggtgtgttttgtttttgtgggtgtcgggggaagggggtggggaggcgtgtttttggccctgcaggttttctcgtgggaatgagttcactcagacaagctaggactgtggcttctttccctgttcatcacatagagcattttctcatcctatctttggttccttgtcattgtatagggagaggagaatctttatcaaacagcttcattccctcttgcaattcaagcagaaagggtatctatgcctcatatcgctctagagttgtatgtcagtttgatcccaatgcctactcctttgtaacatccatttctggcatgaacaaaatgagtgccaaatttgaaaactgcgatgtattaaagatgggagtttcccatctgagatgcttcacgctagaaacaaacctgcttattgccaaataagtactaccatacagaagtgtagttcctttactacttagacctcagactactagtactgagtcctcgagatgagactcaagaattatcactaggtggttcgtttttttgtttgtttgtttttgagatggagtcttgctctgctgcccaggctggagtgcagtggcgccatctcagctcactgcaacctccgcctcctgggttcaagccattctcctgcctcaccttcccaagtactgccgggactacaggcacgtgcccccatgcctggataattttttttttttttttttttgtatttttagtagagacagggtttcaccgtgttagccggaatggtctccatctcctgaccttgtgatcgacccgcctcagcctttcaaagtgccgggattacaggcgtgaaccaccacgcccatccatctctacatggttctatgccactaacatttgagaaccatttagcttgatggaaattttctttccctaatgaaattaagtagaacatgttgaacacgtggattttgcagagtatcaggcagcgttttgttttgtttttctgcctgttgtgacccttccagcccccctgctgagcaataattaggtgccagttgaggcatgtttcaccaaaatgtcatggaggaacatctcaaaagcttccagaagactagaaatgaagaggctgctcccaccattaggaaatggcattccaacataccaattatcagtgggtcaccatgaggtaatctagaagaaaaacatcttagctgatacaaacttgacaggtttgaaaataaaaggcatttctcccatctgctgcaaagttggcttgaaagcttgaccaaagcaaggtccccatttgctaattctttgcatcctgcttcccaccaacttgtaccacttcggtaacggactactcgctgtaacttgaatgtagtggagctacagtatagggggggttgtgttttaaagtcagcatataagagttgcatatagtcaaaatcacccccgaaagttcttgtcattatttcaaagtgtccaaccaagaggaggggacgcgggaaggaaggtccctagtcatttccagaacaaatcttccacgctatttaatgagtttggctgcatgtgtgtgttttcagcatacagcgttaatggatctgtgatgcaaaccccttccccatccaggacaccacctaaccttaaggtgtaagaccattcgaacctgaactggtttttgcaattaaaaatccttattttggccgggcgcggtggctgacacctgtaatcccagaactttgggaggctgaggcaggtggatcacctgaggtcaggagttggagaccagcctggcctacatggtgaaaccctgtctctactaaaaatacaaaaattagccgggcatggtggtgggcgcctgtaatcccagctactcaggaggctaagccaggagaatcacttgaacccaggaggcggaggttgcagtgagccaagatcacgccattgcactccagcctgggtgacgagtgaaactccgtcttaaaaaaaaagaaaaaaaatccttattttatttatgtacctttaatgatgtcttattactataagtgaagcaaaatggatactctaataagcagagcaggcaccttttaggaaccataaagcagaagtaaaagggcttttccaatatacttgatgtgagtgctgtactggctgccatcctagactgcagtgggacgtgacagctgtgtacatgaagtagccagtctaggaatcaaaagtagagatcccgccttggagagatggaggaagagacagtggcatgacttagccattgccactccgtctgccagcaaagctggatcagcatcccctggggaagctcaactagaaccctctcccccaaggacaggactccggacaaggggctccgctacaccctacaaggacaatattgttcctaaaaacacctgaatcttaggcatcgtgaatacacagctaaccaacgggtattttcagaacggatgtgtagttctgggactaattgtaaagcactggaatccaaggtatttgagtcctcaaaaccgtccaaccccaatcctccgcactctcctccaaaaacccccaaaccttgtattgggagtaggaactccaggtttcaggtgctgacatggaggtgcagagaagctaacttgtcctgacatctcagctggcaaaggggaagctgctgactaggacatgggatatctgagtccacagccaccggtatttccggccacaccatgcacctgggcctaggatagagactggccttggaagaaagttggctgctgctatgaatgaaaagatgtgtgagccccattctcacagtgttcagtccctggctcagcgttccccaaactgactcacactccaccaccattgtcagttgtgccacatctgcctcacaactgctttatgttcttagtatgtctcaactcccgccaccacttttttggggggacagggtctcctttgtcacacaggctggagtgcagtggcacgattacagctctgcagcctcaacctgctgggctcaggcaatcctcctgcctcagcctcccgactactgggattacaggtgtgagccaccatgcctcaccctcactcccccttttaaaggaaaacgatgtcaccaaaaagcaaaatcaccataatttgccacaaattcagatgaccataaaagtgactatgaaagtaaatacaagacaaacattagatttttgctacctgttatcgcatgctgaggctgcaagcctgagacttgcgctattaaaaaggaaaatccggccgggtgtggtagctcatgcctgtaatgccagcactttgggaggctgaggcaggtggctcacctgaggtcaagagttcgagaccagcctgaccaacatggagaaacccccatctctactaaaaatacaaaaaacttcagccgggcatggtgacacatgtctgtaatcccagctactcaggaggctgaggcaggagaatcgcttgaaccggggaggcagaggttgtggtgagccaagatcgtgtcattgcactctagcctgggcaacaagagcaaaattccgtctcaaaaaaaaggaaaatcagagcagggtcccaggtccataagcaccaaaatgagcctcagcccagacccgccttatcccaggatgactctgctacctctagcatgccggatagtgctgagctaggggctgacagatgggcttcaagcccagcctgggctctggctccaagagctgctcagggaactctgcttcctttagcagtgactactcactttgctttgcccaacctcagacccttttatattaattaggactctcactggcaggtaacgggaaatccagctcagacggtgcttaataaaggtgacaagggggcaactggctgtgtctggggagggcaagctgctcagggacatcaccaaggattcaggttttctgtctccatcctgccacccacagggacacttcatcctaggcaggcaccccggtattcatagggtgccttccacttacctaacctgagaggtttccccttcattcagtattaagaaagaatcctgaattctaagccaactggaccattccagaacatccgactaagctgatgggcttagtccaaagctacctggtcagtcactgagctagcattaccctggttggcttagactagtcaggacccatctctgaagctcgggtgaaagcaattcaacccaaaaccggaaaccaattcaaaaccaattccatgctacactcagaaggtgcagagcgatgctgaggacccagcacttcaaaggaagccttgtgccatatgaaaaccagataaaaggtgcaattgctccaactcagaagacgaagcaagttctgaaaaatctcttgactggtattctttggaagcaagtgattcccagccctggctacatactgaaatcacctgggggggtttaaagacaggtgatctaagtttccccctcccctgcttggagattctgatgtaattggtttgaggtgtggcccagctgattcccagacggaactggtttaaagggatgcgcagtgaacgtgggctacaagctccagccttcccttgaatagtatgtctgctccaggcagtttcctttgagaccacttattctttttccccgccactcaacaaacacctgctagcagcctaagaagaacctgtacactcagagatgcaacctgcatgtagaaaaccatttcaagagtgtagacttgccccaacatctcctcggttcatcccggcaacaaggagaccgtggcctaagctggaatccttaccttctgggtagagtccccactgcagcagcaccaggcttggggatgccaacagaagacccgctcctccaggtctcctccctttcattcacctcggcctggctcctccagatgaaactccgcccattacgtctaaaacggagcatctccgtggaaggcccagtgagaaacccctcctggttgaagaggctggcctcgggtgctcatgcctcactggtttggtttttaaggggaaccgtatgttcattctgaccaaatataatgcttgtgtcccctgcagtcctccccttaactgcttctccaaacccagcatcatgagcagtccttaaagcacactctgccagaaggcccagcaaagactgcagaggccagcctcagacctgctgccctccactcactcctactgctgcaagcctgaaatgcatcaagctgattatcacctgtaagaatttccaggcttttgagcccatagcaagcccagggaactcagagaggagattctgtgacagctgcttgaaattagaactacttgcaactccttccaaagatgtttgcactcttcaccataatgcaaagtgggatttagtgggattttgctttaagatggagaggaaggttcctggaaacctgtagctgcctgagtcaactaaacatctccaaggagttggtaaaccctgtaagcagacattgtggggtacctgtctagcttctaaccttcccaagaactcccctttttaccccaagaaggagagtttttatcataagtaggtgttggattttgtcaaatgcttattttctgcatctattgagatgatcatgtggtttttgtcctttattaatatggtgtggtacactgatcttcagatgttaaaccaaccttgcactcctggaagaaatcctgcttggttatggcgtataatccttttttatatgttgctggattctgtttcctgatattttcttgattttgcatttgtattcttgtggaatattggtgtagctttcttacaatgtctgacctggtatcagtcacctcccaaaggagagccctggacagcacacacttctctagtgggaccccatgcctcatcctcagggagtttgg

SEQ ID NO: 98056 - DNA, 99169 bp, Homo sapiens
  misc_feature (1)...(99169): n = A,T,C or G
ttttcttttcttttatttatttatttttttttttttgagacagggtctcactctgtcacccaggctggagtgcagtggcatgatctcacctcgctgcaacctcagcctcttgggttgaagcaatactcatgcttcagcctccccagtagctggaattacaggcacataccaccatgcctggccaatttttgtatttttagtagagacagggtttcgccatgttagccaggctggtcttgaacacctgacctcaagtgatccgcgcacctaggcctcccaaagtgctgggattacaggaacgagccactgcgcccggccctactattttcaagagtagtctgggcaggtcttttagagggcttgacactggagcacagacatgagggaaccgaggaagcaagccataaagatacctggaggaagagcaggagaaaatgccctgagatgaaagcatgctttaaggcaggaaaacagagtctggagtcggggaacaaaaggctgattcacacttcagctatgacaggaaatatcctctccatagggtgtaggccaagtaaatgactttgtaactttacttcatccttttcatttacatagggcgtgtcccaagtagagggtatttaaactcccaaaaattctgtaacaggggcccttgagctcctatgcttgggccccctcccacactgcggagtgaattggtgagatggagtcttgctctgtggcccgggctggagtacactggctcaaactcggctcactgcaacctccacctcccaggttcaagcaattctcctgcctcagcctcctgagtagctaggattacaggtgtgcaccaccatgcccagccactttttgtatttttagtggagacggggtttcaccatgttggccaggctggtctcgaactcctgacctcgtgatccgcgcgcctcggcctcccaaagtgctgggattacaggcgtgaaccaccgcgcccagcccatactttcattttcaataaattccttcattccttcttgctttgtgtgttgtgtccaattctttgttcaagatgccaagaacctggacaccctccaatggtgacagctgagagggaaaatggtgagagatgaggctggacaagtattcagggggcagttcacttccagccttgttgatggtgacaacaactctacatcttattctaaatgtaatggggaaacagttgaaagcttttgagcaggtgagggacatggtcatgcttacttttttttttttaagctggagtttcaaaaaaaagccttcagccaccgcgccaatcatgtttacattttattttatttattgttttgagacggagtctcactctgtcaccaggctggagtgcagtggcgtgatctcggctcactgcaacctcggcctcccaggttcaagcaattctcctgcctcagcctcccgagtagctggactacaggcgcacgccaccacgcccagctaatttttgtatttttagtggagacatggtttcactatgttggccaggatggtcttgtactcttgacctcgtgatccacgtgccttggcctcccaaagtgttgggattacaggcataagccactgcgcccggccgtgtttacctttcaaaaggatcattctggctgctggttggaataaagactggagcagggatgggttagggttgagggttatagtagaagcaatggcgggactagttcggagactgttgccgtatacatagctgaaactgcctttgcaaaattatgacggagacagtgaaaaagatctaacttcatcttcgttctaacctttaacctgtccttgttccttcctgggtgtaggctgaactaactttgggaggaacttagtttatagtttaaaacaaagatgataacagccccttcccaaaacaaaccttcctcttgcctgggtactagactgcctttgtaggactaacaaattagccacaagattagaaattatggcttaggagtcatgcagctggaggctacaagattctgaccctccctgaacttctgctaagatcagcgcttgagatattttccagaccctgaacttgatggatcagctggcaccacacagattgataaagtggctcatctgatcttgtggcccgcacccaggaactcagtgcaagaggacagcttcagcttcccatgatttcatctcctacctgaccaatcagcactccttgctcactggcttccccccacccaccaagttaaccttaaaaactctgatccccagcctggagcggtggctcatgcctgtaatcctggtaccttgggaggctgaggcgggtggatcacttgaggccaggagttctagtccagcctggccaatatggtgaaacccccgtctgtactaaaaaaaatacaaaaaattagccaggcatggtggtgcatgccttgtagtcccagctactctggagactgaggcaggagaatcacttgaactggggaggcagaggctgcagggagtggagattgtgccattgcactccagcctgggcaacagactccgtctcaaaacaaacaaacaaacaaacaaaaaactctgatccccaaatgctcagggaggctgatttgagcaataataaagctccggtctcccacacagccggctctgtgtgaattactctttctctgttgcaactcccctgtcttgataagtcagctctgtctaggtagcaggcgaggtaaaccccctggctggttacacagcttgaagacagctctgtatctaaactgtatctacgtctatatctaccttggtccctcttaattcttgctacggtaatctattttattttatggatgtatcataatttatttcctcagttccctaaggatagactttttttttcgtttgagacagagtctcgctctgtcgtccaggctggggtgcaggggcgtgatctccgctcactgcagcctctgcctctcgggtttaagcaattctcctgcctcagcctcccaagtagctgggactacaggagcgcgctgccacgtctggctaatttttgtatttttagtagagatggtgtttcaccacgttggccaggacggtcttggtctcctgacctcatgatccgcctgcctcggcctcccaaagtgctgggattacaggcgtgagccaccgtggctggcttttttttttttttttgagacagggtgtccctctgtcactcaggctggagtgcaatggcacagtctctgctgacttcaacctccgcctgtcgggctcaagggatcctcccacctcagcctcctgagtagctgggactacatacaggtgcacaccaccacacctggctaattttttaattttttgtagaagtgaggtctcactatgttgcccaggctggtcttgaactcctgggctcaagcaatctgcctgcctcagcctaccaaagtgctggactgcccaaggggttcaccttgcacgctgcctagacagagctgattaatcaagaagggggaattgcgacagagaaagtaattcacacaaagcctgctgtgcgggagcccagagttttgttattactcaaatcatcctcccgaaaactcaaggatcagagtttttaaggataatttggtgggtagggggccaatgaattgggagtgctgattgcttggctgggggatgaaattgcagagagtcgctgggcgcggtggctcatgcctgtaatcccagcactttgggaggccgaggcgggtggatcacgaggtcaggagatggagaccatcctggctaacacggtgaaacctcatctctactaaaaatacaaaaaaactagctgggcgtggtggcgggtgcctgtagtcccagctactcgggaggctgaggcaagagaatggcgtgaccccaggaggtggagcttgcagtgagccaagatcgcgccactgcactccagcctgggtgacagagcgagattccttctcaaaaaaacaaaacaaacaaacaaaaaaaccagaaattgcagagagtcaaagctgttttcttctgctgagtcagttcctggatgagggccacagaactggttggcaggtccagtggggccatctggttgttagaaatgcaaaaacctgaaaagacatctcaaaaggctgatcttaggttcacaatagcgattttacctcaagagtaattgggggccaggcacagtggcttacgtctgtgatcccagcactttgggaagctgaggcaggcagatcacttgaggtcaggagttcaagaccagcctggccaacatggcaaaaccccgtctctactaaaaatacaaaaattagctggcgtggtggcaggtccctgtaatcccagctactgtggaggctgaggcatgataattgcttgaacctgtgaggcagaggttgcaataagccaagattgtgccactgcactccagcctgggtgacagagcaagactctgtctcaaaaaaacaaaacaaaaaaatcttatgacctctagaataagaataatggtgggtactatttagaactccagcccttctcatcttggcttggtggctggtggcctgtggcctttcatttgttttacaagaacagtttagctttctggaaagggctattgtttaaatgatacactaaattccttcccaaggctagtttggcctggcttggcatggtggctcacacctacaatcccagcactttgggaggccgaggcgggaggatcacctgaccaacatggagaaaccctgtctctactaaaaatacaaaaaattagctgggcgtggtggtgcatgcctgtaatcccagctactcaggaggctgaggcaggagaatcacttgaactcaggaggcggacattgtggtgagccaagttggcgccattgcactccagcctgggcaacaagagcgaaactccgtctcaaaaaaaaaaacaaaaaacaaaaaaacaaaaaaaactggtttagcctatacccaggaatgaacaggacactttagaggttagaagcaagatggggtcagttaggtctgatatctcagttatgattttttgcaaaggtggtttcaggatgacaggtgtgagccattgcgcccagcccctgatagatatttagactggtcgcaacccttttgcttttacaaaaatgaattaatgaatatatcctttgtgctcaggtttcagcatatctgcagagttattccaagaagtgtagttgctagacacaaggaaaaataaattattcctcatattgaaattaaatctggtgatctaattctccatcaaagaaaccaatttattcactctttgccacaccaccccttcagagactataaaagagaggaatctgccacccttcccacatcagttttcttgtctttaaatattcccagtcttggcagggagtggtggctcacgcctgtaatcccaccatgctggtaggcccaggcggatggatcagctgaggtcggagttcgagaccagcctggtcaacatggcgaaacctcgtctctactaaaaatacaaaaattagccaggcgtggtggcaccttccggtaatcccagctactcgggaggctgaggcatgagaatcgctcaaacccagggggcagaggttgcagtgaaccgagattgcgccactgcactccagcctgggcgacagagtgagattctgtctcaaaacaaaaacaaaaacaaaataacaaaaacccagtctaccaagccaccacctgaggccctgtctcctcctcgcacggtccccatttgaggttacagagagataaactgaggcacaagcagcacccgcggcccaagacctccccttggcctcactgtccccctttccgtatcttccccgggccaagttccaacccggatccctccttcgcagctcagccctcgactcccacttcgtccctcctctgccccctccgcggctgcggaaggggacgcgaaccgtcctggtcccatccgagccgccgtagcgcgagtgccgcgggagttcggcagcccaggtcgccaaggcaacgggctccgctgcgggttgcgggctgcgggcgctaggctgccccggggaggcgctgcggaccggcggcccaggcacggagaggcggcgagaccgcaggtgagcaggagccgggcggccggttgcggccccaacgctccgggcctggcgtcgacacgtcgcagggggcgaggggctgagccgccggggatcccggggagggaggctgcggcccgatctttgtccctcagccgcgccggggacggcgcccccgacgccctttgaccccgccccgcgttcagggagagtccgttttcggctgtttattatatttgtagccattggtcgacctcattcgaaagtttcttaaaaaaaaaatcccttcttgtttgggggccagaaaataactcaaaactgtgcagaaaatttatttgtgtgtgtgactcttctggggccagaraggattgacttctttgtgcgtcagttttatcgtctgcaaaatgggaatcatggtagcacctgtctgatgacgttattacaaggtaaatttatatttaaaattcgtggaggtaagccctcaatacatgggagcttttattattactactactacaaggaggaccatcactgagcatttattgtgagccacggcccgggctgatagccagggtaaaaaagtgaacgagagacatcgtgtcctgagggaactccacagttttccggaggagacagactcgtaaacaagaattcacagtgattccggttatgattttggacatacaggggggctgtgaatgcacagagaaaacagttaacctggatttctggaggtgaggttagtgtggatgatcagggagagatgccaaaagaaggtgacttccaaaatgagacatgaaggctgtctttatgttggccagaagatgaggctggtggagtgtaccttgctgtgggtagataaagcaggtagagaaagtaggtagagaaaagccttggggagagagtgcagacttcttgggaatctgcaaggatttcaggctagctggagagcagattatgagagttggagggggtctggctagatggtgtttgagagacaagcaggtgctcctcctgaaagactgtaagtgtggaggagtttgggctttgtgttgggggcagtgggaagccatcaaagggttttaagccggaggtgtgtgtctttgatcagaggtatagtttcagaaagatcagttttttgtgtttctctcttggtcttatcattcctcccatctgtttttcactttgcaggcattcatttgtggtgattcatatatatgtgtgtgtgtgacagtgtgtgcgtgtatgtatttattgttgagatgaggtctcactatgttgcccaggctggtctcagattcctgggctcaagtgatcctcctgtctcagcctcccaagcagctgggactgcaggtgcacaccactgcacctggctaattcaaaaaatatttaatgagcatcttcttctatgtgcaaggcactgtgtaggtagtaaggaagcaggtccctgccctcaaggagatcacagattggtggagaaaatattcatcaaacaagtgattataattgtgatgagaattgtgaaagggggcgcatgttaagatcaatctagcatagtttggagattcaggtagagttttgataaaatgtatggagggtgtagtctgagttagctatcgtggggatgttccaaacattttcaaaagtacattcatggagccaaaagcagtccactacaactggaacttaaagatcaatattgaaagagatccatccagagaggttgacaaaaaaaaaaaggctgagattattcagggctactgcattgcatactcttggaagaatgagccatgcacttagtctacactaaaagaaatggctagagaaacaggaacaggagagaaaccagcaaagtatagtaatgaaggccaaagggagaggttggttggcctttgtagatgttgctgagatgtcgagtaatacaagttaaaaattaaaatgtgtccttttgggtaaataaatatggaggtcggttgggacctcattgagcagatttggtgaaatggttggggcggaatctataatatcagcagctttcaaaggttcaatataatatatcagtgggatgagttaagagtgggatgtgagaaagacaaagtgtaggcagctcagagaagtttggctgcgaagggaggtagagagaaggctgaggagcgattggggaataggtgaagtttttttgagcatgagagagattaaatgctgttggcaaagagccagtggagagagagaaaggctgagaagacacaggatatgaaagggagaattgatagtataactttcctgagaaggtgggagtggaggagctccacagtacagatccttcaataggagtctgatgcctgttactttttggagacgtgggaagccaggttattcctgaaaggagtgcaccagtgtaatgcaacaaaaataaataaaggtataagtgtggaaggaaagtcacaattttcattgtcggcagatagcaggcatttattgaactagtattgtgttaagtacttttcatgcaccattcttttttttttttttgggacagggtatcactctgtcgcccatgctggagtgtagtggtgcaatcttggctcactgcagcctctgcctcctgtgctcaagcgatccacctgcctcagccccccaagtagctgggaatacaggtgcgagccaccacactcagctaatttttgtatttttagtagagatgaggttttgccatgttgaccaggctggtctcgaactccagacctcaagtgatccacccgcatcggcctcccaagatgctaggattacaggcatgagccactgcgcccggcctcatgcaccgttcttaatgaataatgtgatgtttacaacaaccctgtgagataggccctctaataattgcaaatttatggataaagaaactgaggtaacatgctcactcagggtcacacagtatttgaatctaggtttacctgaacccagagcttttactcttaaccactacctggatgatataaatctctacctgtgatatgattgtctgctgagaaaattcaagagaattaaactaaaaatacttagatataataaggctaagtgaacagcagttataagatagacaaaaagcaatagctttatgcaaacaaaaatagaaaatgtaattgtaggagaactgacaatagcaacatgaaaaataaatacttagaaataaacttaaaaatacatgtacccagcttagccacacagagtaagagttggctgggcatggggatgggatgacaggatgagtaaggtaaagtagttttcccatgggaacatcagagtattgatactggagaaggggtaggttaaaaaaaaaacaggtgtctatcataagacatcatgagatattgactatcatgtttttataaaattgaaaaattggcctggcacggtggcttacgcctgtaatcccagcactttgggaggccaaggcgggcagattatctgaggtgaggagtttgagactagcctggtcaacatggtgaaaccccatctctgctaaaaatacaaaaattagctgggtgtagtggtgcacgcctgtagtcccagctacttgggaaactgaggcaggagattctcttcaacctgggaggcagaggttgcagtgagctgagattgtaccattgcactccagcctgggtgacaagagcaaaactccatctcaaaaaaaaggacagttaggtgggagctatatatattagaaagatgtttacattatgtggttaggtgtaaaaagcagattacggtacagtatgttactgttttcttaaatgtatacatgtttataataaaaatgtctggaaatactagttctttttaaaaatgttaaatctttaattgtgataaaatttaccatcttaacgatttttaagtttacagttttgtagtattaagtgtattcatgctgtgcaaccaatctgcatgactttttcatcttgcaaaagtgcaaaagccaaactatacctttaataggtttagctccccatttccgcctccccaccagcccttggcagcacccattctacttttgttttctatgtgtttggttactctggatacatcgtgttagtggaatcttgcattatttgtctttctgtgacgggcttatttcactagcatagtgtcctcaaggttcatccttgttgtgtagcatgtgtcagaatttcattctttttgtaaggctgaataatattccattgcatgtttataccgcactttgtttatccattcatcgatggtcactttgagttgcttccatcttttggctattgtgaataatactgcagtgaaacataagtgtactagaaaggtaagctgtttatgagatcatggggaaacttttattctgttcctcattgccctaattttccttttttatgagcatgaattgccttcataatcagaaaaaaaatgaggaagtatcttctttaggaggctggggaaataagggtaaaaaagggcagtggcagcggaaagggaaaggagagggcagatttgagagacatttcagaaggagaatcaacaggacttgaccaacaagaggtaagggagagaggagtggaagatgaagctttcctggcctctggtgggaaggggcatcagtcctggtggggctttgactaggggaggagggaggaaataaggctggagagccacccaagcctttgtttagcagtttggacttctagaaggtggagagaaaccattgaaaggaagtgaaatgacttgatctgatttgcacatagagagatgacactggctctttccaaccattctttaaactgaaggcagatagtgccaggtatccctttgtgttgcttatacttgaacttctgttaatttccttttatttgagatgaacctttagtactgaagtacacatatctattattctaaaagcacctggaatattttaaacaatgttttagtgtgtgtttttttgttttttgtttttttgtgtgtgttttttgagacggagtctcgctctgttgtgcaggctggagtgcaatggcaccatctcagttcactgcagcctccgcctcccaggttcaagcaattctcctgcctcagcctcccaagtagctgggattacaagcacttgccattatgcccggctaatttttgtattattattattttttttgagatggagtttcactcttatcgcccaggctggagtacaatggtacgatcttggctcaccgcaactgccacctcctgggttcaagcgattctcatgcctcagcctcctgagtagctgggattacaggcacgcgccaccacgcccggctaattttgtatttttagtagagacagcattctccatgttggtcaggctggtcttgaactcccaacctcaggtgatccactcgccttggcctcccaaagtgctgtgattacaggtgtgagccactgctcctggcatttttgtatttttatagaaatggggtttcaccatgttggccaggctggtcttgactcctgacctcaagtgatctgcctgcctcggcctcccaaagtgctgggattacaggcgtgagccaccgtgccctgcctgtgttcagttttatctcaataacacagtctcctgtaaatatacttacttttttttttttttgagacagagtctcactctgtccctcaggctggagtgcagtggtgcgattttggctcactgcacccttcgcctttgaggttcaagtgattctcctgcctcagcgtcccaagtagctgggattacaggcacacaccaccacaccggctattttttttttttttttcatttttagtagagacagggtttcaccatattggccaggctggtctcaaactcctgaactcagatgatccacccatcttggcctcccaaagtgctgggattataggtgtgagccactgcacccagccatcctgtaaatatactttctgactttagtaggagaagtatgaataattgggaaaataaatgaaacaaaaataattcaaggtagagtatgtcacaattctgttaaaattttaaaatttaaaatttttcacattttactgaattctgacagcctccttttgagagaaaaaggacaatataaggtatacagtgtcatattaaggaactcttacaaaatgaaaatttggagggtccagatggattcagcccgtcacttagctccactcccacaaacctgtagtctctgtctacttccagagcattacagacagagggagctaactgttgtgctaacatttgtaaatagctctgcagtttagaagagctggatttccaaaagatgtaaatccatgatatcattttagtcctcctaacaattctgtggggtagggattatcattcccattttcaaatgagaaaattgaagatcagaggatgtgacagatccctctcagatactatatctaataagtcctggagtttgaatccaggttttattttcttcttatattttagcattttattatggaaaagtttaaacatacaaaagtagaaaagataataaaagacacctaatatactgagctttagcaattgccaacatatggtcacttttattttatctatactgcctacttccatcccaccttaaattatcataaagcaaatcctagtcatcatatttcatccatgaatactgtacttcaatatacacatctaagagagaaggattttttcctcctcctttcccccctgtagtcacagtttcattattacacctaaggaaataaacagtagtcagtcctaaatattacataatatccatttggtattcagtttcctcaacaattttataaatgtctttctaaaaaaatgtttttttcaagatggagtctcgctatgttgctcatgctgtacttgaactcctaggttcaagtgatcctcctatctcagcctcatcagtatctggaaatacagatgtgtgtcagtgtacctagctttttttttttctttctttttgacacagagcctcactcttttgcccaggctggaatgcagtggcgtgatctccactcactcactgcaacctctgcctcytgggttcaagcaattatcctgcttcagccacctgagaagctgagattacaggcacgtaccaccataccccactaatttttgtatttttagtagagacagggtttcactattttggccgggctggtctcgaactcctgacctcaggtgatctgcccgcccacctcagcctcccaaagtgttgggattactacaggcgtgagccatcatgcccggcctgcccaactttcataaatgtctttttacagttggtctgtgttcactgggatccaaacaaggtgcctgtattagacctgattgatgatctcttaaatcaagcttgtccaatccgcagcctgtgggccaaatgcagcccaggacagctttgaatgaggcccaacacaaatttgtaaactttctttctttgttttttttttttttgaacgaagttttgctcttgttgcccaggctggagcgcagtggcgtgatctcggctcactgcaaccttgcctcccatgttcaagcgattcttctgcctcagcctcctgagtagctgggattacaggcgcccaccaccacgcccggctgatttttgtatatttagtagtaacagggtttcaccatgttgaccaggctggtcttgaacttctgacctcaggtgatccacctgcctcggcctcccaaagtgctgggattacaggcatgagccaccatgcccagcctcaaatttgtaaactttcttaaaacattatgagattttttgtgtgtgtgattttttttcttcttccaatgtggcccagggaagccaaaagaatggatacccctgtttaaaatcttcttaatctatagccatttctcctcttcttttttccccctttgccatttatttgtttaaaaaagtcatatcatttgccctatacaacttctcatattctgcatttgactgattacatctatttatttatttatttacttttcttagatggagtctcgttctgttgcccaggctgctggagtgcagtggtgtgatcttggctcactgcaacgtccacctccagggttcaagctattctcctgcctcagcctcctgagtagctgggactacaggcgcatgccaccacgcctggctaattttcgtatttttagtagagatggggtttcaccatgttggccaggctggtcttgaactcctgacctccagtgatcaacctgcctcagcctcccaaagtgctgggattacaggcatgagccactgtgcctggcccagtttttccaatatttaaacaaccaacctgtgctatagcaagtttcccagtcaaggattcatttatgttcaagcatgctacttataaaataatacagtatattgatccatttataaaattatgcaatatattgattcattttagaatttcctttaaaggctttcttgggtgactaccaattaaccaaaattaattacgttatcccaatgaccaaattaatcccctggtcaaattgaactggatacatgagttatgtgaaaaaccttccaggggttttcacatgtactgatgtttttgttttgtttttttttgtttttgtttttgtttgagatggagtctcaaacaaaactccagtttcccaggctggaatgcaatggcatgatgtcgactcactgcaacctctacctcctgggttcaaagattctcctgcctcggcctcctgagtagctgggattacagctgcccaccaccatacccggctaatttttaaaaatatttttagtagagacaggatttcaccatgttggccaggctgatcttgaactcttgacctcaggtgatccacctgcctcggcctccccaagtactgggattacaggcatgagccactgcgcctggccgtactgatgtttttgattctctggttatacttgaggtagagtaaatgattctaaccagcactggaaccattaaaggaatgtagggcctcgtcagtattagttggttgsagaggggaaggaagttaggaccaggcaggaatgagtgggtggagaaactgactcagccgtttggttggcttctaggcatgggaattcagcggagggagccagacctcctatgcatatgatggtagcaagagtagccctcattttattcctgccctttctaatcaggataggcttaggacatgagcagtgggatgtttagtgacatcggcaatgaaggactaggaaatacagactttgatttattttttaagtgattctccatcagctgtgtgcttttaagactagactatgggtttttttgttttgttttgtttttgagactgggtctcattctgtcacccaggctggagttactgtggtgcaaccatagttcattgccacttcaaactctgggactcaagtgatcctctcacctcagcctcttgagtagctgggactacaggtgtgtgccaccacatccagctaattttaaaattttttgtggatacgggatctctgtatgttggcctggctggtagactgtgtttttatttgaatatttgtaccaaaacttaacattctgctgcttattgattatattttactacctaagaaaataaatatgtattatttttaattggcttatataaaacataatacctgttttcttgtagcttttaagtaaaatttgaagcattagatttttaagtgtaggttctttaggttctttttttttttttttgagacggggttttgctcttgttactcaggctggagtgcaatggatcacggctcactgcagcctcgcctcccaggttcaagcgattctcctgcctcagcctcccgagtagctgggactacagaggtgtgccaccatgcccggctaatttttgcatttttagtagagacagagtttcaccatgttggtcaggctggtcttgaactcttgacctcaaatgatccacccccctcggcttcccaaagtgctgggattataggcataagccaccactcccggccaagtatagcttattttcttatttgtaatttattaaagccaaagacaccaagattgaaagcaactgaaaatgaaaatgatatttccggggaggctaataacttacggagctttcctgtggcctcagggtcattgttctctgttagscaatccttagaaattgctagaactcataggaatgcagagttgtatgatgagaagaacaagaacttgggtttcagggagatcagggtaaccttgggcaaggtctctgagtctaggttcccttatctgtaaaatgtctcatgaagtcatgtgagagttaattgttataaagcttggccactcgaaggggcttaatgaatgtgagttatcttcctttctcccagtcctrattttgcaaacctacctactccgtgtttctgctaatcaccagaatgaaacttaaaaaaaaaaagaaaaagctgatggtttaatcttgattttcagtgtcagttaagcataaaataattctattgttttcttatgtgcataaggcttaactttcattggtttttgatgatctctgcatgttatatatggtacatattaaatatagtggccatatttttttttaatttcttttataatatttttttcgagatggagtctagctctgtctcccaggctggagtgcagtggcgtaatcttggctcactgcagcctcagcctccgcctcctgggttcaagcaattctcctgcctcagcctccccagtatctgggactacaggcatgcgccacaatacccagctaatttttgtatttttagtagagacagggtttcaccacgttggccagactggtctcgaactcctgacctcaagtgataggcccacctcaccctcccaaagtgctgggattacaggcgtgagccactgtgcccagcagctatattttataaaccaaaaaattgggacttgtggtgtgataagtatagtatacttaggaaggttaggagaacagaatattttgaagaagtgcactctcagagaaatggtcgctgtgcttttatgtattcataaggaagcagtacaaagttgtggttaggaatgaggccctagagtcctttggacatgaattcacatcttggcccaggcactttctacttactgcacaatatacttaacctttctaagcttcagagcttcctcacttgtaaagtggatattatgagagttccttgtttcttgtgaggattgcatgaaataaagggctcagcacagtcttggcagatagaacttaacatgtaaatgtcagctgttatgtttattactgtaaagcctttgatacgtgcacacttatacagtaaactttttttttttttgcaaaaacctgttcaaaaagcacttctaaaataactcaatatttgcaaacttactctatagtaagttctttatcaggcctcgtacagaaagggcacagaaatattttgaagaccgcatgccctgtcttgcatgcccactgggaagacctgactkactttggccttctcaaaatatttgcataactctcagcacctactccattgcttctgagatgacctctgcaacgtgtatatgttttggctgatacagccaaacttgtcctggacagacttcaaggttcacttaatctactgtcacaggcttctttccctaagattttcttggttgtgccctccctagagtattggcttcttcctcaggctagcagcaaaatagctgcagtaggcctaggccccagatttatgtatggcacccacctaaggaatagaaagattgtcttggctgggcgcggtggcttacacccgtaaaatacctgtaatcccagcactgtgggaagccgaggcgggtggatcacctgaggtcaggaattcgagaccagcctgaccaacatggtgaaaccccgtctctactaaaaatacaaaaaattagccgtgtgtgatggtagacgcctgtagtcccagctactcgggaggctgaggcaggagaatcgcttgaacctgggaggtggaggttgcagtgagctgaggtcacaccactgcactccgacctgggcaacaagagcaaaactccgcctcaaaaaaaaaaaaaaaaaagattgttccttagagtgagaatttttctcagaagcctccagagaactaccctagaatctcattggcctggactgggtcatatgctcattcctgagccaatttttgttagtagggcaatgtgatgccctgatgggcttaggcctggttcttgaacaagccatttacaagagggatgaaattatctctagaccattcagaaacagaattgtgtttctgttaggaaaatttttttttttctatgagtaggtgaatggacgctgagtagattggtcgaagaggaattgtgttggctgctgataacagtgctttaaagaagacaggttatttttctctcaaaaaatattaagtccaaagtagatagtctgttcctggcatggcagttccacagtgccatcaggcagcctagatctttctctctttctgtttcaccatgcttatcacacagcttgcagtcaccaagtggtcgcacgtgttggctctggctctctagccaaacggtctttgaggcaggaagaagtaggaaaggggagggcagaggacaccctttaaagtaccctaagtcccaaccaccatgttcagtttacatctcattgtccattcttacttgtgaagaaggctggtaaatgcagtttcttagctgtacacattgccattccccaaaacagggattctgcagctgtggaagaatgagaaatagatacaagcctggaagtgggcagtgcccaccacaggaggcggccaacaatgtcagctataccctgtatttggagaaaattgcagtttttacattgactttcctctttcttttcttttcttttctttctttctttccttccttctttcttttttttttttttttttttttttttttgagatggaatcttgctctgtggcctgagctggagtacggtggcacaatcttggttcactacaacctccacctcctgggttcaagcaattcccctgcctcagcttctggagtagctaggattacaggcgtgccccaccatgcccagctaatttttgtatttttagtagagacagggttttgccatgttggccaggccagtctcgaactcctgacctcaggtgatccacccaccttggcctcccaaagtgctggggttacaggtgtgagccactgcgcctgcaatgcccggcctgcattataaatatttgttcataatgtgttgctaacagtgacaatcaataagaatcaactgggtttgttccccagcctgtttagttttattattgtgattacaaaataattaaatattatgttaaccaatgaaatgtaaagggaaaaaggaaaaaagatactgcttttatgaaaaataagttgaatgtgcttacctgataaaggcaaatggctaagaaaaaatatttttgtcaaattaggggtggaagagacctctgaaaagattgaagaaaaaaattataaaaatatggagattctgacagatagggtaactctcacctgtaatcctagcactgggaggctgaggcaggaagattacttgaggccaggagtttgagaccaatctgggcaacagtgagaccccgtctctacaaaaagaaaattagccagatgtggtggtgtgtccctgtagtcctagctacttgggaggctgaagtgggaggatcacttaagcccaggagtttgaagttacagtgaactatcatcacgccactgtacttactccagcctgggasacagagtaagaccctgtctccaaaacatatatatacatatatgtttctgccttcagaacacttcacaagtatcattccagtaaaaactgaaaatcatagatgtacatcatgagtgtagttcatgcagaaactttaattgcttgaacttactctcaagaaaaggccttcactgggcacagtggctcatgtctataatcccagcactttgggaggctgaggcaggtggattacttgagtccaggagttcgagacacaagcctgggaaatacagcaaaaccctgtctctacaaaaaatacaaaaattagcaggttgtggtggtgcatgcctgtactcccaactactcggaggctgaggtgggagaatcacctgagcccagggaggttgaggctgcagtgagccatgatcatgccattgcagtccagcatgggtgacagggagagaccctgtctcagagaagagaaggagaggagagaggagaggagaggctttcatcccttagccagtatttggaaaataaacatgcatttttaatgattcctctctttaactgtattttttaaaaaatgagttataccattattagttctgattccatcaaggagagaacttctactttgtttcttaagttgttatgtatgggttactgtgtatcaattgaaatgaatatcaccaggccttattgttggtcattataaattgtgccctggtgaacttctttccagagacatcttctctagtatattttttgtttttttgagttcttttttttttgagacagagtcttactttgttgcttatgctggagtgcaatggtacaatcttggatcactgtagcctctaccttcccagttcaggcgattctcctgcctcagccccccgggtagctgggactacaggcatgcaccaccactcccggctaatttttgtatttttagtagaaacggggtttcaccatgttgaccaggttggtctcgagctcctgacctcaggtaatccacccgtctcagcgtcccaaagtgctgggattacagatatgagccactgcacccaggcccctcactgattttaaataatgtgaagtttggaatgtctcagggagttcaatgtaatggaatttgtcctgatgttatttctttttccaaatcacatagcacttcaaacttttctttttataacatttctcataaatagtcctcctccataattacctttgtgtttattttgtgtctgctactaaactcttagcttgttgaggacaggagtccttccttggacctctgtacatcctaacatacaatgggtgctcaatttatgttcatggaatgagagaatgaatcaatgtcactgtcttctattattgcatagacatcttcagtaacacttcctttgaattcattgtcagtggagctagtcttgtagccttttcaatagcttacattccgtgttggagcaaaaaatgttaaatgtttataaggtaatttcaaatataagcaaaagtagagagaatggtataaagaaacctccattatctataatcaagcttcaacaattaccagcattttagagcaaattttgatttaggataagggtagagagaatatgatgacatcaggatgctgattttgattttgtggggagagaagcaggccatgtgtggtgagcagggtagagaaagaggaggctggtggcccaaatacaaacctgcctcataggagttgtcttgaggatcacttgagttgacataggaaagtgggaagaacaatgcctcacacatggtgagtacagcctaagtgctcccaccaccattactatcactcctgcgtagtttgtgggagctgaatgtgggagctgtggcacttactaacttggtgactttggacaccgacctttctgagctgcagtttcttcgtcggaaaaaatgggaatagtaataacatcttaaacatagcattggcggggcgcggttgctcattcctgtaatcccagcagtttgggaggccaaggtgggcggatcatttcaattcaggaatttgagaccagcctaaccaacatggtgttggttttaatggagaaccctgttctccattaaaaataggctgggcatggtggctcatgacttgtaattccagcactttgagaggctgaggcaggcggatcactggagatcaggagttcgagatcagcctggccaacatggtgaaacctcgtctctactaaaaatacaaaaaattagccgggtgtggtgttgtgcacctgtaatcccagctactcaggatgctggggcaggagaattacttgaacttgggaggtggaggttgcagtgagccgagatcgcacaactgcactccagcctggatgatagagcaagactgtctagaaaaacaaaaaaacccaaaaaaggtagcatcttatcccacacaggcagtggaataatatatgtaaatatgttctgggttaattaacattaatcacaattttccagagtggttttctagtctggagggagggaccatgtttctggaggttttttcgggagtcaagccaattccttctgtgtattctcattctgagacttcataatattcgtggcagagtcatttgtcagcctagcaaataaacattacaggacaataggctttgtttccgtttgcaaaatgttttttaaataatgaaaacaattttactttatgtagcttgtccatatatgcactgaaaatgaaatacttatcaaccaagttgataaagggataaaaatagttttcctaaggaaaactatttgctggggatttgtgttggacaagttttgtagcagtctgtttccccgtctttgaaatataaacagcatctttatttgtctagattttgcttataacaatttgctcaactcctaattaaagatagctctgtcatccacacatcacttagctactttcctaaagccagaatttctttagaaaatcagttttcttttaagacttcaaaacactttgccttctccttagtactataaagaattctaattatgtaggacattcatccagccactcctcccaccacacacacacacacacacacacacacacacacacacacacacmhatatctgtctgagataataattagatactgtgggaagagaaatgaaatatccctgatggttttaataattttctgcagtgtttgtttggacaagaaaatcagctgtcacatcccctgggtatgagagttatataaacccagatcagaaagtcaatgctgcagacttaaattctcaggaagttttaaaacttttaaaactaccacttgccttttggatttgactttttaaaagtttgatttttgctttttcagatactaaacttttggcattcttagtatttgtgatttatagcatcttgtacttttatagacttacttattcaaacaaactaaacccccactctatgcccagataacaaaaaaacacgtacaagatacagttttatctcaaaatgagcaatatcctgaagctatcatttggtcccagtgacatatgaactgttcgtttttttccccatatactgttctgtgtaaatgttctattacacagtctttttttctggattatttttctggagatttcgttatactttgttgatgtttcttttcaaaagctcccgcacaaatcatctccagtagtcatccagccagtgttgtactagaagatgtgttacttctaatttaaacttccatttaaggcttgacgctgtggctcacacctataatcgcagcactttgggaggccaaggcaggaggatcacttgagcccaggagttcaagaccagcctgggcaacaaagtaaaaccccatctctacgaaaaatggaaaaaaatagctgacatggtatcacatgcttgtagtctcagctacttgggaggctgaggtgcgaagatggcttgagcccgggaggtagaagctgcagtgagctgtgtttgccccactgcaccccagcctgggtaacagcatgagatcttttctcaaaagaaaacaaacttccatttgagaaagtgacagaaaagttttggatttttgtaattataggaattctttacttttctttgataatattatatctctttcagtgaaaagggagttaggaagagatctaaatgtactctttgatcttccttgttaatcatttaaaaatggaattcggagctaattttaacttctgaaggacctgggggaattttatctagcacctgaggtataccttagttttttatgtattgaatctttaggaccagttttattctttcatttaaatatgtagtgagcatctagtatgtgcttaccattgtgctgtgtgtttatatatattatctcatttaattctcacacaagcgttgttagatacataaaaggggacttcaaaaaattcatggaaaaaattgaattaaaagataaaaatgaaaaatataaactttatttctcaatataaactccatcaagttcaaggcaatattgtagtgatgataccggccatttagcccgtccctaaagaactgagggttctggaaatttagccatattaatgcagtcttttttacattattaactgaaaaaaaaaatggattccctttaaagatttcttaagattaggaaacaaaaagaagtcagaaagagccaaatcaggactgtaaggtggatgcataatgatttctgtgcacagtgatttcccattgaaatctcgcaaaaattgcccttgtttgataaaaggaatgagcaggaggagtgttgtcatggtggagaaggactctggtgaagctttcccaggcgtttttgtgctaaagctttggccactgtgcccagccacaactttcattttgttaagtcatctaatccttacaactgctccatgaaataggtactattattatccttatgttacagatggagaaactgaggcagagagcgggacagtaacctgcctaaggtcccagagctctagagtcagtggtcttaacctctattatgacctctcacttaatgagggccagatttcccctctagctttttattatgaaaaatttcaaatgtggaaaaaaattaacaagagtacaatgagcacctgtatcaaaaacctagcccaaacaattgttaacattttgctgcatatagtttatctgcatgtgtgtatttcaattttttgctgaactatttgaaaatatattatggacattataattcactccttaaatacaaaacaaagcaacattttcctgttttttttttgagacggagtcttgctctgtcgcccaggctggagtgcagtgatgctcactgcaagcttcgcctcccgggttcacaccactctcctgcctcagcctccccagcagctgggactacaggcacacgccgccacgcctggctaatttttttgtatttttagtagagacggggtttcaccgtgttagccaggatagtcttgatctcctgaccttgtgatctgcccacctcggcctcccaaagtgctgggattacaggcgtgagccaccgcgcccggcccaacattttccttktacttggtaaatgcattcttggaaaatacattgcctctaaaatcatgcaaaagtactttgctacagacaaaaaggagtggagttctaggttcagataactgtaaagagctttacatgagtatcttgatatttaaaaatcaagcagagtaaagggacaatttttgtttctataagacagcccctcaatttgctggatgtttaacatcttggtctctacctactaaatgcccatttgaatgaggagacaattgactgttgtgtcaaccaaaaaatgcctcccatcccctccgtttccagaaagtcctctagccagctgtgcctgttgagtgtcattgacttgactggtcttctgctgaaggagctataggttaaattaaaataaaatgtgctgtcacagaatccttatcatcatgattcagagttgaggtaataaaggtggtagaacttatctgtaattctcctttagttctacaaccacatatgctctagatttgtaaacaaatattcatttattctgttgtattctaccaccaccactttgttccacaaaaggttatacagcagatttttatttatttaaccattaagagtgtctccccgtgtattkgaatcggctaggaaatattcgtaattgctacacttttctatataaaaagggacttgaagcagactcagggccaacacaatgtagaatctgtttcttctagctttatttctccctgtgctgctagaggtaccaaagggtttgtctcaactgttactacccctgacatattccattgatctctttacttttctctgttgtctgtcagtctgtttgtcagacttatctcaaatgccacgttgtttgcgcgtatttctcaaagccatccatcaggatacaatctaaatcatcacagcacattctgtcttgtgacactaagcacagactgcctgtgttacatttgattgtgtgtttcccttttcttccacatatgtttcagtagtaatttcctgggcaacttatgtgtggcgggccttgtttgggatcttggaaatagagagatgaagctctcctacatagtctcatttacttccaattttgctttcttgataattggagtagccttttctagcttgtatcccctgcagtacctgatgcattgccttgctcagggtaattcatatatatttctgaattcagtttggaatgaaaggagacaagcaggcacttttgaatcaaatctggtgctgccactatgcaactgtatataaatctaacccaacccctgtgcgccaggttccttatctgtaaaacatggataataacaaccatcttacaggattgttgtaaagtttaaagatgaattgtatgaagcctagcagagttattggcacgtagtaggtgctcatgaagtagttgttattgtaagggaggttcagtcattcctttaggtcacttgagtgggcagtggaagcatttaggatcttaattgtctttagggaaatgcttacttagtctgggggcttctccgagaagcaggctctggggaaggtctggctcattgctgattaactgttccctttttagagtcaatgatctgagtctgtgttttggaaccacttatataatgtataccacctgttatttgtgtatttttagaagtgggagtcgggtaatcctagtcctgtcagtaaaagagcaaactgtttaccagaagcagagcttttttcttaacactgactcacactgactcatctttctcatttttcttcccaccgcctcataacaaccttgcaagagagagaatttttagggaatcagttgacttacttttttgtgattttccaaagttgaaagcttgaaggtatcaggtcattaattccatcccaggaaaggctaaagtttatgctgcctcggagtgccagtatgaccaacgccatgtagtgaatatctcacataaacccttgtctagacaaaccacttctgttggctgagaggttagacaagtgcctgaagtgtacatgttaagagtaaacacattttgctctttgaaaatggttgccttaagttgaacctggaaagtttgctcttctgagataggaaacccaagcagtattagagtcagagctgtggtagcttcacagatggatttcagataacagagaggccagacagcacattagatcagcaaaatggtgaaggaagctttatagatcagaatgactgatatctttgtgccttcatttaacattcattaaatgaacatttactgatcatctgtgatatacttggtgctagggttatgacagtgactaataaaaacatagtgcctgctgtcatggaccttatactctaatgctcgtttatagtaaatgctaagggaacagagagatgccttggcctgcatatgtgaacatgttcctgtgcacacgggtgaggggaggaaggaaggctccttggaggaaaaggcacccaagctgagtctggtggggtgagtaggcattaactaggagaaaagggttagttaggggaatgtggggttggctgaagagtattacatgctgaaatgagctatgagtcttggggtcgagagaagagcttgcccttggagaagctgaaaaaagtgaccaaaggacagtgagagggaagtttggcacaaaataaattcagagaagctaacagtgacagcagagcattgtagaccagtttattaatttaaaaaaaaatttttttttttttgagacagaatcttgctctgtcgcccaggctggagtgctgtgatatgatctcaatctcagttcactgcaacctctgcctcgcaggctcaagcaattctcgtgcctcagccttcccagtacctgggattacaggcacacaccaccaygcctggctaattttttttttgtatttttagtagagacagggtttcaccatgttggtcaggctggtctcgaactccggcctcaagtgattcacccacctcagcctcccaaagtgctaggattataagtgtgagccactgtgcaaggcctaaaaaattttttaatccagataaatttaacatatagtgaaatgctcatgacaaatgcatatacctatgtaaccaacaccccattttgagtaggaacttttaacttggtagtcagagcaaggggaaggatgggtttttgagcagggtccagacttgatgctaattgctagctaagaactgggacaagggtgagggggtgagggggtggcaagtaccagtggggacagagctggaataggcagtagtttgctggtgggcaggagcttccagcttgggggcaaaaaacagattcttggttttcctaacttgtttttagcagaggacaaacctctaagtgctttgtaagatccaaagtgtctatgcagaagacaacagactgtgttttttcaaagattttctgggaagacttccaggctacctgcagtttgaagaaagtcttctgaaaagggcagggggcgtgggggcacctacagagacaggatttcccccaactcgataagatacaggaaaataatcatcttattgatttacttttgttctatagtaatgtgacattttttcttttctgagagtagggtattaaaaattgttacggttttgggttttacagatttgttgaagcttaatatcatttaagtgtcctattttaatatctgttttaatatctgtatttttgacagactgccagaaatcatttaacatgttactgtgctatttttgttgatgttgtcattattatttttgttgatgttattcttaaagaaaaaagaaaagatactatcgatagaattatcgtcagtattagaaattaagaaatgttttaatttcaattgaaaacaaacaagtaaacaaacatgaaaatgtattgagagatgtgtgtattctctacctttgttttattccttttacaaaaactataaggaatagtgcttaacagtgtactgtcaaaacactgamatctatttacaggaagttcatttctgaccagaattgtttgtttgtctctccaaagcttgccaaattctataggttttatgtaagtttataaatattcttgtaaacattggctttaaactaaatccttctaaatatccaaactaccatgtatctttctgtgtctaaattcagagataccatcctgttggctttagataagttacagagtagtttaggcccacatgatttaagctcacccacagttctttgttgatacttgaggatttcatctgaaaagcatcctgttcatactctgaaaatatttctttcatcttagtactcccactcattttgtgtgtgtatatgtgtatagattattttattgttccacatatatgtatatttattttttgtccacttgctagggaacctcattttttttaacaagaaaatacttgtgtgataaggtcataaaacccaagagttgggaggaatattagagacctactttatttattttattttattttatttttttgagacggagtctcgctgtgtcacccaggctggaatagtgcaatggcgtgatctctgctcacggcaacttctgcctcccaggttcaggcgattctcctgcctcagcctcccaagtagctgggactacaggtgcgtgccaccatgcctggctaatttttgtatttttagtagaggcagggtttcaccctgttagccaggatggtctcgatctcctgaactcatgattcacccgccttggcctcccaaagtgctgggattacaggcatgagccaccacacccagcctagagacctaatttaaagtttattgctgctttattactctgaacaactacatcatttattacctaaaataatctttttattttctgttctcatttagctgaatctctgagcttaaaaaaagtgtgtttggcttatatatcacattatcccacatatgttacaaccaaaacttaattattagccataatagtgtcttttggctaatattagtagtaagatttttgtttgtttgtttgttttttgagatggagtctggttctgtcacccaggctggaatgcagtggcgcgatctcggctcactgcaacctctgcctcctgggttcaagtgattctcctgtctcagccttctgagtagctgggattacaagcgtgtgccaccatgcctggctaatttttgtatttttagtagagacggggtttcaccatgttggccacgctggtcttgaactcctgacctcaggtgatctgccccccttgtcctctcaaagtgctgggattacaggcatgagccaccgcgcctggccaatagtagtaagttaatgaagatctgtactaaatttggattccaagtgaaacatttctttttttcttttttatttatggcagagtagagggttgatagatatttgttggctttattagttttctcaaattggtatgtaaaaataatactagatatataggtttaagtctccttcataagattttctttcttctaaacctttggaatatgccatgcttttcaaaaagccccactcattatttttatgatagtggaataaaagtctccaatttgtcaagctcattattcaagccttccaggattgtttgcagttttaaaataaactgctgggggttttatgcatcttgcaatatgagtacttaattaaaattaaaaagggggccatgcatctatctattctattaaggtcgtatataaataaatgattttattgggattttcagtgtatttagagtaatctatacttaatgagagggacttgtacttttcatttctttgtactatttttcagcctttcctgaacagtaaatgttttaaaaaaaactatacccttattccttggtctctaagaactgtggtgggctgggcgcggtggctcacccctgtaatcccagcacttcgggaggcaaaggaaggtgggtcacttgacaaggtcaggagttggagaccagcctggccaacgtggtggaacctcgtctccactaaaaagacaaaaattagctggtgtggtggcgagcgcctgtagtcccagctactcgggaggttgctgcaggggaattgcgtgaacctgggaggcagaggttgctgtgagccgagatcgcaccactgcactccagctgggtgacaggtgacaggtgacaaaaaaaaaaaaaaaaaaggccaggtgcggtggcttacgcctgtaatcccaacactttgggaggctgaggtgggtggatcacaaggtcaggagatagagaccatcctggctaacacaatgaaacactgtctctactaaaaaaaaaaaaaaaaaattagccagccgtggtggcgggcacctgtagtcccagctgctcaggaggctgaggcaggagaatggcgtgaacctggcaggtggagcttgcagtgagtgaagatcacgccactgcactccagcctgggtggcagagcaagactccatctcaaaaaataaaaaataataaaaaaaaaagctgtggtggagtatatggtacaaacatgagacttggtgctcttttggattcctaaggcttttccatgtctgagaactcaggaggcagcctttgcatagcagagggactaggaacctcactatttctccaaagttgactagctttctataagataacccccataaaatcactagtcattagtaataaaacttygtctttaaatgactataatatttttaaaaaggacaatgaatatgtactctatgccatccctttccatactgtaaatgtgtttctgaaaggtatgctatttagatatacttgagtcctattctaatatacggagaggttgctttttaaattgtcctcatcattgtggtagtaatagtaatattagtagtactggtagttaacatttatggaacacttcatatattttacatacatagcttcctttaacccttataataatcctatgagttaggcattttattctctccattttgtgggtgggagaactgagacttgatatgtggactatrtgattgatcgattggttgattttggtaaagttcagatatcttttgtcctgtgcttgacactctaaaatagtaagtatttgggtaacaaataattgtaagagagagaaaatcatcttatcttttggactattcccttctattccattcctactgccaacactccagtccaacctcacatttctttttctttctttttttcttttttctttctttctttctttctttctttctttctttctttctttctcattctttctttttcattctttctttttttctttctccttccttccttcctctctctctttctttctttctctttttctctctcttctctttctttcttcccttctttcccttccttcccttccttcctttcttttcattttctttctttctttcttacagggtcttgctctgttgcccaggctggagtgcagtggcatgatgacagctcactgcagcctccacctccacagctcaagtgatgctcctgcctcagtctcccaagtagctgggactataaatgcgtgccactgtgcccagctaataaagctccttctgctgaagttatgcctaaacccttctttgcacatgtcattccttatcacttatcacctaaagaatgacagggggctttggctttgaatggccctcagtatgtataagcacctaaagatttcagtttatctcagcttcagagcagtccatctcatctgcctgtttttcttcttaaaataaacttttaaaaaataattaaagtttttaaaaggtgcagaatatttaagtaagatttcttctcccctttcccctaaatctccattctcatttcgtagaagtaaaccattcttaacaatttcctggataattcttccagaaattatgcatgtccaaacataaatataaaatctattggttgcttaaaaaatctataaatgagatcatattatacaaactattctactgctattgttcacatagatacattttattcttttaaatgacttcatggttgtatcacttacaaaccttttggctttgagtaacagaagcagggaatgtacagaaggggtgtcagacaaggcttccaaattatcagaaccaaggcaggccagggaatcatcatcctgttttagctgaagcagccaggccagtatgttgccatcactgcccttggacactgtcaggaataaattccaactgttcctttgtcatagtgtcattttttaaggttcagagtcccagtgagactatgcacaatggggaagtacccccaaatagaaagaagtgactggatgttggaaaacttaaaaaatgatacatttccattacattggtattctattgtataaacatgccataatttatgtattaataactagccacttcttggtgaatattcagattgtcatattcaattttttactagcaaaaaccactgctgcaaagaaaattatttatgtctttgtgcatttttgtaagtatatctgtgagattaatttcaagaagactgtgctggatcagagagtatgtatatttaacattttgatgtagcgccgggcatggtggctcatgcctgtaattccaaaactgagaggctgaggtgggcggatcacttgagctcatgagttccagaccagcctgggcaacatttttttcatgggcaaaacccggagaagaaaatatgaaaaaaatacaaaaaaaaaaagaaagaaggaaagaaaaaagaaaattagctgggcatggtgttgcacacctgtagttccagctactcaggaggctgaggtgggaggatggtttgagctggggaggcggaggttgcagtgaccagagattgtgccactgcacaggagcctaggtgatagagccagaccttgtctctaaataaataaataaataaataaataaataaataccattgtgatgtatattgtaattcatgcttagaagctttcactggtttacactcccatctacaaagtgaactggcttttaacttacaagatacaaagttatttatggccatatattcagcaaaagccacaaagtgtcacaccaggtgaaaagggaagtccaagtttctgaggtatagagtttcagtatttatcaggtaagcatagctaccaaagccatttttgttctggaagcatttgctgatcccgagaaagcattttttaggttaagctgtatttttggtgtcttcatatatgaggacagaattcttagcttgttgtccgtcaaggatggggaatcagataaaccacttttntagtttgaatggaacccctaagggcataagagggaacttgaactaagccaaccctcacaatagycttgccaccaagcttctaggtgtagggaatgtagaccaagatctttcatcattatggttctcaagtaataatgccatcaggcagctggcagaagcaaatgcaaattttctctcgaggaagatgttatcatcccggacatcaaaatagtcctctaaataattttttatgtaatcactagcacatgggattaaaaccaggttcacaaagaaataagataccatgaaaagaattagcaaaagccatatacaacaaaagtatcaaagccatgagatactggaatttcagatgcagaatgtaaaacactgtatttactatgcaaaaagaaatagaagccaagataaaaacgtcacaatgggccgggtgtgatggctcacgcctgtaatcccagcsctttgggaggcctaggcaggtggatcaccaggtcaggaattcaagaccagcctgaccaacatagtgaaaccccatctctactaaaaatacaaaaaattagctggatgtggtggcgggcgcctgtgatctcagctacttgagaggctgaggcaggagaatcgcttgaacccgggaggcagaagttgcagtgagccgagatcgcaccagtgtattccagcctgggtgacagtgcgagactccgtctcaaaaaaaaaaagtcagtaagtagacactgtcaaaagtgacagcagatttgaaaaaatccaaatagacattctagaaccaaaacatayaataatcaaaaacaagaatgcagtggatgtatttaaagtagattacctagcaagagagaactagtgaactagaagatagaagaaaattctccagaataaaccttcaagagatttaaaaaatgtaaaatatagaaaagatgattagagaattaaaacgatccagtgacaagttctaatatgcatttaaaaaaatttttttttcaagttttttcttgctgcagtgtccaggctgaagtgcagtggctattcccaggtgagatcatggcacactgtggcctcaaacttctggcctcaagtgatcctcccacctcaggtaaataggtgggactgcgcccagctttaatatacatttaattagaattacaaaatgagtggagcaagaatggtgcagaagcaatatttgaagagataattgatgatcattttctagaactgcagaaagatgaatttgcagattcaaaagtgtatagccttaaagaaaagctaaaagctaaaaactgagcaagcatccatcttgtaagtcagatcacattttgtaagtcagagaaaacacagcaaaataattctgaagaagataaagagaagctaggcatggtggtgcatgcctgtagtccaagctgcttggaaggctgcaatgggaagattgcttgagttggaggccagcctgggcagcatagtgagaccccacctaccctgtctctaaaagaaagaaaataaagggaaagaaagaatgaaaagagtagaagttatgaagtataaagcaaatgtatagcagggaaaatcaatgaagccaaagtatgattcttagaaaagattaataaaaatgataatactctgattaggttgatcaagaaaaggaagacagaaataaagaaaggagcacaaataaccaaaatcaagaatgaaaaagagggggctgggcccagcctttaatcccagtactttgggggaccgaggcgggcaaatcacttgagctccggagtttgagaccagcctgggcaacatggccaaacgccatctctacaaaaattagccaggtgtggtggtgtgtgcctgtagtcccagccactcaggatgctgaggtgggaggatggcttgagtcttggagggggaggctgcagtgagcctagatcgtgccactgcactccagcctaggggacacagtgagaccctgtctcaaaaaaaaaaaaaaaaaaagagtgcttaaaaaaaaagagtgaaaaagggagatagtatactcattaacaaaataatgatactatgaatactatgaataattttaaaccaaaattttgaaaatttagatgaatggataaatttattagtaatataactattaataaaaatggagtcatctgggcatggtggctcacgcctgtaatcccaccactttgggaggccaaggcaggaggatcacctaaggtcagaagttcgagaccagtctggccaacatggcgaaaccccatctctactaaaaatacaaaaattagctgggcgtggtggcctgtgccagctgcttgggagactgaagcaggagaatcgcttgaacccaggaggcggaggttgcagtgagtggagatcgtgccattgcactccagtctggttgaaagaatgagactccatttaaaaaaaaacagaaaccaaatggaatcagcagttaaactcttcccttaaagaagactactagcccatcactaggagtctaccaagcacttaagagaaagaattaatattacacaaatgcttcctgagaatagaaagagattagcaaaacaaaaaacctgacagtgacattatgagaaaggaaaaatcataagcccttttactcaggaaaatttctacattttactatgaaaaattcccaactatatattagcagagcacaatccaatattttacttattattgtagtataacaaactaccaaagttttgtggcttagaacaactgattttttttttttccagagattctgtgggtcggaagtttggactgggcacaacaaggatggtttgtttctgtttttgtctaggttcccagctgggaagactcataggagggcttggaatcaagcccttggcttgttgatctttgtcgtgtcaatttcttgtttttcttttttctgagacaggatcttgctctcttgcccaggctagagtacagtggcataatcatagctcattgtagcctcagcctcctgggctcaagcgatcctcctaccgcagcctcctgagtggctgtgactacaggcacatgccaccacaccttgctaatttttgtatttttttgtagagatgaggtcttactgtgttgcccagactggtctaaaactcctggactcacgtgatccttccacctcagcctcccaaagtgctgggattacaggcatgagccactgcacctggctgtctgtcttaccagtttctaaaatctctttatgggttaaggaaataagctatttatattgataggaaatataatttcctctagcctgacatttgatttttattttgctgatcatgctttttgccatgcagaatatttttatacatagtcaaatttattaatatttcctttaatgacttctggattttatatcatagtacttggaaataccttctccattgtgaggtcataaaatatgccatgtgtttttccagtgcttttatggtttcatatttttacatttggatttgtggatcctccaggagctatttttggggtgaggtaaaagactacttattaacctcgcttttctcagtcagatggagagattaattttgactgtggagaagggggctctggtaaagtatcttgatcatctcttagggtatgggattgtgaggaattactctcttttcacccaaaggaattggaatgagcatctgaagtcaaaactgcctctcctctacagcaggtgggaaaaattgttttaaactgaatcctttttcactgttccttctcatttcctaagactttctgctaccgtggtatcactggcctcatgacatgttatgattttgatctcgtttttgtactattttagtgttttttttttctgatgtcatgaaaggacacagcttcattttatgtataagctctctctaaattgtgatatagtgttgagttactgtgaattctagccgttgttattattattttttttagagatggggtcttgctgtgttttccacagcgagaatcagagctcctgggctcaagcctcctgcctcagcctcttgagtatctgggactacaggtgttcccggctttagccattatttctaggatcagttttggagggctctcctttcttgttttgttgtttgatcccaagtccatctcaggcagtggtctttctgtaactttctataacactccattcatttattatattataagataggctgtgaatataggagaaaacagaccttcatgatcatgatttcacattcctatcattgttccagacatgtataaacctctcagacctttgaggcttagtctaagataagtcctttgaacaaccagtaaaaatcattaataaaaataaagaaaatcagcaattctttttcttcattaggacgtgttgaccttgatacgaatactactatgctacttgttcttggatgaatgataccaactttgacctgggcgcttatgaaaatattttaaagcatcacttaaaaattacctttctcaccattctaactaaagcaataggttttgtgtgttagtgggtttttttctaatgtctacttatgttcatttattaagcgccttctgtttgtcaggccttctgctagtgctgggactatagagttgaataaaatataaaattttccatctactaagggagatagaatataacaagtagttataatgtacagtgctgtgaactataatagaagtgttattgggggcatgtattggtcaggattcttagtagcaaacaacaaaattcactgtagttggcataagcagaaaggtagttttaacatctgtgcttggatgttacacagatgaaagtgaagcaatcacagacaatatttccatgagaaatggtcaaccccactaagggggactcttctagagaaaacaccactgctgcctttaccagcactggtgacatcagatactggacatcagaaactgtcccataacagtcctagaacatgggcttataattttctttacgttttctagtgcagttagatgcagttagcccattcataatctttatatccttcatgcccttcattggtctatagcaactactactgggtttgaaatagccctgactttaatatggactttacctcaggcaatcataggtgattattttattatttatttagagacagagtattgctctgtcgcccaggctggagtgcagtggcacgatctcggctcactacaacctccgcctcccgggttcaagcaattctccctcctcagcctctcgcgtagctgggattataggcacccgccttcatgctcggctaatttttgtatttttgtagagatggggtttcaccatgttggctaggctggtctcgaactcctgacctcaggtgatctgcccaccttggcctcccaaagcactgggattacaggcgtgagccaccacacccagccaataggtgattattttaaaactcttacaacattgcatgccactaactacccgcatctcattctctaagacagagattgggaaactatggcctgcaggcaaaatccagcctgccacttgtttttgtaaataattagttttattggaatacagctatgttcattttgtttacacattgtgtgtggctgcttttgcactatagtggcagagttgagtagttaccacagagaccacaaagcctgaagtacttactgtctatccacttacagaaaaagcagaaaaagtttactagccgctgttgtaatgcttattaaattctctctgccttttaagtccagcaggtgaggtaaatcagtttctttcaaactttttgactttgaaaataagatgcacamtttatattatgactcatgcatgcatatcatatattatatgtaaatgaaacattttcttcttttcattctattctataccgtttcatgttttgaaaagtatgctagtcccagctgggcatggtggctcatgcctgtaattccagcactttgggaggccgaggcaggcagatcacttaaggccaggggttcgagaccagcctggccaacatggcgaaatcccgtctctactaaaaatacaaaaattagctggatgtggtggtgcacacttgtaatcccagctactcgggaggctttggcaggagaattgcttgaacccagaaggtagaggttacagtgagccaagattgtactactgtacttcagcctgggtgacagaccaagactgtctctaaataaataaataaaaataaaaatatgctagtcccagtctactaaattgatttcatgttccacaaatcagttgtaacccataggtacatgaataggcatgttccattcatgaattatccaagatctgtttcatttccttaggagttttgtctgcattcccttctggtttccattactcaatctgtcaggattctcaggtgctactaacaataagtgtctrctccagctggtttaagcagaaaagcatttcttaaaaaaaagtagggatcttacagaatcttatagagggccagataacagatcctagtgctacctagatggcagttaagcagcaaatgaaatgcaggctggggaaagccatctaactacaccatgagacttccctagagaaaaccctattcctgccattgcgcagcacctgtgaccctagggtctggctaccagatatcctgcaaggtcagccccgtaagaactcagtctctgtgattgtctcaccaaagctccttgaaggagggctctcctggctcaggagctcagaggctgctcagggcatttctaccttttggaatcctgcttcattttcatctcgctgttctaaaactcctaatttttcttctcctattttattttccttttcttcagctatctactttgctcctttccttctccttttcctttatcctcatactcatcttggccattcctatcatcaggtggcgtaactcaaggctgaggtccctgaacagagcttagagctcatttcttcccactttcagygtaccttcaacggcttttctagctactcctcattgaggttgtccagcttgtgtttcttgtgcaccttccagtgccgggcacaggctgggcagcacaccttctgggccaggcccaggattaagaacaggagcagggccctagagactgagactgttcccggctgacagagtgtggcttatgtctctcttcaccatttttaatggccagacaatgtgtttgatattttgattatttctattatttcactattataaataactctgcctgtaatcccagcactttgggaggctgaggctggcagatcgcctgagcccaggtgtttgagatcagcctgggcaacatggtgaacccccgtctcacaaaaaaaatacaaaatgagctaggcatggtggcgcatgcctgtagtcccagctattcaggaagctgaagtgggaggatcacctgagtctgggaggtcgaggctgcaccatgatcatgccactgcactcgagcctgggtgacagaatgagaccctgtctgaaaataaataaataaataactctgatataaatgtctctctcatttataagtcagtgtatgcacattttgtagcacttggtatgtattttccaaaggaacttaaaaataacttttcgtattttttctttttgtagaagtaatgctatattttagtgtaaaatactattttatagaaaaaatttaaaataccaataagaaaataaaaattacccacagtgtcatcatcctgatatgctactgattaatagtttcttccatttttttctactttccgttttacagacatgagccccttctacatataggggctcaccttaacattaaagtgagacttttttttttttgagacaaagtcttactctgtcgcctgggctggggtacagtggcacaacctctgccgcctggtttcaagtgattctcctgcctcagcctcacgagtagctgagattacaggcacctgccaccgcgcctggctaatttttgtaattttagtagagacggcgtttcaccatcttggccaggctggtcttgaactcctgaccttgtgatccacctgcctcagcctcccaaattgctgggattacagtcgtgagccactgcacctggctcttatgtgactattttttttaatgtcatcagatattcttcgatagtatcatttattgtgactgtgtaatattccattctgtagatttaccaaagtttatttaaccactgcctaatagtggactttaaggattttcagttttacagttttctgaacagtgctgaagtgaacaactttaagtcaagtctttgcacacacatctatagtggtttctcttggatagattcttagatgtaagatgagtgggtcagagagcatttacattttttaattaagaaactttattttttagaccagttgtaggttcccagtgaaactgcacagcaagtacagagaggtcccatgtcccccctacatttttaaggatttcagcacatatcgtcaaattgccctttaggaatgttgtaccgttttccattttcacctacattttctcatatctctgcaacactgagaaatatcatttaaaagaaatctttgataaggcacatgtctagtagaatacctattccagtcaagctaagactaaattttctctctcctgaaatttatatttacattattcagtccattattatttattgtggttagtgatcacacagttccaccaaccttccttctttggccaatttaacaaaaattataaaactaatacatagacacaaaaataaacattcagaacagaaagatatagcgatgaaagtaaaaaaaatccccacttgctttagccaggccttctgaaagcggtttgttttttactttaatgcttttttgtaattgtggtggttacttccaaaactgtaaataaaatatacataaacatgtaatttttattttttttgttattttattttgtcattttatttatttttttttgaggtggagttttactcttgttgcccaggctgcagtgcagtggcgcgatctcggctcactgcaacctcggcctcccgagttcaagagattctcctgcttcagcctcccaagtagctgggattacaggtgtgagccttgccatatcgcacactccccgtgtaatcctgctgtccagagatatacaatttggtgtattgtatatccttttagagatttaaatgtaggctgggctcagtggctcaygcctgtaatcccagcactgtgggaggccaaggcatgaggattacttgagaccagaagtttgagaccagcctggcgacacagtgagaccctgtctccacaggaaatgaaaaaaattagccaggaatggtggtgcatgcctgtagtcctagttattccagaggctgagttgtgggagaatcacttgagactaggagtttgaggttacagcgagctatgatgatatcactgcactcctgcctgagttacagtgcaagaccctgtctcgaatgaatcaataaatatatcagtaacaacaaaacatggactgtgagccaggtactatgcatagtctcattaaatcctcatagtgtctgagatgggggcccttgtttaccaaaacgtaaacttgaaccttatggctaactggtgacttgcctaaacatttccagtatttcctatgataagttgtatgcaataaataagatgtatctaattatgtgttcttgtgtgatcatctccatttaatacatttccacaactaggatggtttggtttaaaaagtgtgcacatttaaactatttaaacttttgtatcatcctgagggaggtagtttagagtgtggactttgtcgtcatacataccagtatttagattctgactgccacttactggccactcactaaaatgaaactgtacatcagtttacctatctctaaaatggaaggataacagaagcctcatatggctgtgaagattaaatgagatgctgctgcaatgtccctggctagtgtgcagcacctaggaagaatggtgtccaagacagaccaggcccctcatctcatagaactgatattttaatgtgggacaggaggaggcagcagtgaaaggcagtaaagaaatgaatgaacaacaaaaaaaagtggtgctgtatggacrcttaacagaaagtgacatgataggtagaygggtggttattttaggttgggtggcttgggaaagtttttctgaagaagtgacatctcagctaaggtctcagtgataaggatagttttataattcaaaaattcctagaaataaaaacatgggatcaaacattacatgcattaggccaggcaccgtggctcacgcctgtaattccagcactttgggaggccgaggcgagtggatcacttgaagccaggagttcgagaccagcctggccaacatggtgaaaccccgtctatactaaaaatacaaaaattaaccggatgtggtggtgcaggcctgtaatcccagctacttgggaggctgaggcaggagaattgcttaaacccaggaggcggaggttgcagtgagctgagatcgtgctctcactacagcctatgcgatagagagactcaaataataataataataataataataatgacaaaatgacctgaaaaaatttttaaataatttgcattctatgtatagacatgcctctttttctttaccattaccagaacttttttcctaatgtaaaaaaaaagtggggttgttcaaagattgtcttagggaccttctaatgagctttactggcagagggaaaagataagaaaatgtgtaagtcccttttaggaatctcttctatttcctctccctgtgttaattgtctaccatcatccattatactataaaccgttgtcttcactttactggcctttttctttacaccacatcctgcctacattgtaggactggaagctgccaacatgcatgttaactaacaagcactttttcgtctttagaattaggcagtgcctgggtcaggggagatgcaagattcagaacagcaatgcttttgctataaaaacaaggcagcttttagggtagactggtttttccaaacaaattcattgttaaggctgtaacacgttctgtgagttaaaactgtgcagaaggctctgcacatatgtttgttacagttgagcctttttcctgtatggcatgcaatgggggcaatgggcattggtgaacactgtacactaccattgcttccacaggtaataagacctcttgtttgtaacgtgtatatgattacatattgtggatctgttctgaaagcctttaatcatcgtagaaacgttctctttgtagggcttgagcaggcctcagcatctttacgacaatatacatgtttttgtttgtttgttttgagacggagtctcgctctgttgcccaggctggggtgcagtggcacaatctcagctcattacaacctctgcctcccgggttcaagcaattctcctgcctcagcctccccagtagccgggattacaggtgcccaccaccacacccggctaatttttttgtgtttttagtagacacagggtttcaccatgttggtcaggctggtctccaactcctgacctcaagtgatccacccacctcagactcccaaagtgctgggattacaggcgtgagccaccacgccaggtcaatatacgtgttaaattatagacatcactcagttactgttttgttcatgtatggggcaaatatatatttttatagaatatacatgtattataatttaatttctgattcaagccttaaagaaaatatgtagttcaaacttggaaataaatggattaaaagtcacttgctcttaaaatgtggtttctttttataatcttttaaaattcagcaacttaaataaaacatcctgagggcaacatgtgttagtgagggggactgggggtggcgtggggagggagtgtgtttgatgaaattgtccaggagcaaagcaccacttacttgaagcccagagatttgtcatccaaatatgtgcagattgctgggctataaatagtttgaactcaagtaaacagcctcttctccctaactgctgcttggccattgttcagatgccagcacagactgaggagcatctcacaccaagctcaaggctcttgtgcccaaattttgggctgcttctcttgtggggagagcttcagctaccctgacttgagatgaccaagggtcacatgttcaccctctttagttatcccacgtttggctcccacccctatgcaacctgatgtacagtttcataaacatgcctctgctctgatgagtagcgctgatctaagaagattcctggcaactattaaaaagccctggggccccatggctgttgactgaagtagatttaggaagcacagaagttcttttttcagggcagaggcacgcatggctcatttctttctttggaactaagtagagtggcactggttgtcagaactgctgcaggctgcctgtgccagcaactcatctgctctgtgccaggcaggcaggctgctgacatttcaagagtccctttgaggactccagcaacatgctgtcattagagcaactgaggacagtccatagtttattagtatatttcctttggaaaaaatgtctccccctctctctctctttaaaattcctgctttagctgcattgctgcattcatgtgcagtgactcttatgtcaaatgcctatgaggagattatgactaatttaacattttgttgttgagaggacataaggaatggtagaaggagtactagattaaggatcaggagcctggattcttgcgcaagttacgtaacttttcctagctttgatttcttcatttgtcaagtaaagatagtcatgtccctcctgtttcttggggttgatgagaaaatttatgtaaaggtactttctggactataccgaacaaatggaatgcaaaggagaagtagggtaatggaaggagcttggtgtttgagtctcacaggcctcgcccacactgtgacctcaagcaagtggctaatgtctctcagcctcaaccttttcatctgtaaaatgggaacatctatacttgccttgcaggagtgttagaaggattagaaataacatatgtaaagcactgacaaatggcaaacaatagttgaatagcaataattgttattattacacttaatgtggatatattcactctgggtgatttaggattctaaacctaaggaagtattcagtttatagatgtagagattagcaaaaggccctgctagtaactgatagtagcaactgataataatagctaactttaaaaaatccaagtaatacatgaatatgactttttaaaaartctctgagtctagaaaggcatctgtctcctgcttacccctcaccctgaggcagccattttatttttctgcttttacttcttttggtggttacttctatttctctaaataatgttactcccatttccttttttaaatgaattttgtttttgtcagaaaggtacatgcacatagtttgccttagtctttttaaggtcaaatatcataaaagatttgtaataaaaaccatctgttccctgcccccaccctttctttacccttcctcctatcctgctcccaagggcatacacttttgatccttttaggcgtttgatctagcatttatctctctatatctaaataatatgcttatcgagatatggttttttttaactgtattacagaaattttgaaacatgtacaaaactagaaagaatagtataatgaatcctcatgtaccacccattacccggcttcaaaaatcaaaaacccatgaccagttttgtttcatctgtgctggtagccattttcccctgccactagattattttggagtaaattctagacatcattttatcagtaattacttcagcatgttttttttgtttttgtttttgtttttgtttttgtttttgcaatgtcgcctgtcacccaggctggagtgcagtggtacgatcttggctcactgctacctccacctccctggttcaagcagttctcctgtctcagcctcccaggcaggtgggactacaggcacacgccaccatgcccagctaatttttttatttttagtagagacagggtttcaccatattaggctggtctcgaactcctgacctcaggtgatctacctgccttggcctcccaaagtgttgagattacaggcgtgagctaccgtgcccagcctagcatgtacttttaagagaataaggactccttttaaaaatataaccacactatcacacataaaataattaataatcctttattattagcagtggtctccatttaactcataagttatttttttagttctagtcagatccaaacaaggacctcacattaccatactgctttttcttgactcatcagttttttgtttgtttttgagacagtctcgctctattgcccaggctggagtgcagtggcaccatctcagctcactgcaacctccacctcccaaggttcmagtagttctcctgcctcagcctcccaagtagctgggattacaggcatgcgccaccatgcctggctaatttttgtatttttatttttgagacggaggctggccgtcacccacgctggagtgcaatggcatgatctcggctcactgcaacttctgcatcctgggttcaaacgatgctcctgcctctgcctccggagtagctgagattacaggcacctgccaccacgcccagccaatttttgtatttttagtagagatggggttttgccatgttggccaggctggtctcaaactcctgtcatgcagctggttttgatcagacatcctgtcatgctttatttggccattcacaatcaataataaaagacttctttaaggggataggtctcagttcatctgtttgtcccataggcctctgccctgcctgggaagctgctgggtactggaagggtactaaggtactaagtggaagatgctttagggcacatgagcaggagcagcagttagactgagggcccttcacgtgttagcataaggaggccagtctcttactagaagccctcgatcaatcctaggcagttcattcaatttatttaaagaggcctcctgtctttggctgtggttctgcagagcttttgggcvctctgtgtgctgcaggtatgggatagaggagctggctggcacaggaccttcagtggatcccttaattttttggcccttctgaatcttctcgacgcctgctgtcttcaggttcagagcctccctggggtcccacaccattccttgtctctcatttccaatggtgctttcttgtccttgtgctccaaacttcagcttctgttgtcatacctctctgaactttttctatcttccggaaattatttgaaatgaaatcccttgttctctaatgatccttccttcagcaaaaaggcccaatttgtagttcagaagacgtggtgctttttacaaaaagtatgttaatgttttaccatagactggactaagtagagtgtgtgtgtgtgtgtgtgtgtgtgtgtgtgtgtgtgtgtttagaaaatatttattgagtttcctattttatgccaggcactcttctaggcacttgggatagatgtattcagtgaaccaaggagacatactgttgactttgtggagcttacagtctggtggggaaacacatggaacgtgtacttataaatatgttaagggttataagaagagacataggagtaccatgagaccagtacagcagggggagctaacgtggctcagagaaaagggcgccctagggaagtgatatttaatctgaaatctgatggctgagtaggagttaaccaaaataagagggaagagcccttcaaatttgtatgtcaaagtgcagtagcaagtgagagtctgagaccaatagagagtagcaagtgagagcctcaaaccttctcctgttggagcaccaggctgtactacctcaggatagtcccttgccttctctggatctggcattcctcacccctaaaatgaggagaccacatgctcctttcagctgcaaaaatcaatgagtccaagactgtttaaagttaaggtcactgtttaagtgaaggtccatctctcccaaaacagctgtagttggaaacttatctcaagctggtgggaagtggtttgaaaaaaggcagggaggggacagtgtgatatcctgcgaacctatccagtttctagccacataatcactggggtcaggcttctcttctccttctggctctccttcagacacaccaaatcagcagtccaaaggggaccacaaagtggatcctcaggacatcgaaccctgaagaaaaagcagccacgtgtactccaaaaccaaaaaaatacgttgagcaatgtcttagtcatcttttgtgggtttgattccccatcccccaaaaatgacttaagtttctgatttcaaaacattgtgtgtatgtgtgtgtggttttttttttgagacagattatcattctgtcacccaggctggaatgctgtggcatgatctcatctcactgcaacctctgcctcccaggttcaagcaattctcctgcctcagcctcccgagtagctgggagcctcctgagtagctgggactacaggtgtgcaccaccacgcccagctaatttttttgtgttttttttagtagagacagggtttcaccatgttggccaggctggtctcgaactcctgacctcaagtgacctgctcgcctcagcctcccaaagtgctgggattacaagcgtcagccaccgtgcttgaccaagaacattgttttaagtgtaagtgtggttccttctctggggccttacaccaggattgtggtgagacgatgtattgttctcctttcttttttcctgttcttctgtattttcttatctttttacaataagcaattatgattataattggaagaaaacaaaatctacttttattcgtaaatctcaatcaatatacttctcaattaattgtctagaaaaagcatggaccttctaactgcatggcacagtgaataagtgagttggaaatggtatgacagctgaaacctgcctttgatgggtgatgagcgattgcactstacagcagctgtgtggactagaaagtgggtagtggtggccagaatttctttattcatatactccttcaacagatatccgtcagttgctagctgatatagtttggatgtctaactatattggtggatagctgttggatgtcatgttgaaatgtgaaccccagtgttggaagtgggccctggtgggaggtgtgtgggttatgcgtacagatctctcatgaatggcgtgatcccctccctgctgtaatgagtgagttcttgttcggttagttcaagtgagaactggttattttttaattaaaaaaaattattttggccgggcatggtggctcatgcctgtaatcccagcactttgggaggccaaggtgggcggatcacgaggtcgggagatcgagaccatcctggttaacacggtgaaaccccatctctactaagcatacaaaaaaattagccgggcatggtggtgggcgcctgtagtcccagttactcgggaggctgaggcaggagaatggcgtgaacctgggaggcggagcttgcagtgagccgagattgcaccactgtactccagcctgagactccatctcaaaaaaaaaaaaaaaaaaaatgcaagggactacatgtgtgcaccaccatgcccagctaatttttgtatttttagtagagacggtgtttcaccatgttggccaggctgtcttgaactcctgacctcaggtgatctgcctgccttggcctcccaaagtgctgggattacaggcgtcagccactgtgcctggccctggttgtttaaaaagaacctggcacttctccctctcacacttgctctccatcttgccatgcaacattccggctctcctttccctctaccatgtctaaaagcttcctaaggcctcaccagaagcagatgctagtgccatgcttcttatacagtctgcagaactgtgagccaaataaacctcttttcatcataaattattcagcctcaggtattcctttatagcagtgcaaacggactaacactgcgtaacaaattaatcaatctgtgcctgtgattttctcatgtgtcaagcagggataataattatacctacctcatagagatccttatggggttaaatgaggtaatttatataaagcagttagaatacaaccaggcacggtggctcacacctgtaatcccaacactttgggaggccaaggcaggcagatcacttgagctcaggagttcaaaaccagcctgggcgtatggtgagacccccgtctctacaacataaataaataaaataaacagaatattacctggcatatggtaaatatacaataatagttttggggtttgtttatggatttccttattttaataagtatctcataatatgtacaaaatgctgctatattagacacagatcttttccttaaaaagttaggattctggcagagaaaaaagacctgcccccaactaaatatgtgtcatcagagaaaagggtatgtttctyaagagagaaacagagcatactaaggaaattcagaggaaggagagaccycttctaaactgggggtaaaaggtggaattaaacagccaaagtttccttcatcctcaaatggagctgatgctgctgtctgtgaaaaacagccaagtttcctgaagggaagccctttaagaggtggtagtgcaagggggttgtggattcaggactggcaccacatggtccctagttagagtgcaggctctgccccttgctcccgtgagcctttgagcaggttggtcggctcaccatgcatctgttgctacagctgtaagatgtgaatattaataatgtctcctgcacccgattattgtgaggatgacatgaagtggtgttcatagagtgctcagtgcacagcttggccccagcccacataagtgtgtccagtattgtcagttataagaagaaatgaatgtgccagtgttgctatggttctgtcttccgggattctgtcacagacgtagaattattccgttcacaagggaagtgatacagagtacatgttgttgaagaaaatgatgttgtttttatgaatgggctccttactattatttttgttcaagtaacaaaacatgattcaaagcacccatcttcaagagcccagcctcatttcctgacacctactcagtcttctggaataaagsctcagccaaacaatagccctgacctccagtccctccaaactgagtgttgctgctgagaacaggccttacagctctgggtgggcttttgttcattactcatcgtgacattctggagaaatacaggacccttttgacttcccgaccaatctctgactttctttcattgtcacatcaccattagggcaaaggatgatgaaatggtcagaattagacaagaagtattcaaatatttttcaatgtatagtatgtgccaggcacataacccacacaagaaccttggagagtaaggctgttattcttctcattttacactgggaaaccaaagcacagcaagaaggtctagggaccagaaggaagcccacatctctctgagctgtgaacggctgctctctgtgggttaccaggctggtgtttttttgttttgttttgttttttgttttttgttttttttttaaagacagagtctcactgtcgcccaagctggagtgcagtggtgcaatctcggctcactgcaacctccatctcctgggttcaagcaattcttctgtctcagcctcccaagtagctgggactacaggaacacgccaccacgcctgactaattttttttgtattttagtagagatggagtttcaccgtgttgcccaagctggtctcaaactcctgagctcaggcaatccacccacctcggcctcccaaagtgctaggattacaggtgtgagccaccgcgcccggccaggctggtgtggtttttattccacagcagtcctacgtcacattgtcacattgttgaaaagccttcagattgacaaactccctcctaatatagcctgttttcttggatgttttctgataagcatctgtgttttctgagaactaataaaaattcttgttaaaccacaaattaccacagcctcttccttacctatagagagccgctttcccagtaaagctccggtcctaccttcccatcaccatcaaagtggcattgaaacagatcagatctgctccttttgagggagttagttgaagcccagtcttgcttcaggccacacaggatttgggtagcaaagcaaggaaagcagcctctctgacctagtggcctgagtgtttcctttcccaggctggctgcggcaaccactttgagaaatggcattggcattggcatgtgtgtggcatgtgtgctgacctagttaggagttgaggcttcatttctaattctgtccctttcgttttgagctgtgtgaccttgggcatgtcacctaacttctctgtatatgtctncttatccaggaaggagagattaataatgtagcctcatagcacttatctgattctcctaaggatgttatgagaatcaaatgagattatgtacaacgagagcaaacatttattcaatacttagtatgtaccaaatactttcagtttccttacatgtgttttttaattctcacaatcctaaaacagaggcactagtatcccacttgacagttaaaaaaactgaagttcagagaaattaagtcagacaggactcagatccacatctgtggctcccaaatgatgttcctaaccactatgcatgtcactcgctccccattgtacacgaaagtagagagatgttctttgtctttaccatcaagcactctccaaatgcaagaaatgatctctcgtaaccactgctgttccatgttggtccctaaggacacttatagcctgttacttgtttgtcttatcttgtagtttatgctgctgcttttcatgtccctaaggacttgttcagtgaattcttttggttttactcccagagaatctgttcatctccttcataaagggggttaaaggtgcccagctgagcctggcatcttgggcagtggcctctgacttctccagggttcttccttccctcaagcatgtagttgggtagcttgtagtaaaatgctctataatgcatttgtttataagttccccagtcactgatttttactcattgaatctcagaagtggaaagcaccaaagccagcattttgttgatagggaaactgaggtccagagagggatgtgacttgcttgaggtcattcattcagttgaaggcctgaccaagactggaacccagtttcccaggggacacaccagtgctgtttccaagccttccccgggggcacacatcacctcccctacatgaaggacaaactcatgtactgtgyccagcatgtacctaggagacctgggagaaatgaaacaacttggaaaattgggcaggragaaagagatgggtgtggggtggggtgaagatctccaccctaactagtatattatataccaaagaaaggaattaaacacacaggaaagcagacaacccactaagaagcaaaggaatttacccaggaaccctggctcagtgagtggataggaagccttttgtcactaaagctgcagggttgaaaattgaaggaaggatattaggcaagcgtggtggcctgggatgcagttacagccccctggctcattgtccaaaggaaatggatctctcctgtggacagagaggtggaaactgagtgagtgagttgtgtggttgacatcatcaggctgagcattggattacaacaaatggggacttacttggcccgagacatgggaaacacccactaaaacctcaaagtgcttttcatttaggagacacggggaagagacagagaggagggtaaagtgagaatcctgcccgcaccacaggtctggactgctaaccttgaatcctggtttcttaaattctgcctccgcttctgactgaggaccactggattttgaggaaactttggtcttgtaagtagaactttactctcctcccctgcccaacacccccagggagaagcagagcttggaggcagagctctctggagagcttgctttccagcctgttggccacaaaatgtctatttttatataatgatatatgtgagcttgctctgaaaattatggccttgtctgaaactgcctaaggctagtcggagcctccagtctcacaaatgggctccattcagatgctgtttcatttttactcaaagaactttgacagagtattcagagctttaaaagcagctccttgctccaaatataggtgaagaaataaatcttccctaagaaattcgtgtttgtaaaaccctttctttttttctgattacaaaggtggtataataatttttaaacattctagaaagaaaagtctccgaaagtagtgaaaattccctattatcttccccctcaggaacatggttgttgtgttaaatttcagttacagatatggtcagactccatgaatttaccacatataaacccagtgctgcagcagctgtgtggaaaactccaagatggaaargggttggaaatctttaaccttgggtttgcgatctttttattgcttccttttaaaaatttgctgtttatgcctggaatataaacaggacatgtaagcctttaggcattttatttgttggtatctgttttcagggtttgaaactaagcaagctactctgtagagagggaaagagggggcccttgctgtacccaggtcccttacttggtgggtccctgaactgaggaggattcctaggtggcttgagatggcttgcagtgtgctaacaggggaggtgtcccctcttagcaggttaagtatatttgaaaagttacagctaacgggaagatttcagcttcaacaaaaagctaccatatattagaagggtcacccaaggaaactgtcaccttgggcaagtgtttcacactctctgggtcttgtttctttatttgtacctaatgaggggacaaaactagatgatctctgtatttccaaattcagtatgaartgaactgtccatatttcttttccctttgtattgggcccttatggctttaggagcaaaggaccctaggttttcagtttcccagagtagctaaaaacgggtgcctgtaggacagttaaaagaagacataaaacaggcaacattaagttacttctgagtttttatgggtctttttcagattaggtgttcttgaagaaagagaaagaaaaagtctcagtggtaactgtatgtgcacacgcatacactagcacatacacttggggagagaggaaagaaggaattggcattattgagtatctcttaagcactaggccctatgttatgctcaaccctttacagagcactagatggtcagtattattccctaaccccattgactgaggacarccatctacttatatgttttcatattatcctgaactaaactgtatttacataattactggcataacttcaattccccatgtctccactagaccatctgcaccttctctgcgtgtctgtctagcccatcactatgccccactgcctagtagaaagcctggcacataggtacaaaggagacacaacttaatttaaacttaaagcccgccatcctagttcctcatttggcaagaaagagggagaagaagggggaaaatccctctatttgcccctctttcatcatttaacatagagccaccctctcctgccacaagggaaggatagccacagccagagtgcaaaaaaaaaaaaaaaaaagcaaaagacgtcagatcttgaattttgagtttccaaggtgccgggtcttgacaaattaaggtttttgctttgttttgttttgtttttgtttgtttgttttgttttctttaagggcatcagagaccctaatcctcaggaagttgtggtatttagaaactatttgtttgaattaaggtcctagttaataagagggttctcaaaggcccttggcacttctttttttttttttttgagacggagtctcactctgtctcccaggctggagtgcaatggtgcagtcttggctcactgcagcttccacctcccgtttttgttcaagggattctcctgcctcagcccctcgaatagctgggattacaggcgcctgccaccacgcccagctaatttttgtatttttagtagagatggggtctcttggcacttctaaagctgcagtcttccccagcatttcatcccatgaaggtggactgttgctgccatggacccacccatgggcatgggcagtgggaaggccagggcatcctctgcttcatcccagccccgctgggatcttgagatttggggtaatcaaaaaaggcatcctttttcctaaggtggtggtgaggaggtgatgttctggaaggaaggtacctagactttgtggtccctgccaggaagtggagagtggaaatgtggaatgcctcacactcctcaactaggtaggccttcatgtaccagatgagggtggctttcagttcttgttttgtgtgtcaaagttgctcctgttatcagtgtgtgtttgctgatctctcccacctcagtcactcccggcagtgagtttagggcatcttgggagtggaggtaggttgtggaaaagatgtgtccagagatctcatttggctttggtatcttcctgaaataaatgtcacacacagggctgggcatcttgcatatgctgacttctcttaatcttcacagcaatgatgtgaggcagagatcatctccattttacacctaagaaaggcacagagaggtgcagtggattgcccagagtctcacagctggcaggggctagagcttgagttcccaatgagaactggttgtccccgaagcccttgaatatttcaccatactgcagtgcctttttcatatcacctccctggatctcagttgctccatctgttaaatgatgacaagtgaactctagtcagaagtcagagtggtgttttgtttttaatttgaatgcctttaggcaggtgtgttctccagttcattaccatttgcgcattcccctgtgccctctagtctcctgcctggcccctggcccctgtgggaatttgcagccctgcatctggttggtgtctaccgtttctttcgatttagacaatctagagggcagtgagaaattggaaaggggtagcaggtaagagctctcgagttcagtgagaaattggaaaggaatagcaggtaagagctctagagttcagtgacaaattggaaagagatagcaggtgagagctcttgagttcagtgagaaattggaaagggacagcaggtgagagctctcgagttcagtgagaaattggaaggggatagcaggtaagagctctgctttcaccgcctcctagctgggagatcctggactgatcacctcactttatagaacctacttctctttctgtcaagtggggggtcacagtcatactgacctcaaaggggtgccatgcggatgaaatgagatagggctcataaagcacttagttagtacaaaaatacatgcttaggattagctgctctcaatttccagaaagagaatgtcagccaatgtacacaggcatctgccccctcagacataggatggcatttgcatgaggaaccagaagttatctttgaactcatcattttgaaacccctgtgatgaaccctggagctgccatgttggctcttcaaaccaagcctcagcattatttcctgtcacccagtcaagtgatgctgaacctcaaatcagccagccagtgctgaggccaaaagcagaagtgggtgctattctcttgggaccagaggaccctagcccagccacttaaggaagaagctggtaacaggtgctggctgtgacagacaagaagctgaactggcccaattaactctgccaaatgctttcacgaggggccagaagcaattcctaagtggagactgaggtggaaaatctaaagttctgggaaacaggttattaatcatgaccctaggctgagctcactacctcctggaaatccttcagaaatgtcttaggaaaacttggagtactgctccttcaaagagtggtttctttggaagttgccgtgggctcctatgctgactgattatgaattgcagattagaacacataatgtatccgctcttactggaggaagctgcatttccaaaaagaagtctctttaatgtttcaagaaattacaggctttagcttgactcttcagaactgaataatggcccttcatggcaccgaagaaagtatttggtgtattcttactatgtcccaggaacctaggtcagttactgttttagtactttatcagtgtagtctttaacattccataaatgtacattgaggacctgttagtactaagcactgractagaggaccagggtaaagacactgcctctggtcttgtggaattctctgtgcaacaagggaagatagacagaggagtgaataattttaatggcacgtgaaaagtactgcaaaagaaatatgcacaagtgctacaaaacaccagacactggatcagcatattgtggaggtcctgatcttgcgctgggttgattccttctgctctctccctacaattcctggctctgggagctttgccagcatttgcattagggagcaactgagagctgcccctgctgaagcactcatttctggcaccttcctatcccccgtggcttcagaggggtggaaagaacacttccttacaaaatgtatgggccccacctgagagggccctgaatctgaagtccaaagttgtagtaaggaaacagagggacgggtgacttttgtagtctaaaatcaccactgattttccgttggtttgtttttataacatttattgtggattttttttttctgattgcaaaattagaatatgttcaagggaagaaaagctagatagtacagaaaaacacacttaaaataaatcatcactcagkgatttcacttctctgtttttgaataagggcctgtctcccaatccccccacccacataccgctgtatttcaagtttagctctaattttaatttctccctgggcaaagtctcatgtttgtttgcatatctcaaaggtgcttgtgttstgggctccaatcactactatctgcaattggttagagcctgcggccatcatttatactttcctggacgtgtgtgtagattcatctactgctaagaaccctttatgtgttaggcattatgcaaggtgcggtggggaatgtcgaggtaaataagactttgaggttgctcatggccggataggaaaaaaagactcagataacatgaacacattgtgaaaatgtgccccaagatggggacagagtcctgtagaaagcctaagagattggaggagcagtagcatttgagctgagccttcaataaatttttcatgtatttagccaatatttgttgagaacctaatatccgccaggcactgggcaaggtgataggtggatgatgttaaatataacaggcatggcctttacctgcatgaagtttacaagcacaaatggtggcgttaagaagtcaataagcagggggagtgaaagaggagagtgtggctggggtcttccttgaaaaggtggtattcaaactgagaagagggctgggcgcggtggctcatgcctgtaatcccaacactttgggaggccaaggcgagtggatcacctgaggtcagtatttcaagatcagcctggccaacatggtgaaaccccgtctgtactaaaaaaatacaaaaattagccgggcgcggtggcacgcacctgcagtcccagctacttgggaggctgaggcggaagaattgcttaaacttgggaggcagaggttgcagtgagctgagattgtgccattgcactccagcctgggtgacagagtgagactttcaaaaaaaaaaaaagaaatggagtcacttataccaagagtaaaggagggagagggagtaaagaagggtgctggattattccttcctttgctcattattgattctaaaaatctcacttattttctgtattcagtttcctttctattggagaatattcttggggtctgtgaatggtaaacttgcccagtctttgtttgaaaatatcttttgccctcacacttgatatgttagctagatatagaattttttgcatagcatgtgtaatgaatgtgaaagttatacatgcctctttaaaagttttcaatcaaaacagaaatagataatgtacaaagtgaaagtctttcatttcttttctcacaatttctcaaaagagaataatttttttcaaaagagagaagtttcccagggggaaccattggttacagtttgcccttttctatatatactgaaaattgtttaaagtgtaaagtatgtatactttttaaaaatgtgcacgtacacaaatgctgtactttttttttttctaaacataaataatcatgttcacatttgagcaggacacagtagttcacacctgtaatctcaactagtcaggtggctgagagtggatgattgcttgaggccaggagtttgaggctacattgagctatgattgcaccagtacactccagcctggggacagagtgagacctggtctcttaaaattaaaaagaaaatgtaaagttctttttttaattaaaaaatgataatatatgcaattttacaatatgctttttaacaatcaagcatgtacttttttccacatcagtacaatgaaatctccttcattctttgaagttgctgtatagtttctcatgatattgatacaccataatttaactatttttctattaatagacatttaagttgttttcgccccttggttttgctactatacagtatttcactgagtatctttttacttaggtaaatatatctgtagtataaattcctggacatttcaggaatgtgacgtgtctaggaatttgaccccaaaggatatgtatgcacatttaacaagttaatagatattgtcaacttgtcttcccaaaagattgtttcaatttataatcccagagtatgtctggctctaatttttgtttttcttctggttccttagaattcccgtactgattagtcaacagtggaaaatctgaagagatgcaagcaggaaaaagaaattaaaccaggtaggtagtggcactgttcatactctactgccagagcagcacacgtttttgcctgaatatctttatttctggttgaaggaagaaaatacgtaagttccaaactaaattagtgggagattttgaccttatgaagaaaaggcaggatggctcttttcagaagttatatacataacagcatgctacaatttcacagtcaagattctgttttcaggcgttttttttttaatagcatcagaaagaaaatttacctttggtggcttaagaggggatgggtttcccggccatgtacttaagcttaagcaggtggaatcatacacaggagttattagcaacattgggcctggtgccagctttcctctccaccaagtgtttgctgtaaagctgttttcacaaagaccagggcacattatgggaattttcattttaatgctgtaatagaggagcaaaagccagcaaaacccaacccaaagaaatgggttcggcccagtagtctggtgagaagggatgaagatgcagtccctccagctgagaacaaattgccattcaaagagcacaagtggcccacctggcagtatggccaccttgggtccagtgtccatagtttatgatatctaaatgtttctggcataagttaataattttaaactcagggtaacataataatcgactttttacctaaagcagcagtatttatcaacaaatctggtgaatttctttgaattgtcaagttggaagtactgggtccacagagatcttttcacccaccaggcatccatcagcatccatggatgtggttgttaaggtatcagaattgaaggctattctagattggcctacacccacctggaccttctccatagctggaattttcacaaagaggctaaagagcctggggatgagcgcatcgctctgaagagcttgccgaatccactgtgcatctgtccataagctaaggatggtgtgaggactgaaagctgcatgggagagagaaggtcttgtgattttctctctcttcagcactgtagggggcacattgcagctgtgtctggtgcagctcagtttagactcctgcctcagccaggaaaagtttttttcatttttacattaatttagcaggtatttatggagcatcttctataaattggacaccagataacaaagcaaaagtggcacagtccttgccctcaggaagcttgtgggtctggctgacagtagactagtagcagtagtctgcggtaggtccagagggctagtgggcagagggtgctgcggcttgaaaggtatgcaggagatgacttggagaagagtgggcggggacaggctgggggcttgcggagcagcacagcgaaggcctggaggcttggggggtgcagcactccatggaaattccatgggccaaacacagtgcagagggggttccctggctggagttgagtctggaggtgtccatgaatgaatctgaactttaycctgatggctctgaatggaaagtcgctggagggctttaagcaggggagagttgtgagtcaggcttaggaaggagactgtctagcttcagtttgggtaagggactgagagagttctaagggactgagagagttccgcactctgcctggcccactctcatcacctctcttcttagcgcctgtgctcctccttcccttggaacttcaagaaggcaaaggacagagcccgaagtctgagataagatagactccttggggagaaaagaggaagtggtgctgggtgggtgggtgggggcacccagtgtaaagcagagtgtacaggttgccttggacaagtcacttcacacctatgagcttcagcttccttatctattaaatgaagataataagtattactcttcttttctctcatctcatgagatatcatcatgatatcttaaaatatcatggatattttacatgcccagctagggcttccagagaaatctctctgtttcgtttgccatgtaaggatttgttgaaatcctcaagcgcacattaagtgcatcctgtcgctgcagcttatcgcctgggatgagagcagtgaagaagccctagcctcaggatcagtctcacagctccctctccctgcagccaagaaggaccggtctrcagaggggagggagcaaacactgaccgaaggccaggtgtgtgcttggcaccacccacagacaaaagagtgcttgggcagagctgctagaactattatttaagccatgtgccagatgtgataagcacttacatccttctcagcctcatttagtttgatcttatgaagtacatatatattatctccatttgatagatgaggaaaccgagactcaaagaggtggaactgcttgctggtagtgacacaattgggaagaaggagaagggccggagtctggagttcgtgctctctgacttctgtgggtagcatctgccattctgctggtgctccttcagacctttcagacagtgcagaggacacagaggaatcaagggacagctgttctcttacaaaccttgaaaatcctgtacagagccctcagataaccaaaacgtggtccagaactgaatcctggggccaacatgcccatttagcacttctctcaatcagtccttttccccaggtgcattaaacagggcagctgccttcccaccctatgggcaaactgcttggcagctaggagtgtgcctgctcatctcccaggctgctttcctttgcacctcagcaaggagggcaggccgtgcatccagggaagcacatagttactccttctgccagaaggccaccccctaatctggtttaccgtggacactgaagtcactccctgtctcctggccatgaggaaaactcctttgagaggagcctctgaagccagtggagagagtaaaaagtgagaatcctgcctagttgaacaggcagttcagcctgttctggaaagagttaaggctgtgtccataccaagccatttaaagaatctgcccagtagaatcaatattgtcaaaatgtccatactacccaaagcgatctacagaattaattccattcctatcaaaattccagtggcattgcttacagaaatagaacaaataatcctaaaattcctatgaaaccatgaaagaccccaaattactaaggcaatcttgagcaagaagatctaagttggaggcatcacacaacctgatttcaaatattataggctggacatggtgactcacacctgtaattccagcactttgggaggctgaggcgggagttcgagaccaacctgggcaacatagygaaaccctgtttctataaaagaaaaaaaaaaaatccaaaaagtagctgggcatggtggcgtgcacctgtagtcccagctactcaggaggccaaggtgggaggatcacttgagcccaggcatcgcatcaaggctgcagtgagccgtagtcatgccactgtactccagcctggctgaaagagtgagattatgtctcaaaaaaaaaaattataatgctataataatcaacacacacacacacacacacacacacacacacacacacacacacacacgactattactcagccttaaaaaagaaaatcctgacatttgcaaaaacatggttgaacctggaggacattgtgctaagtgaaatagggcagacacagaaagacaaatactacaggatctcagttatatgtggaatctaaaagagttgaactaagagagagtagaagggtggtttccagagagagtagaagggttgttggggaaatggagagatgttgagcaaaggttacaaacttgcagttataagatgaataaattttggcgacctaatgtacagcatggtaattacagttaataatatggtattgtatacttgaaatttgctaagagagtagatcttaagtattctcgtcacaaaaagtaactgtgtgaggtggtggatatgttaattagcttgattgtgataatcatgtcacagtgtgaatatataacatttttatttgtcattcataccttaataaaactgaaaaaaatttaaagaatctgcccaggtcacaggaagccatcagtcataccctgagctgttgtgtaagctcaaagagtatggtttatagcatatggatgagtgctcttgtgccaacgctgggctaaacctttacatccagtgtctaattaggtagtttctgttattatccatgttttaccaaggaggaaactgaggcttttggagattacatcatttggccaatgtaccagagctggaaagttgcataactaagatttcacttgagctttttttagctccacatcttctattttttcagctacaccaaaacgacttctttaatttagctttgcttttctgataatagtaaccaccaccctttattgagcatcttgtcatgtgagccaggcattatacatccattatttccaatcccagtagaaccttacaagtaaagtatcattgtccccgtttcacagatgaagaacctgaggttcagagaggtcaggaattttgcctcacagatttcatctgagactagagtgagctctcaactatcatcctgtacttccttcattccttaccttttcaggttcctaggaggaaaggactcaaaaaaattatgcatgaatttcctttaatttcacaacaaccctaagggttgggggttgatatctctgttttacaaaagaagaaactgaggctcagagatgttaagtgatttgctcagcgtcatgcagctagcaattggtggagccccgattcatacaggctctgacccatagcttaagcttacttgcctcccccattcccacccctcacccctcttcrgctctgtctccttgcaatgggggcagaaaatccagcctttatttctccaggtcctagtagtcctgggagtctgggggatttccagctcctttgaattcccttttttggcctctactctgcctccagcacctctcttaagagtccttttcactgttgtcatagcaagggtctcatctggagggaagctgccttgaggttggaactatttggctgcttatcagcaaggcttcagggccttgccatagcaactttccaagccacccatcttgtgacctgttctgactcagggcccctgggaatcccctgggtgcagatgtttgcagtgactaggatgcagcagtcggctcccaggactctttttctggccaaggccattttaggaaggcttctgttccagctgtgctgggagagttgaggtccagagcctccaaaccttaagaatgcagggttatgtgatgtctagagctggagtttttagccaggggcttatgggttaagagccccctgtgatcataggtatggttacacacacacgcagagaatatatacttttctgggcaaagtatctgtagcttccctcaaactctcaaatgtgtctgtgacccttaaagtttaagaacactggtctagagagaacccaaagtgttgtgggccactgtgctcccttggccaccagcctctcagatgccagaatcttgagagagcacaccaggcctctagtgtttctgcttaggcatgaactgggatacagtatcaaatattgctgaagttcacaattataactataaatgtacagctgtcctttgggatgccccaagtacttttatttatttatttatttttttgagatggagtttcgctgtgttgcccaggcaggggtgcagtggcatgatcttggctcactgcaacctccgcctcctgggttcaagcaattcttctgtctcagcctcctgagtagctgggatcacaggcgtgcaccaccatgcccggctaatttttgtatttttagtagagatggggttttaccatgttggtaaagctggtctcgaactcctgacctcgtgatccgccmgccttggcctcccaaagtgctgggattacaggtgtgaaccactgcgcctggtgcccctggtgctgtaaaagtacaactgtcctgtggatgccccaagtacaaccacgaaaatgcatgcccagcaccccaaacatgtcaacatgtttgaacrtagtatattcaccccataagtggtagccaattttttattttattaaatattaaataaattaattttaaacacatttttgttttgttttactcttatcattgttattatttatttggtcaggagccaggaatcagatggttatttagtcactgagtgattaaaatctatatgtcaggagctgtgctatatttcaaagatacagtgacaaacaagaaaggcagggtacctaccctcttggaatcagttggaatggcagataatgaacaaatgtatcagcatcatgcctggctcacgggacatttctgtgtgtatttgtcgaatgactgttgaatgaatttcgactgagtcattattaggaagaagtcaaggtgctgcaggtggcaggcaaggaaacttcatctcttctggtgggtcagggaagaggaagagggactcaggctaaagggcctacgccccaggctgccaggaattacacaggactgtttacagggggctggcattcccatgaagactggaggtgtggggggagggctggaatactgaacaaccaagggcttaggaaccttgagtaaatgatgttaatgtgggccagaggtacggatgacatctacactctgctcaagtagtgatggtccctggcttgcaaacatgttgctcttccaggttccaagggaggctgttgttcaaccggtatttacctatgtagcaagttctgggttcggaaccctacttctctcaggaggcaggaaggatggaaggacatccctcctgcagctgaagacggcagagccccagccactgctggcagtggccgtggacacacagtgcagtgtctgagcagtgtgtgaagagactcccttactgtctgaagggcttcactcaccctacactagtgagaagcctctgaatattgtcwtggaagggaagcattcacatattaagggtaaaatcaaagtcagagcaaaatttaaagtctgctctttgcccctcaagaccctgaaagtccccagtgactgtcattccactcacctcctctcccattcactgctccccagccccatggcctcttattagtctttctgggcagcaggctccccttgcctcttgcatgctgtgccctctgcctcgcatacttagatgtatatgcagaagtggtttctaaactcctctctctcatcatgtgtgtgggctgtgatacccaaccatcagtaacagcagctgatgaggacagtgatcattagctagagagcacaccctcagtcgctccacccagcattattagaataataataattccccaccaggtccccccacccggcattattagaataataataatcccccaccagatccccccacctggctttattagaattactatgagaaactatcctctagtgattctgttaattgtgatttttgcccccctactaccactggttaagaattacgggcttatgaactgagctccctaactagaccatggacttccctcaggggcacaatggtatcttactgtttttgtatctgtggtatctagtcccaagcctagtatacactgagggatcagtgaaatttttctgaaggaatggatgaatactatagagataatatcttgcttcttttcattctccacggtgtattttggagatgcattttatagaattagaggaactagaattgacacaaactgtcttcaacccatgaaagtctgtgcttccatgaaggtctctggaaagcagcagaacagtccatctggatcactgcttggtggctgggcatgctgggtcctccccgggcctcctgctgcggatgtatgatctaaayttgccgaggctcagctacacagcaaggttctcagagagtggcagtctccatcctactgtgaaaggaggggcagttttccaaggacttccttgctttcctgcccttccttcagagctagaagactcttacctcccttaccccagagctagaagtaacattagagattgcttcagttatccacttctgcataatccatcacccctgttactcagtggtttaaaacaacagcaatagtttcttatatctcatggtttctgtgggtcaggaatttgggaacagcttggctgggcagttctggcttggatcttttatgcagttgcagttagatggtggctggaactggagcagcttggggccagcaccgctgaaggctggccggctgctgctctttcctggccgtctcaggacctctcccctgtggttacttcatagggcctgtttgggcttcctcacagcacggccacctcagatttcccatatgcagctcaatgctctagaggcaggtttccccagagagagctaggtgaaagctgtataaccctttatagcctcatcttggaggtgacacaaaatcatttttgttgcattctatttgttagaggtcattaaggccagctcrttcggggaaattgaaattaaactctacctcccgagaggaggaatgtcagataatttgcagacatgtttcagaaccaccacagagatacccagtttcccccttcattccacacttgagactcccgaggtttgaggggaagagccttgtccagaggtgcccagcctggcatgggcagacctggagtgtgacccagcccctaggcctttggcaggcctgccaggaagtgatctcactttcccttccttcctgtcccctcacagtaagatagagactgccactctctgggaaccttgctgtgtagctgagcctcagcaagtttgataatacagacacagcaggaggcctggggaggacccagcatgcccggccaccaagcagtgatgcagctggactgttccgcagctttccagagacctccatggaagcacagacttccatgggttgaagagagtttgtgtcacaattccagtccctagccctggccctgtgtgaagtagtaacaccgccctgccagtaggatatagctgctgaggaggtaagagttttaaaaaattcataccccaaaataattatttttactcttgctgtgaagttagataccaaagagtagaatgtggtggtagaatcaagagagtcaacccaacatcactgaaaagattctgaaggtttgtatccagctgaatatccaaaacaggatgttgcttaagcatgggtaaaatgcatctggtgtatgttttagacagccttgtactatgttttccagggacttgcttactttcttgcccttccttaagaaatgccttattatgaagctgggggcaggggaaaaagaaggtcagaaaagggaatgggtacttttcagtaaatccatactacatgccaggcataatactaattcactcccctgctttatagcctaatagcacaggctccatctggctccaagctccctaaccttgctgagtttcagctgcctcttttgtactatgggataatgatactttctgtcatagagttgctataaaattaaatgcttgtaagatgcttagcacagtctggcatgcagtaagaaagaactgtgtaacaggccaggcaccgtggctcaagcctgcagtcccagcactttaggaggctgaggcgggcggatcacaaggtcaagagatcgagaccatcctggccaacatggtgaaaccctgtctctactaaaagtacaaaaattagctgggcatggtggcgcacacctatagtcccagctacttgggaggctgaggcaggagaatcgcttgaacctgggaggcagaggttgcagtgagccaagatcgcgccgctgcactccagcctagtcacagagcgagattctgtctcaaaaaaacaaaaaacaaaaaacaaaaaaactgtataactgttggctccaattaatccccacagccactttttaagacaagtgtgagccctcccattttatagaaggggtgtctgcagttaggtgaggtgcccagcatcatgtgccactgtagggacagcagctgagactctgaagtccttgtggcatccaccacaccacattaccctccgggcagctctgccagggctttcctgacatgcaatagttgggggcagaggaactcaggaggctttgtgccctacaggagccccatgtcaggtcctagagcaagaacatttgaaaaaccaaggccaggaatccatttatccacttaggaggctctatagggagcagggttacagagaatgttgtacacagaggaaatagtctagtaaaggctttgwggtcaggaattaaatgaggtttgaggatttaaagagaggcccagtgtgaccagagcaaaatggaccaagaagagagtagaaatgagacaaaggctcatctgcagaggcaggcagggccaggtcaatgcagggcttcagggactggcatcaggagagtggatttcactagatgtgaaatagaaaagcatcagaagttgaacgaagcagggaaattccagtgatccaatttccattttgagaacgttaccctgcctgccatataaaaaatagaccctgggctaggggtgagagagacacaggactctggtcagggtctctgctcagagtcctggtgagacattccggagcctgggtggtgcatgtggaggagagaggtcagcagattcaagctctgttttgcaggtagaaacaaaaggaccaggctgggcactgttgctcatgcctgtaatcccagctctttgggaggccaaggtgggaggattgcttgaggccaggaatttaagactaggctgggcagcrtcgtaagaccctgtctctacaaaaacattaaaaaaaaaaaraagaagaaatgacaggactkggtaaagaattgtccatgggtggtgaagaagaagcgaggtcagggatggtcctgggtttccagctgggcagatggtggtgcccttgctcagttgggaaggccgtggcgagcaggctggtgacttgacgtctgaagcttgcagtgctgtgggatagccaaatgacacgctcaataggctgagtcagaaatctagaactcttaagagagggttgcagctctttgaaggtcaccaacatagattatttcgggaaaggataagagcccctcgggagcaaacagaagagactggcgtcctaacacaaaggtcccggcagtagcaggtgcctgtgcagactggttggagggaggcccaaagggtgtggtgtctggaagtcccatgaagagaatggtccgggaagaaatgagttggaagaggaggacagaaaggtgtccctggggataggcaccgtagaagtcactcaggaccttgtctgacttgagcaccctgaccttcccttcctatcactgcctgcatccaggcctgcttgggtctaggcctggcaggtgcagaggccaaggcccggcctctctgcctccaaacaaagcctcacccagggccactctttgaatggcaacaggcactgcccaggcaggcgacaggctcctctctggtgaccttgtgctggatgtgccccaaggcgctgggtagggctttgcagccagccccaggcaggccacacatggatagaaccggcagccctcccttttcccaggttcttggaatattytcattttggggctctgagttttctgttggcctcagtgcctctcttttctggctttctatcacagagagaagccgctacccttgaaatttgatgaatgcctgttcagtaggccctggcatttctgtttccacggccctttcgtccctcagagaagccttagagagcattttgcccacccctgataaaacttctcccataagaccaggtcccacttctgtgcttcatgtcttctgcaaaagtctgtttgctttttgtatggtttctgcaaatactgaatttttgaaaaagaaaaaaaaacaggaaatgacctttctagtatatttggaaaacaatttggagcttgtaatggaatctgcctgagcaatgaggactaatagctgcagacttggaacagaccatgtagctcttggcagagcctggggcctcttcagtttacaaagctggggggagtattagaaacccacgggagaagtggcttcctgtggggaaatgcccagagcaggcacctgcaggcactgtaacctctgaccccagggccccaaaaggyctggggacagagtataagggcttcaccctttgtcctgggcattcaaggtcaatcacatgtctggcaatcatccagatcccacaagataccaaaacctcctgaggatgaggaaaagaaagagcttcattctttagcaccctgtagggctcaggctgagctagaagattctagattgtttttagactcaaattgcctgttggctctctgggtccctctctatccaacttttctgtagatttcagcaaaaaccacctcctcagagaggcctttcctgatcatacagccattaactgcatgatccacatgcagagaaccctctcctcttctcccatagcacataccataatctgtgataagattcatttacttgtgcagtgcctttttctctttacacattgtaaatatcttttttagtttccagtatataccctrtgcccggcacagtgcctggcatgtagaagttgctcagtacattgaatgaataaatgaaatatcaagactggaagacttggaggccaggtgcggtggctcatgcctgtaatcccagcactttgggaggccgaggcaggtggatcacttgaggtcaggagttcaagattaacctggccaacatggtgaaaccccatctctattaaaaatacaaaaaaaaaaaaattagccgggtatgttggttcatgcctgtaatcccagctacttgggaggctgaggcaggaaaagcacttgaaccggggaggtggaggttgcagtgagcagagatcatgccactgcactccaacctgggcgacagagtaagactccatctcaaaaaaaaaaaaaaaagactggaagacttggagatcatatttcaaacttcattatttagatggtgggaaaggaagctgagagagaaggggactcatcaagggtcaccctattgcgcgggtattgaaccagatcttcagccactgttatgatgcagggccgcacattctttgctcttctttccctgtaatctagaacatcttctattattcacttgttcatcagctattcattgagcttcaagtatgtgcagggccttctggacgtaacagtaaacacaccagccagggtcaccacttctggggaatttatattcttaccacacaacaccataaagcaccaaagaaggaagttttaatcttctgtagcaccgttaaacagagtaaaaacaaaggagctgaatgaaatgtccaaaggcaggttttactaactcagcccccaaatgaaccatcctaatcatttattaattgcattccacttacattccccatcacttactacactttttgcatcaccatcttattgaatcttcataacagccccctgaactgcagggtgtgactgttagccccgctttgctgaggtgaggggagttgtgcacggcccacagctggtaaacaacaaagctgggctggacgagcaccctagatgccttctaccctgccacccattcccctcagagatttgtaatgtcatcagggactcccaagggggcagtgtgatgtggggaaaagagctctggaccgggagttaggaccgctagatcaagaaccctgggcaagtgccttgccctttctgagcctccgtttccgcagctgttgatgagaggcttgtctagatgagctctgggatgtctttcggttagattctacaacaacttttcattaattgaacaggtatttgccctgtgatggtcctgaatgaatcaaagctgtctccctgctggagataggtcatgggctgttggaagtaaaggtttagaactcaggagagaaaagactgtagacccatgtgttagggcatattagtaatcatatattgagaacatccttccgtgtcaatatacataaatggattggcctgattctttttaatcattgaaggtttctgaactgagcatgaggatgagccaactgatgttggggaatgtccctcttgaagtagaggacagagggcttgaggatgaattgggggtgggggtggtgaggaataagtgagaagactgggggcagaaaagccagttggggaaggttgtagtagactggatagagatgatgaagcgtaactgaggccatgattactgcatggagaaaatgggaagatggacctgaagagagaaaataattgaacctgggtaattgagctttaaggtgcaggatgccttcttaaagagaggaagaagtcaggcatgagttacgggtaataggtttttgacttgcataattgattgtggaggtggctcctgactaagggaatgaatgagagagagtcctggaggagggagagcataattttgttgatatcctccgggaggattcatctagatgtctgcagctcagcaatgaggggatcgacattgaaatgaatggaagatgatgtcatgagagagaacgagacgtgtagaacaattagagaaacattagaagagagtaaaggatggaattaaggagatatacaagtagtcaaggtgttggactaggagaatgtaaaagagcattctgagaagttgaaggcagttgctttactgcctgagccttagtttcctcatttctaaaatgaggattagaatcgtgcctactcgttgtgtttagggttacatgagagaatgtgtggaaggcacttaccttgcatatcagaagtagaactcatgcaataattcatcattcattccgtaagtaagagtcaagcaccagcatatgccaggcagctgggccagccctttggagtacacagaggagcaaaagggaagtctgagtgcctgaccttgtgggagaggaattgtgaaagaaagaagactcaatatcataaaaatgtgatttctatctacattcaggtaccagatattactatatatatttaatgcagtcctgataaatacaagataaattgggggacaagttaaatgactattaagtttataagaaaacatagatcagcaaaaacagccagraaaaaaaaatctaaagtcaaaaaagatttgagctatgagaaggaaaccatcctacaacatgatactagtatatgagtagacagatcagctggagagattaaaagattcagaaacaggccaggtgcggtggctcacgcctgtaatcccagcactttgggaggccgagacgggcggatcacgaggccaggagatcgagaccatcctggctgacacggtgaaaccccgtctctactgaacaaaatacaaaaaattagccgggtgtggtagcaggcgcctgagtcccagctactcaggaggctgaggcaggagaatggcgtgaacccaggaggcggagcttgcagtgagtccagattgcaccactgcactccagcctgggcgacagagtgagactccgtctcaaaaaaaaaaaaaaaaaaaaaaagattcagaaacagaccccartacacagttttgtatgtaacaatgatagctttttacatcaatgaggaaatgatggattactccacaaatgatttgagataggtagaaaaaattaaggtggctcgctaattcataccttattacagataaattctagatcaaagatttaaatgtgaaaagggaagccataaaagtastagagaggccaggcgtggtggctcacacctgtaatcccagcagtttgggaggctcaggcaggagtatcacttgagcccaggagttcaaaaccagcctgggcaacatagtgagaccccatctcttaaaaaaaaaagaattagctgggcacattagcatgcacctgtagtcccagcttctcaggaagctaagctaggaggatctcttgagcccaggagttcaaggttgctgtgagctaggctggcaccgctacactccagcctgggtgactccagaccctgtctcaaaaaacaaagtaccagaaataaacaaagggatttctttactaatcttagagtggggaagacatttctaattatgttacaaagcccagaaaccataaaataaaataaagatcaattttactaatgaatataaaaatatgtatgtggggagaagtgccgaaaaataaagtcaaagtacaaatgacaagtaaaaaatactagtaactcctaattagacaaaagactaattgccttaatatattaagaactcctacaaatcaataagaaaaagacctaaaatccattagaagtgggcaaaagaatttgaagaaacagtaaacagaaaaggagatgcaagtgggaagatgctcaggttcactcctaggagcagtaggaactaaaacaatcaggcactggttttaaaaccaccttttagattaggaacaaaacagcattaagaagactgtggtgaaggaaagtgctcatctgatatacctactggggattgctatggtttgaatgtgttccctccaaaataccaatgtgataatattaagaggtagggcctttaagaggtgattaggtcatgagggctccttccttgtgaatgggattaggcaccttttataaaagggcttgaggccaggcatggtggctcacgcttgtaatctcagcactttgggaggctgaggtggctggatcacccgaggtcaggagttcaagaccagcctggccaacatggtgaaacctcatctctcccaaaaatataaaaattagctgggcgtggtggtgcacacctgtaagcccagctacttgggaggctgaggcaggaaaatcacttgaatctgggaggaggaggttgcagtgagccgagaccatgccactgcattccagcatgggcgacagaacaagactccatcaaataaataaataaatgggcttgagggagtgagtttgcccctttttgcctttctgccatttgctctgtgagaacacagtgttcaaggtgccctcttggaagcagagagcaggcctcaccacaggctggcgccttgatcttggacttcccagcctccagaactgtgtgaaataaatttctgttctttagaaattactgagactcagatattttgttgtagcagcacaaaayggactgagagacaggaactaacttctgtggggagaagttggcaatacctgttataataaaaaagtcacagatcctttgaggtggcaattccacttttatagaaacaatcctcaggtccatcaacagggaagtaattaaatcaatctacaacagtgagacaacagagtatcatgcagacaataaaaggaacaatttagttattactttgggtttgttttcagtgtgttgatgtaatcagtgctgcagtggcttcagagygatctacagttgtttccaaggtgtgtgtgtgtgtgtgtttgtgtgtgtatatgtgtgtgtgtgtgtatatatatatatatattttttttttttttttttttgaaatagagtctcactgtcacccaggctggagtgcagtggcgcaatcccggctcactgcagcctctgcctctcgggttcgagcaattctcctgcctcagcctcctgagtagctgggactacaggcgtgcaccaccacacccagctaatttttgtatttttagtagagatggggtttcaccatgttggccaggctagtcttgaactcctgacctcaggtgatccacccgcctcagcctcccaaagccaagacacatttttaaatgaaaaaaaggcaagatggaaaataaatttttttttttttttttgagacggagtctcactctgtcacccaggctggagtgcagtggcacgatctcggctcactgcaagctccacctcctgggttcacgccattctcctgcctcagcctcccgagtagctgggactacaggcgcccactaccacgcccagctaattttttgcatttttagtagagacggggtttcgccatgttggccaggatggtctcgatctcttgacctcgtgatccacacccaccccccgccgcctcggcctcccaaagttctgggattacaggcatgagccaccatgcccggccaaaattttgttttaaataaaggaaaaaggaagggaaggagaaaaagggggaacatatatattgcataaattttgtctggaaggacaccaaaacgtgcttgccttggggagggtgtctggatcggatgggaagggagactaagctcttatctctgtccttttggaccttttgagttttagaccacatgcacacataatctaaaattaagtaattttaagatgaagtgaatgtgttcactataaaaaggaaatataacagattttaaaattacttataaaaatattaatgtatgtaattatatcactggtattctttttcatttaactatatgtgaacattttgccatttctttaaaaaatattcacaaacatcattttaatgcctgaatggtatttcatttagatacaaattagttaagtatgtatatattaataattctccattgtccgtttaggacatgtgacacatccatttaggaactcattttggtgtctttagtttcctgctattataaataatactgtgggccaggcgcagtggcttaggcctgtaatcccaacactttggaagtccgaggcaggaggatmasttgagcccaggagtttgagaccacgagtttgagaccaccttggttaacataatgagattcccatccctgaaaaaaaatgagccagacatggaatagtcccagctactcaggaggctgaggcaacaggattgcttgagcccaggaagttgaggctacagtgagccatgattgtaccactgcactccagcctgtgtgacacagcgagaccctgtctcaaaaaaaaaaaaaaataatactatgaggaacatctttgtacattttatcttcatgtagatcttggattattttcttagaatagattattataaactgatttagtagctaaaagatatggaaaaagttgaggtttctggatacacactgtcaagtcactgcccaaggaggtcttggaagtttacagtctcattaacagggtttgagaatgaccattttctgacaggatttccaactctgaggattctttatttccccatttgctgttgactctaaagatgagagggtgagtgacgaatataaatatgggagaaaaataaaacgatgtgtttctgctttcgattggagagctccccagagccgtctttggaattgctgttccctgaggggatatggtagccagagcatgttggcccagctgatgttttctaggattggtctttgagtgtggcatttgctgtctctgtgtcccgagggccagtggcctgcactgggcagcctgtaacatcagatggcattgtgagatcaaagccccaggagacattccagcatgaagctggcctttcagatagagcctgtaattccatcccatggtgtcaggtcctaggacaagaacacctgcacagcactccacggtgcacggaggcccttctcaacagccccaagaaggaactgcggctcctccccacagaggacaggcgggcagcaggggagaagagggatagacacaaactccctctccttcagaggcccgagagtgaaatccagcgagtgtgcatggagcgcctgctctttaccaggtgctggatgagaatcagggaatgcagcggccagaacctgttggctcagctgccaggattaggtttcagctggacatgggaaaaatccagaccaaattcctgttcccgtggagctgacagtctaactgaggaagagccgaggactcggaggctccgggagccagtgtggcctgctcggggtttgtcattttccagagcagcgggtttcaggtggggctgaggcccttctgagccgtggctgtaaaccggcctcactcacctcagagggcagctgtggccactgagtgcgtgatgtgtatgaaaacacaggcacctgggccatggtacctttccttatcgtaggaattgtcagcatcatttttatcctctgttattactgttattatcataagccattttcctgtcctgaagcattgagcggtttccccagaggcagagcgcaggagtgaacctccgtgacctgtagaaggagccacctctggaacttccgggaattcttttagccaaggaggagccagagcgtgactagggcagcgcgcaaggctgctaggaagataggcagggtgcgccatctgctgtagccggggggaattgccgtggacagtgtcctggccctcctctattttacacaggggaaatgaaggccccaagaaaggcagggtcttgcccagggttaggtggcagagcttgggtttaaggtcacgtgtctcattctttgctctttctaccataggacacctccctgtctcacctgtctgatctttgagggcccctaattcattctttaggtgtttcttctgagctaggtgttgtggggggatgtgggccttgccctccatactgatcctcttctctgtctctctctttctctctctctctctctctctcttctctctctctctctcacacacacacacacacacacacacacacctgcagcacttackggctcaaccccaccctgggtgccttctgggcacttctgccaatgtcagctaccttctaaaagcattgcacaataatttgggtttataaaacttcaaccattgaaaaaatrtagacttagaaaacgaaagttccccttaatcacaaagaaccacagttgacagggttgatagatgttttttcagatttttttttcatatgtctgctatctttccccacaggaactgggttttattttaggtgttgttttgcaacctctgtttttcagttgccagtttatctcagacattgtcctatgtcagtacaggcccatctggcacatttctttattattttttttttactgacatgtcattgtatatatttgtggggtgcaacttgatgttttgatacatatatgttgtataataatcagatcagggcasttagcatatccatcatctcatgcatttatttctttgtgatgagaatattcaaaagcttctgtagttattttgtaatatagaatgccttttttttttttttttttgagacggagtctcgctctgtcttgcccagggtggagtgcagtggcgtgatctcagctcacggcagtctccgcctcatgggttcaagagattctcctgtctcagcctccagagtaactgagactacaggcgtgtgctaccacacccgactaattttgtatttttagtagaggcgacgtttcacgatgttggccagcccagtctcgaacttctgacctcaggtgaactacccgcctcggcctcccaaagtgctgggattataggcatgagccaccgcacccggcctagaatgccttattgttaaccatcaccatactgtacaatagaacaggaacttactgctcctatctaattgtaactatgtacccgttgaccagctttccatcctttcctctcctctcccctccccagtctctggtaaccactgttgtattctctccttctatatcmacttttttttttttttttgacagagttttgctctgtcacctaggctagagtgcagtgtcatgatcttggctcactgcaagctccgcctcctgggttcacgccattctcctgcctcagcctcctgagtagctgggactacaggcgcctgccaccacgcctggctaatttttgtttgtttttttagtagagagggggtttcaccatgttggccaggatggtctcgatctcctgacctagtgatccacccgcctcggcctcccaaagtactgggattacaggtgtgagccactgtgcctagccgataacaaatttttttttttttaagattccatgtatgcgtaaaatcatgcagtatttgtgtttctgtgtctggcttatttcacttaacattatgtcctccaggtttatccgttttgtcccaaataacaagatttcattcttttttatggctgaatagtattcctttgtgtatatatacattttctgtatccattcaatcatgttggacatttgggttgattccatatcttggctattataaatagtgctgcagtaaacataggaggtcagatgtcttcttgacataccaatgtcagttctttggatatatacctagtagtgggattgttgggtcatatggtactgtttttaattttctcaggaaccctccatactgttttccatagtggctgtatggcacatttcttttttatgactacttcataattcacgcgatgcctaacctcctggtggacatttgggtggtttcctataggctgctattactgaccaggtgcagtaaacatcctcacactagagaaaacattgggcatttgcctgagtgggtctagaactaggatttgctgggtgggcccatgggcccaccccactggactatgaactcctaaagtcaggccagtgcttagaccacccctcccacttactaattcaggtctgcgaggtagccagagtccatgcaatgactgctatctaattgccttcagaaaaccataggtgctcaatgagagatactagtatccccttygcaaattaaccttttgttaatatagtagcagtacttcttgttgccaagagtacataaatggacaatcttgtgtgctactggtgggaatataaataaaaacagcactgactttataagtctttctgccaattttttgtcatcatgaataccactgtgctatttgggaaggcaactgggaaatgtgtcaaaaatctaaaaattatttcacccttccctttagcccagcagttctacttctagggatatactctcaggaaacaattagggatgggcacagagactttcataaagtcccagtgctgtgtgtggcggtagaaaacagggaagtacctctgtgttcatttctggaggcctcatcctagagtaaatcatggcccatccaagcatgctggcacaaaattcatgtggagggagacttagtgacatgttctaaagcgtcccaaagagtaggctacaaaacacaacataaggtatggtcccaaatcatttctaaatgtatgtggctcttctttatatatgtggcactcttctctcctttctctagactgtgttaccaagcaccagggctgttaactgctgtctctgtagtaagaactactaatttattttttctttttttcgagatggagtctcgctttgtcgcccaggctggagtgcagtggcacaatctcggctcactgcaagttctgcctcccgggttcatgccattctcctgcctcagcctcctgagtagctggaactacaggcgcccgccaccacgcccggctaatttttttgtatttttagtagagatgggatttcactgtgttagccaggatggtcttgatctagaactactaatttcatatctttcctccccactccacctctcttctgagctccagcctcctagttccatgtacctagcctacctctccccttggagggctcacaggcatctcaaagttaccgaataggccaaacaggactttatgccctcaaatattcctcctttgttcttccatatgtcagcaaaccacacttctgtccacctacttattcacaccagaaacctaaattacctgtcaatccaacactacttcttgttggttcgatttccaagttatatctagaatccttcccactgcccccctcctccacccaccatcttggcacctgaacttcacaggagcctcctaacttgccccttcccagcactgctgtgcccggccgccacagtcacctttgaaaatgcacggctgctacttcatggccttgcctaaagcccctcaggaaccaagttccagatgtggtctggctcctgcctacctcagcagtgtccttggtgtcattgtccctcttctgccatgctcccgcctgctggctctttctgtccttccaagccctcatgcctccctccctcagagccttcacacatgctgttcccctctctgtagtgctcttcccctcactcttcatctgcatgacgcctcgtcctccttggttctcagctaaaatgtcactttgtgacccccagccttgatcaggtcccagtgatcactccagcaccctgcattctcccttgaagccttgagcaccaaggccatgacttaggtacgaggtgactttatgccacctgtagtagatggtaagctctgtgaggccagggaccatggccagtttgttcatggtggtatctgtgccagtgcctggcrcatggtattaataaatgtgtgtacatgtttgtcaataattttatttaaagaaaagtctgagcccatgttctttaaaatgttgatggtggttgyctgggtgtggaattatgagtgacttgttttgttctttgtacttttctgtgctttttgctttgttttcaataagaggcaataactgtcattttgacagaagccactgtgctggggaactggagctgtcctctctgcagaatgcatctggacttacctctgcccccttgccttctgtccccacaggcctgaggagcgatgcgacaggcatgatggaggtcgagtcctcctactcggacttcatctcctgtgaccggacaggccgtcggaatgcggtccctgacatccagggagactcagaggctgtgagcgtgaggaagctggctggagacatgggcgagctggcactcgagggggcaggttagagccagcaggtccttggcactactgcatgccagaggccctctgccgggccccgggctagcctccaagtcctagactgcccatactttcttagagaagaaaccacayttaagtcaggcctgccccatggtcagtggcagagtccagcaatctctaggttggaagatgtttgagtctcaggccccaaggactcytctggacaggcatccgggactcttcctgtccccctgccccctagcccaggtccctccacttctcgctatccccacagctatacctggctctggccactcacagctctcacctggctgactttagcggccggcttccctgggctccctacacccatctccgcccttcctgttcagctctatgcagcagccagcagaccccatttaaaccattctgtccatcatgcttctgccaaaaaaaaaaaatcccccagtggcttcactgagtgaagctaagcttgtcacattgccctggggcagtcctgctgtaggccgggccctgcccaagtctcacccggtgccactcctctccctgacaccctccagctacatctacctttggtctgtttctcagtcaagcctctccaaggggccttctctgagtgctagatcagccttccccaatcacatgaccctcatcactctctgacaaggtctcaggggtctaaatgtgagcgccgggagggcagaggccttgcattctgtttggcacacagcaggtgcttggtaaccacagaccgaatgacaaaaggaaacagcatccacccacccaagtcctggctggaacacccccaccccctccattcccccagagaaccccttggctcaagtccacagtcagcctgggaatttccttgggaagcttccctgacccctgcacggctgaggcctttccctcctgctctcacagcgccacagaggccgtgtgtgcttctcacagcacagccatcaggctgcaactgtctccccgtgggctgtccggagggccacagccctgcccctccctgggtagccctagtcttcttgcccctcactggccagaagtgaatcaaaagtacagaacagagaagactttgccggggcttggacccagccctctcatgttacagatggacaaactgaggcccagagaagttggaggacttgctctgggccacccagggagttaacatagaatctggccggcttgagagagagcccccagcaccctgtcgacggaaccccaccccaaaagccttccctgtcccataatctattcattctcctctgtcacgtggcccaggcagaacctccacaggctcaccctgctcgcctctccagcatcaactctcatcctctcgccagccatagtcaagtactttgatcgctcagaagcccctgtgggccttcacacgctgcacctctgtttgcttctcccctccctccccttgcctggctgggttctcttcattcttagagacccaggcatctgctcagctgagaagccttccctgaccgcagtacccctcccagaccggggaggcacctcttctccctgctgcctccatgagcccactgagcataatggccctgctctagactgagcttctccagcacaggctctgtgtcttgtgccctcggtgcctggtggtgtttggcacatgatggaggtaccgagtcaatggctgttcattgaccgactgaatgaccagcatgtccagctgccacactgggcacgctgccctgggctctctctcaaggcttctgtgtcctcaccctcagctctggtgagctctgttctgtctctctctccctcagcagttgtagctgctggcccatgtgcccaggcyctcctaacacctgttttccctgactcagattccctaaagtatgggtcctctggctacatgacattcacctgccagggtgactgacatttaaaaagggggcctgaggaaagaacagtgctcactgaaggaaaggaaacactcacggtggcgtccaggcaagagtgactggccaaggagccttccaggaagcccgcagggagcagttccgtttcacaggcggggctgcgggccacgcccactccagcgactccccaaggcagggggagtacagagttccaggcgccaccccgctgggaataaaagcaggctttccaggcagcgggctcggaatagggtcccgagctaccacccacttcctagcttgccgcaggggcacagtgaggcagtgctgatgtcaggcctctataaaccttcaggaatgctgcttattggaggaggttaaatttggtagaaggggtactagccttggtggcaggcagggctctccacccttgatccaggcaaatcagctcacctcgctgggcctcggttttctcatgcatatcatgaccctagttacacctccatgttactgtgtgcattgcacgagaaagtgcccatccatctgcagaccctggagcttgctatagggtggtgattctcctggttctgtgaagggcttagcctgaaggataaaaaggtgtggtctggttgggctggatttgaactcaggccctcagtgagcttgtagggcacctagtaacattgcacagtgtcactggggtttaagaatgtaccacctattgagctctgcccacatgccaggccccacgtggtgcaccttatgaaaagacacctgtttatcatgcagcctgaggaggaaagcatggagactggggcctgggtgtgagtttggcactcccctcaacctgcactgctggtccagtgggtggcaggagctgcctgtcccaccttgcacaggggggctcaagggaagctgaaagtgaggagacttggcttgtatcctgactcccctcagtgaggtgctccatctctgtgagcctgctgctgcccctcaccccaccaagatgtctgacaggatggatttgagaaggaggtacaacacacaccccatgatgcacggttggcccccacagacyctgatgcaggccacaccctggcgctccctgagctggcctggttcagtgctctttactctcttagaagaacattggccgggcacggtggctcacacctataatcccagcactttgggaggctgaggcaggcagatcacctgaggtcaggagtttgagaccagtctggccaacatggtgaaaccccgtctctactaaaaatacaaaaattaaaaaaaaaacaaacaaacagaacagctgccatttgctgagcacctgtgacacactggggacttaacatctggcctctccctctggggaacctgcacaaacaaagcaaccttcaagagcccttcacttgatgctttaagcacccatccataatggcccttaattgactcttaattatactaacaaacactatgtgtatttccatgtaaaaagatgttacagaccaggctaaagtccataggccaccaccacctcagtccagctccagctcgtcttgctccccagggcatatccactgctatcagtttggctgggccctttcacacctccttctgtgcattactttgtgtatatgtgcccaagaaaaacctctttctctcctctccagaaggacaggtggagggaagcgccccagacaaggaagctggcaaccagccccagagcagcgatgggaccacctcgtcttgaatctgaccttgtccaagaaggctggacgagagaccttctgtcccctcccagagggggaaccctggcactggcccagcagcctcttctctgagctccatgtcccagataaaccaggccagactgagaaggctccccagaggcctctgtggcctccactccgggaaagccctctgcccacacccacaggcttcacattcccaccaccttcgcaccgtgcccaggtacactttcaagacactgtaaccacaagatgttatttattgagctggcgccgggacttgggcggggcctgccctacagtgagcagcccacacaggaacgctcctctcgcgagcggcccgggcagggaccctgtcccaacaccaacacctcctctccagcccaatyttytgggtccagacctgcttgtcccttttttagaaaacacttttaaactttttaaaaattttaaaccttttttcagcagatatggagagagctgacaatcaattcacattttttaagccattttagctaaactgtcattgtgcatctctgaggttccctcatggagctccacagatccatttttagggaagggattttggctcaaaacgatytgaccacctytgccctgtccmccaggataagtgacacctaggacccaggaaataaatgccgatgatttgtgwgactggtttaagattatttctccttaaccttgcaaaaacaggggttgggccttattttccccaagtccacaattagccggacttgccccaggcttctagaacatacgattctgagaagatgctggcgttctgcagaggccagcaccctccaaggccagtgtctgatgagccctcttccatctcatctgctctcaccccaactgccagcttcaggaacccaaaaggaagctttactccttaaaacctagagttaggaggggctgagagttcagggaatgtttgagcaacaaccagagaagccttatttcttctggaaggaggacagcctctggacccctcttggcccacagcattgggatctctggcctggcattcacagccacccttaggctcaggccctgctgctgagcaggctgacccagctccctccatgctcatcctgcccacatcggcccgcccaagaccaccaaattacatgccacctgctgcatgccaccagccatgggcttctttattgagcaccagattttcagtacaagttgccacagaaggagggtttcagattcaaccatgcccatgtgcaagggcgctggtccctggccagggcacataatcagagaagtgacgcggccatgccgaggtatacgtgtgtgcagaaatggacacatagggttcaggagcatcagtaactgactattgagatcatggtcttcttggaaggaataaatgtaaaaatgttgctcagccccacagagttggggtgactccacagggtgaaggcttggaggagtggcgtcttcagaggttctgccctgctcgttggttcagagaagcaaaaagatcaggcaacttgtagtacccaggatgttgtaaaaatcatagaacaccagaaccagaaaggaactccttcctatgatggcaagaagatgccttgccaagaccacataggaagaaaggagcagaacaggcctgggcccctctccctgcccttggctttgggcagccatggaggtgtccccaactgcccagacctttgggactgggcttcagaaagtctccccttagaacagcctctcaagaacttttatagaaaacaaaccgatctaatgagacgctgctcccagccagggcccagaaaccagggagtcatcacacattcatggcgctgcccaagaatggaagggcatcttgctagaagtcccacagaaagccacactggggccaggacagggcaactgcccagaagcccagacaggaacctacctgcagaggctgaaggtggcatcccataggctttatagagcaggtcgagaagctccctcttttcatcttctgggaggaaactagatttggccgcattgatgttctggaaaggccagaatggcagacaacatggaaccagagaacaaagaaggcagctcttagcaatgtagtgatagtccatcctcttcactcaacatgggcagatacgcttagagggggaaggatttgtccactgtcacacggcagcaagtgccagagtagagaccatgaggtcgtgttcttaatttgtcattacatgaaaaagggctgtgagaaggaagttggagaaacctttgagagacagggtggcatgtagggggccagagacacctcgcagacacgtgcaggaatggacttattcagcctgggatttaagaacaacctgaagagagtgtgcaagacttcatagctgctgcacacacctttctggggagagggttgacagctttcactggattctttaaaggcactcaacccaagcaaaggatcaaaaacctggtcctaggtcaggacgtcaacacaaagatgtcttctctgtggaaagtgtctaggttgggcttgtcttggactgttgaggcagactcactccctctctccaaagattccaggccccggactggacctgtagataccatactcccaaacccgagtcaaggccagtatggctcacacccactcaccagccttttaaactcctcttcagtaaagcccatgtcccgtttggtcatctggtaatcagtgtccagggtggacttgaagatgagcgggtcatctgtgttgagcgagtagttagcctggtcatttttgagcctgcagaagagggaggaggagagaatcagcctccttttactcttacataaatagtcagaacacattgacgttcacccgcctttgatcctcacagcagcctcaaacagatctgaaagatctgatccttgtgcagagggggaaataaattcagaacttaggtgacttgttcaagtctatgtaaccagaaagtccagaatccagcccatcctgaagaccagagctgggcaaaggcagcagaggggccagacatgggaaccaggcagaatggcagccggtgggggcgtgggggtgggagccaagaaagcaacatccccctccggctgccaccctctccagccttcccctctgcaccctaccctgcttgttcctcagtcccactgggagctggctactccaacataccatggaagctgttcttggcacgatccctgaccaccatcttgttgtatctaatggatctttcctagctctgaccataatcgacttgcatagcagaatttcacactgttgactgtttcttgaaaccttttccctggatttctgtgacaccacacttttgactttcctcctacttgtctcttttgctggtcccttaaataccattgtccttctgggttctatcctaggcccttcttgctccaccacctcctggggccactgcttctccttcagccaccatatctgtgcagatgactcctggatctttttccagcccatggtatacccacatgcctccaagaacctccacaggtgccacgtgtccctaaggcaagccccaagacccccttgtcatcagaacatcagagccgaagcccctccccttctcatatgcctggcagatggataagtgctggcctgaccatggtcaccctgagttcttgctgtccttgtcttggggaaggcggctttttcctaaggcctgatactgctcctgtggcttggcgacaggacggaaggagggccttgaccctggttagactccaggatgggagccaggcagggtggaacagaccctccggtggaaagcttcaagatggcgctcaggggaatgcccaggggtcccaagggccaggtgtcaggaagagagaacatgctggccagagggactcctgcttcctatgcgatgcccagggggcagagttgggagaattggaagtgtggaagcttccctcagagtaatggagcgttctgctccagctgatgagctgtagggccccagctctgctggttagcagctgggtaatcccagtcaagccacagcacatctgggcctcggattcctcatttgtaagatgaggacggcaatgcctgcttcccagggtgtcgaagagatttcatatctaaaagacgcggcatgggctgatgcccaatccctaaagtttcttccctctttggccttcctggaacaaaattgaacaggcccaggggaacagagctcaccgaatgactgcatgctccgtgtccggcttccaggcaccagtgaggtagctggaccaggggcagatctggaagagcaggtgtgtggctggcagggatggccccaggccatgctgattcctccccccatgtctgggcctggggccacccctcgagttcctgggacccgccctgctttctgcctctctatacaggaagttgggacagccggggatggttcctccccactccctggcccgcttacctcgaagtgcatgttttcctgccgcagcctgttataaagggcctggtcttccagggtgtggtagccgtgtcccagccgctctgtcttgagtatgtccacagcctgtagagaagcagaatagagccaagtatgggaggaggcagtgaggagggaccccatggccagcccaggccctcacctcttttactacttcggccgagcccacctccccggcgtggacagtacggtgaatgccgctcttcacagcctcctggaagggggagagccaggtcatgggtgccctagcgggagggccccggcaggccctgccttgaccatgctgtggagattgaaccatcctagtcatgctgcctgcttcaacagcatggggaaacctggtcttttaccctccaagtccttatctaagtggtagctgtcactcattagccagttaccatgtgtcaggtagtatatgaagtgacttgtatacattatctaatattcacaactattatcccacccattttatgatgaaggactgaagctcaggagattcaagtaatgtgaccaaggtcagacaggaagtgtggaaccaagctctgagcccgggcagtgggactccagagccctgacttctccaccatgctgcaccctccacaggaggcccattcatcatcacgctggaagcgacttttgagatgtcggctccaactcagtcatcccaatagaagaaacagaggcccagagaagacacagtgttgcccaggttcacacagcaaatcacagccagaagcaggctcagcacaggactcccaacaccaagtggaggcttttctttctctctcccttccttccttctttccttccttcctccctccctcccttcctctttttccttccttcctctctttctttctctttcttttctctttcttctttcttccttttttttttttttgagacagggtctccctctgtcacccaggctggagtgcagtcgcattatcacagctcactgcagctttgacttcctggactcaagcaattctcccacctcagcctcccaagtagctgggactacaggcatgcaccaccatgcctgactacttttttttgtatttgcagagatggatctcactatgttgccctggctggtctcaaactcctaggctcaagcaatcctcctgcctcgcctcccaaagtgctgggatcacaggcatgaaccaccacgcctggcccagggggattccagttccaagccttaagacccaacaaagacacacttcagaactcaggagacaccatggtccctggttcttgtgatttctcccaactatgggtgggagacaagctcacccagggccagcctctccattccttctcacaggacccacctggtaggcctggacatgtccaggcaagaggctgcttcctgggatggtctcatctccagccaggtcaatggctaccacggtctgctgctggtacttcttacacagctccaccaccttgggggaccagtctgtgggcgagatgcccacccaggctctgtcaccagcaccatggagagacctcccagcctacctgcctgctgtcccacccaaaccccccatgggaggccagcacaaaacagggctcagtgtcttcaaatcctaactgctatgtcctaaccacatggcctgcggaaaactgctctgcttatggcctcagtttccgcccttttcagaaagaaccctgccagctattgcacagggtcacggccaggctttgccgaggccatgtgtgtaaagcaccaaggacggggcctgagctcagtaaatgacacggacccttctctcacctggtgtttccaacaacactcatggtaggcttattcccatgcgcagatgaggaaacggaggaccgtttaacacgtcatctaaaatagaactcacactagtattgggaagtatctcgctaatgtattaggtactcttaaccaataaagttattctgaagtgtttaagaaagaatgaatgaacacaggctttggaactagatgtccccggatacaaatccagggtttgtgccttgcaagaggctgcacctcactccacctcagtttcctcatctgtcaaatgggactaagcaatggtagttctgctttgcaggctgctgcgaggattagaggaaatgcgtgcaggtagctctttggttcttactaatcctgagggtagaggaatgaagtaagtg

SEQ ID NO: 98057 - DNA, 13392 bp, Homo sapiens
acttcccaattctacctcagccctctacagtctgttatcaacactgtagccaaattgagtcttgtaaaagcagtcacttgtctacttagtatccttccaacagctatccctttcacttttttgttgtaaaatgtacgtaacataagctttaccattttaactatttttcagtatacagtttggtggcatcaaatacattcacattgttgtgcccatttcacttttagtaagagagtccttgctgtgttatacaagactctatatcatgtgaacctcccatttctcctacctatttaccccttgtttgttctgctctaggcacactgatcccttaacacatgttcatttccctcttagggtctttccattgtcagtttcatctctttggaacactcttcctacagatacctgcatcgtgaacgcctccactccttcaagtctcccccatgaagtctgtcacaaccaccctattgaaattgcagcctccctgaaaatgccagtcctgttcatcttactcagctctatttgttttccttagtacataacatacaatgtaatttaatatgttcattgatgattttcttttctccacaactagaatgtaagatgcatgaggacagatatcttatctatttttaattgatctttctttaatatctggaatagtactttacacgtagttggtgtgttcaatgtacatttgttgagtgaataaatgggtcaatgaatgaattaattaaccctaaatcttgagacgttgtttggagattctagcaggggaacacagctactcatatacccttgaccgaagaccagtcctcctctattggggatgatcatgctcttcaacccattgtgcagctctgggagggatgcacagagtggtgagggaggaaggagacacctgcctagccatccggatcagccaaatcaaccctggtgatcagtggggtgacagatgttgcaaccagatcacccttatgtcctattaacattaaatctttcctgacttttctagttttaatattattcattgttatctaaactgctacatgaccatgaagtcaaatataatagattttctaaatatccgattttcagtggatagataaaagcagtaagtatttactatactgcctttatcctgatgaatatttattaaagattgggtcctgctgctgatgaaaatcaacactagtttattcattctgtattttactcttacctactgtgtgtacagtattgcattcagtgctttaaaatatgcatattatccaaaagagagcatactttataatattcttcaaaataccacaactcctagccagaaactagaaggagggagggagaaagagaaaaaatactaagtgattcatggtattataactggcacgcttgtttctaatactttccattttatttgctaagacccttgaaaaaccatcgtaacataataataccttgtgaactattagcaacatatttattttgtttgacatcgggacctcatgttttaggaggaaaaaatcaaatccttgcctatcatattcttcattcatttctttaggcccacctacagtttaacaaaaatatgcattgtatttagtgttcaatttgtcctttagagaaataaaagagatttattgcatgcaaggatatggctgagatgtgtttccttgagttctgataaggacttctgcttccctctaggaaaaaaaaaattctttgacttaaaaatctctatgatcagaatctttgaacaacctttccccaacattgtacttgtatcccaacctcccattacctcccagtcctctaactgagagtttcacaagggcaagtaccagtagtgtttgtttattactatatctctggtacccagcccagtgacatgcacataataggcattcattaaatcgagtcctttcatctcagatgtatttgctcatccactttggctttcttattaccacctccatgccctctcccaagtaggaccctacctggacatcctctctcccccaacccatctgctttctcttcctgttattcataggaccctgaatccctgacagtgctgcaaaggctttttaggacaagatctattatttattgagcaatgtatctcattctaaaatcatcaaacactcactattccaaatgagaactttttcttgcttcacatcttaagtaaatgtttacatctacccagcatacatattttgattattgatactttgtttagggttatccattctctatatgttggtccactttggtattggctctcttcagtgcccattcagtgatccattaaagaaaaaagattgattgcttgatgacttgtgagcatagaaaaaaaaagattgagaagcatctgttatatactaagagactcagctaggcactgagggtttagtggtgaacaagttccttgtgaagtttacaatgaagagactgaaacaggcatataaatgattctaatatcattgtgataaatgctaatgattagtggtgataacttataaaggcaaagtatggggagcaatgaggctgcataataaagggagctgtgttgggcttaaaagaagtcacacagggcttcttaaggaagtgatacctgagccagtcccaaaatatggggaattttagcttccacaaagtggataccatgtcttactgacttcagaacatctggcaaagcaaaatttctgaccaaacatgtgccagatgccataatatgtgtgtttgggtagcaggtagcacagggcctgcccaagaactcccattcccccacagatgtgagaactttctcattttggacctggagtcctgctgactttggggtcagccatagatgtcccatgttgtgcggataatagatctgaatgattgacagagtttgtattgcctgagcagttaattactcctctgctttttgaaaaattgggtgacagatggtaaacaccttgacagcagattccactgtaaaccacacaggcatgtaggcaagtctggactgctatcaatttcccactggatttttctgtactcagagacttataatttttaagactcctttgccctttaggcaagttttgttccaactatgggaaaattttatcttctaggcttctatgttgcaggaacttgttttgaataaaaggcaatctttatcaacccacatgtccttgggttgattcaaacctgtttagtgttggagatttggtcagcctggggaagctgtgtgcattttaaggggaacagcatggcattcattactcacctgcttcccaccatctggattttcacagctcagcaagcatggtgggcttcctgcatattagcagggaaagcttggctcctaaagagggtgtggctaggtccctctgaagtcataattttacaatgaacaccatgaataaattggggttggcattctatcccagtaagctgctttcatatttgaatggttgaaaaataatacaccatctccacagcaggggaaggaggaaaaacacaaatcatcttaatactaggaatcaagcaagtgggaaggaaaattggttgtgtggtagagtaaagtggaaatgtgcatgtgagagtttgtgcaaatatgttgtaaggcaagggagtttccaactcaacatgcattaataacctggccctgtgcaaagtgctataaggaaaacaaagatggaaagacatgtatagtagcatgaatttagatgaatataacagaaaacttactaacagtagcttaaaccacagggtttaacaatttcagacataggctgtcttaaggtaggttttagttgttcaacagtgtcatcaaagatattgtcccattctcccatctgtcatactcagcttcttagccttttaaagtccataggcttattacctcatggtcacatgatggctgccacagccccacgtattatgaacacatttaattacaaacaaaggcaggaagcaatgaagagtccggtcagaaggccttccctcacttacttccttttattcagggaagaaaactctttcccagaatctctgtcccgctcctgcttccccagtagactttcctgtatgcctcattggccagatctgggtcacacaattacccctagccacaagggaggctaaaaagcaagtatgtgggttttccagcctctacagtgggacagtaggaggcaggcaaggaagaaagattctgagtaggagtagccaaccaagagtatctgccatgacataacacatgccattaatgggcttgatctacagggtcagactgacatttaagcagtgcccattttttaatactgcacttatggttaagtaggaaacagccattgtgataagagcttgggacttggagctattggacccttctatctgtattctttcatctaagaggtaaaccagcaccaggttgaagataaaaccagtatgcacagaattaattaaatgaaaggaagaatattcagtatccaaatactagacactgattggatgacagaggaaacaattctggatcaaacagaacgtattacacacagtaggtcaaggatagcaagcatgtggcatgtgtaatcagaactgtgtatttactacttctgtctttagtaccaaactaaatgagtgtgagaagcagtgtcaagttaagaaggtaacgctactgaatcaggaactcaaacatagttccatttagacaagggcataggtgaaaaggtagaatacttcatggataacgtagcttggatgcaggttggcaaaagtgtattgatgaattttttttagctccataccatccaaacagaatcccaaatagtaataacatctagacagaaagattaaaaaaaatctttgactctgtgtactaagaaaataattattggtgccaaatcaagttgagtcatatcaatagagacactgtatctacacagcatttttaactcttacaagctcttatatctatcagttcattttattcccataattttacttcttttggaagaattgtccactaaaaagagcagtatgaaggaactttctggggtcaatggaattgttctatatcatgatagtggttatggatacatatctctatgcatttgtcaaaacctttagaactggatgccacaaaaagtgaattttacacacacacacacacacacacacacacacacatacacacacacatacatagatatacagatatacagtgttttttttttttttgagaccaagtctggctctgtcgcccaggtgtgagtgcagtggcatgatctcggctcactgcaacctctgcctcccaggctcaagtgatcctcccacctcagcctcccaagtagctgggaccacagacatacaccaccatgccgagctaattttttttatttttggtagaaatggtgtttcaccatgctgcccagcctggtctcgaactcctgagctcaagggatccacctgcctcagcctcccaaagtgctgagattataggcgtgagccaccgtgcccagcctatatataaattttaaatttttaaaaagttttaaagctgctgagatgagtgctaaaatctttcattcagtttgaaaacaaattaaaattgtttacaagttaaaaattgttcaagtatttatggttatggcaaaatatagaaaataccgaagatttagaaaaagaccataagaaaataaattatgtacgttctacaccaaaaagtacaattttggattctctctgataaacttttgtctatagagagagagtgtgtgggtatgtgtagtcattaacaattacttgtaggagagtcagattgtaaaggaaacttagttttatattttaagtgccaccttgtcattaacagaagtttctgtaagtgtacatattgctttacctgttagaaaagatatattctaccaagaagcagcttctccactccttctggaatctccgcctggttcagcccgcctgcctccactcctgcctccaccatgtccatcagggtgcagaagtcctacaaggtgtccacctctggcacccgggccttctgcagctgctcctacacgagtgggcctggtgtctgcatcagctccttgagcttctcctgagtgggcagcagcagcttccggggtggcctatggtggggccagtggcatgggaggcatcactgccgtcccagtcaaccagagcctgctgaacccccttaacctgaaggtgaaccccaacatccatgctgtgtgcacccaggagaaggagcagatcaagaccttcaacaacaagtttgcctccttcgtcgacaaggtacggttcctggagcagcagaacaagatgctggagaccaagtggagcctcctgcagcagcagaagacggctgggagcaacatggacaacatattcgagagctacatcaacagccttaggcggcagctggagactctgggccaggagaagctgaagctggaggcggagcttggcaacacgcaggggctggtggaggacttcaagaacaactatgaggatgagatcaataagagtacagagacggagaatgaatttgtcctcatcaagaaggatgtggatgaagcttacattaacgaggtagagctggagtcttgcctggaagggctgacgatatcaacttcctcaggcagctgtatgaagaggagatccgggagctgcagtcccagatctcggacacgtctgtggtgctgtccattgacaacagccgctccctggacacggacagcatcatcgctgaggtcaaggtacagtacgaggagatcgccaaccgcagtcgggctgaggccgagagcatgtatcagatcaagtatgaggagctgcagacgctggctgggaagacctgcgtcttacaaagactgagatctctgagatgaaccggaacatcagctggctccaggctgagactgagggcctcaaaggcgggaggatttccctggaggccggcatcgcagatgcggagcagcgcagggagctggtcattaaggatgccaacgctaagctgtccgagctggaggccgcccttcagcagaccaagtaggacatggcgcggcagctgcgtgcctaccagaagctgatgaacatcaagctgaccctggacatcgagatcgccacctacaggaagctgctggaagatggagaacatgagtatccataygaagaccaccagcggctatgcaggtggtgtgagcttggcctatgggggcctcacaggctctggcctcagctacggcctgagctccagctctcgctctggcgcaggttccagctccttcagccgcaccagctccaccagggccatggttgtgaagaagatcaagacccgagatgggaagctggtgtcctctgatttcctgctcaagtgaacagctgcggcagcccctcccagcctgcccctcctacggctgccccaaagcctaggagggaggctgctgtgcaaggaagcacagggaacaggagacttacctgaggctcagccctagccctcagcccacccgcgggggagttcactgcctggggacccccgccccttgcccatgcctccagccacaaaacaattcaattgttttttgttttgttttgttttgtttttctgtccaaaataaaacctcagctagctctgccaaaaaaaaaaaaaagagaaaagatatattctgaaatgaaaacactttgacaaaattgcaatcatttgacataaactgttttattgactgattattttctaaattttatgacatattaacatctttcaacaaggtcatcttggcataatcccagtaggagtatttgggtttggccataaccagacttttttcctatcccctccccaaccccctatttgtggaaaatatgctcaaatgcactatttcagttaccaaaacttggtaagttactttggtaaagtaaaccttatcagagaaaatggatgctgactttggaccgtgatccaggacccaagaaggagaccacagttttatatggatgggaggaacaactgtaattcccatcaggacacctaagaatcccgtttgtttaatgatccacaaagtagtcattgccagtctagctagaagcctctgtgctgggatgacaaatgatacacatcctacctcccccaccacccacccagattcattacccattaatcatggcaccccagcctagaagtgaccccgcaaaaccttctcaacacaaacctggtaactatgatcatttcaccattatcattcactatgaaatatattttctgttcttatcttagctgaaggcgaaaactaccaaaacccaatccagtcatcagaaataaagccaggtattgagtaggcagaactagtcagctgatgcaagtagggtaaatgactttatgatattatctaccaaatgtttcttagatgaaagataaaacatttaatgggctctgaaaactaaattgcattacccttgcatttccatctctatgattgatgttgagaggtcagtgctagtgacctggtcagtaagatattccatctgtagactttgagtttagatcctaagtctaaactgagtctccattttatcaaaacagtcaccctcctatgtgagttgtatatcacctaataatccaggtgcctgcctcaactcaattctctggcattgcatagactccagcctagcatgatactgcaagagactagggatgaactaggagattcctctgtttccgtaagcctcacaatcattagcctcacatgcgtatcattgttaagtcaatatctattattcaggtaaataatactttatgtatgaaattaccagtctagaacttttgtaggatgctgagattgatttaaaaaaaaaataataaactcagccttaatagtgcctattgagctagaaatggggttaccaggccaccatcttgtggaaattaaatcagcacaaatagatttggagcaaggcaaacttcacactacccagggtttcctttaaaaatcactttaactacatctgacctttctagctgtttctggcttttgtttttagtcattgtgtactttatccacatctatatacaacagaggaaaaatgctcaagtttgtagtttcttgatcaacagcatgattaggctgagcagttaatgaaatgtggaattgtcatataaacttacaatttaaaggtgaaagccatgttgaacttgatgaattgatttctgtggatcatgatttcaaatgacgttattatctctaaacttgctaccttattactacatcctcttaccatatcacaaaattattttgtcttgagcagtatattttccagtttaaactgccttaccaaagagcatgctgcaaacacaagagtatttgtatcagaagtttcagtatcttgaaattggaatgtataatgattcatgagttttgcatcaattattaaacagtcatagatgaagatatgcagagatggatggggcagtaaagtattccagttacacctactggcttagcaatgataaatgagtcaggaaacatgaaagttcaaaacaagtattaacttgagctgccacggcttattctctgaagggaagtagacaatagcatgatataaacaggttcatgtacagagcagctggctagtagaattaaaataaaggtaaggactctgcaagagggctaaggaatttcagaatcctgccatgcaaatcaccctttctcttacaaggttcttgagggagacatagcattgcaaaataataacacttggaaaacaaaggaaatatttgtattacctgggaccatgcctaatactccataatgcagaattctaataatactggcttaaatcatgtgactttgacttccacttgaatcctgccttgttttgacttgcatgggtcttaaagtgagagtaaagacattttcagagtctaggaagaaggaaaatgtatgtgtcatcccctgggaaagcaagtgttgcccttggagtaatatcttcttggcaactgagccaagagctcacactgggaaaagctacttaactctcttctgatacccaacttcaccaaaaggaaaggcccatctttagttctcattgtaaggcccttgcagcccacccagaactctagtgttctgcattaatcactgtccagtgaaagggcatagactgcatgtaagcagaactttagaacgtagctctgagacaagagccaggcattgtaaacctcaggcctggctcccaccaccctctcattatttcctgctactctttctttctgagaaatgtttgtatttgagcagttcaagagccttgaactggaccagcctttgtacctgaccaaagacaaaaagtgaaaagcaatagacatgcccgctttaggctgtacccaaatttggaagccccatgaataaccctttgctaaccattcattgaaaagccagaagcagtggttaatgttagaagtgtaacttagcactggtactttcaagcagggcaatctgaagcaactgcaaatgttaagtagatgccttctctcgtctaaacatgggagtagtttgctaagatgggcaaactgtaacaaaggaaagtggtcaaataactcacttgaggtgtctggctttctcactggctggactttcttctcaattcatgggcattggttacataaatggaccttctaaacttacatctggaacttagtaaccatattgcttattttgtgtttccttaaggtagtattcactggagtcttctcgagaaaatgaactagatttctagttaagagcatcagtattggaatgagatagcctattccaaatgaagactctgtacattagaagtcataaactgataacccacaaaccacattcagcccacagatatgattaactttttcattctcatggcattggaaaaaatacttgccaatgtataaactttaagagatttttgcataaaagtcctgatttccagcttcctatatatatttaaacaatgagaacatcaggcaatacatggcaatacaggcaatcatggccccaatcagcttaagctgaatagcctcttgcccctttaaaggagacatacatagtccttctagttcacctatgttactttgtggccctgcaggcctttgtatttgctatctaggaggtcaattatctaagaagtcaaaacaagaaatcaagaattgttcttttaaatgtgtctagcttgaaagtgaccaaggtttatgccttatttttgttaacttctgcacaatgaatgaccataaggagccttttcatacatggaaaagaacagttatatgtgaagtggagaattttacactacttacctgaataaatcaggcatacaaagaaaatcctgaaataatgatataaaagtaagatttgagatcagaattactcaggggtaattgccttagttttccacctcactgtttcccctttgctttccttacctagacattatcttcagaatgttcctgtcaaaggccatagtcataattcccctgcctctttttttttttttttttttaactcatttgcactcttggtagcaattgttggagccctgcaggggaataattgtgggggaattaacctctgacatttttctaaaaatagccctaataaatccaatcataggtaatttacctgtccatgttcctccaggggtaaccagcatagaagaaagacttggcaggctggcattccttcagcaattatctgtgatctgagttcctggtgcctgtgcattttctctgattagaaatacagagtacaaattgccctcacttctctgcccttatgaccttgttttctcagcacccttctcctggggttgaaataagtcatgctcttccagaaggatgtgttgggctcacaaaaaaagaaggggcacgggccaagctggagcattcgtcagttccttccttgaattatcgactggcagagttttcccaatgatttctttgtgctctgttcctccattttccatgtctaagcttcaagcatcctaaccctgcttcatcacagcccccagccctgatttgaatagccagaactgaagcctgtgtggggaagattcttggtgtaaaggccgtggatgcacgaagggtctgtggttggtagaaatcatcaaagaaaatagccatttccttcagccatcatgaagttaattttctcttccttaaaagggtataaatgtgtttttcccttttattctctccagatgttccaggagaccactgtgcagtgtgggcatctaggaaatttacttcccaagtgccacttctggtggcatttaaaacccagaacataacatccttgtaaattccactgcagagacaaagccctaagcccttaaatgcacagaaaagtatatctattatctatcctttcaaagtaagtgtgcagttacttaaattgcctttgtcttcttctttgcagctgacattatctctacggtagaattcaaccacacgggagaattactagcgacaggggacaaggggggtcgggttgtaatatttcaacgagagcaggaggtaagtggtggtgaatgcaaaatgcccattttcttcactttttaaaggaggcctcctactgttccttaatccttatgtgtcgcccttaaccttgctgctttgctcgaaaactaaaaactgccaaaaaagtcattaacatcaactgttatacattcagactcataaaagccctgtaaaagagagccttttctgggcatggccttatctttctacgcctggatgttacacctgcaaaacaacttcacttctcgcctgacctgcaaaattccatgggtgcttgttgagcgtaactcctcctttttcaatgggatctgtcatagagccattgaaattcagtctcccttgatttcaggtgtgccagaatatgcaggaggaaaaaaacatagtttatttgccaacagatgtgaagaggacaacttgggacagcagagaagaaaatgatagcttacctcacctaagggggtaaaaggccacaaactagcgtctgagtaaagcttatgacacacatcacagtatcactgtaggtgacacagagggccctggagctgagtgctacatataggaccatttctgagcaggagttctaacttccagtaactctcataaacccatttcttcctgagacatgggtttcactaggaattgtttctctttttcatataaattgaggtttttggtgtctgcttctgtttgtcaaaatggaattatggcccaatttgatttccttggcctcccctggcatggtcttcgagcttccagcaggccagtctgtgttctagtagctctcccatctgccactgcctgcctctgagattcaccgggcactcgggaagcatgag

SEQ ID NO: 98058 - DNA, 57930 bp, Homo sapiens
gtggaagcgtaaagattcttaggtctccattctttgtcccctgcaggatgcccccgaggagcaactaaaggcgccactgagtgccctgccctctggtcaagtggtgaggcttgtcttccccacgtcccaggtactggcctcccagggaaggaagcaaggcgcctggatggggctgggatccaggccacaaagggaggggcctgcttcccgcttctccgtgggtcacaccctgagcaggtgctggggccaggctctttggggagtgtcctctgagcatccctgcttcaggcctggcgcctgtggagacagtggcggggcgggggtggtgcgccggggatcagggtaagaggaccagagctgggtggaggtggccgaccttttgtgactggggccttcacggttttcaggagcccctgatgagagtggagctgaaaaaagaagcagggtgagaggcctggctggggactgggcaaggccctggaaaacaaccagggcgcggggctggaggaggcctggaggagtgagggggagaaacagccgcccctcatcctcatgctctctgaaggggctcaggcttgcgctcgatggggcacgaagtactgggaggagtactgggaggagtcttagcacctatggtcagaggggcgagtgaccggcccagtgccaggcacccggggagcacttgataaatgtttggctggaaaacgcagggaggcaaggatggaaaatggtaacatggtttggggcgcagagagggcaggaaaaccaagggagagaagaggggaaattgcgcccttttgggtggaagctgttatggctggaccttaaatgatcttcgtagagttgtcgcccaccctggccctctgtcttgagagagtggcttctcacctcacagacacaggattattggtccttttctgccccgccccctgccctttttttttttttttttgagatggagtctctctctgtcgcccaggctggagtgcaatggcgtgatcttggctcactgcaacctccgcctctggggttcaagcgattctcctgcctcagcctcccgagtagctgggattacaggtgcccaccaccacacccaactaatttttgtatttttagtggagatggggtttccccacattggccaggctggtcctggcctcaagttatatgcctgcctcagcctcccaaagtgcttttaactccgtgggtaagggacagaacacgagacttggaggggggggatctatggtatggggcctgcctgggggcctgtctgcacctgggaccccaagcagcctctttcggccacggcattctgggtcctgccagtctgctttgctgcattcccaagcatgtccacatggacacactctccccaggtgtcaaacttcagtcttgtgacacgggagtggcattgagggttggggagaagagggagggcagtaggtattacaggtgaggcagacccagctttccattctctggggagggttgagagctgtctcacagtctcttccttccccggccagactgagggagctggccgtgcgactgggcttcgggccctgtgcagaggagcaggccttcctgagcaggaggaagcaggtggtggccgcggccttgaggcaggccctgcagctggatggagacctgcaggaggatgaggtttgggggctgggctggatggggtgtccccgggcttgcttgggcctagctcctggtgctgaacactggagctgcttgtccccgatctagaccagagctcgtagctgcctgtccccaccctgcttcctctcacctggtgttagcagggacttggtacaggcagagtgttgcttgaggcacctggagcccgcatgggagctacctcatagggctggctttcctactctgtttcttggttctcagcctagcctgtctgaggagggagacagatatctggtatgaggcctgttggcccagggtgcttcaggaggttcatattagcctgggccgtctcctgggggagtgatggcaatttgggaaaattctgaggcgggccctggggcttccagaaagtgagcgtcaggctcgggggctgagggcaaggagatgaggctcagaacttgcctgggccattttttcctggagcccttaggactggaggagctgggcactcaaaaggctgtttctggcccccagggctgactgagaactggtcccaagacctgtgatcaggccttagctgtgggctgggtggccacttgacctgctacctcttcttcctgtgacttggccttccccatccctagggcctctacaggcctggctctcttcttttccagatcccagtggtagctattatggccactggtggtgggatccgggcaatgacttccctgtatgggcagctggctggcctgaaggagctgggcctcttggattgcgtctcctacatcaccggggcctcgggctccacctggtgagctgggggcaggctgatgctggaccctgtgtggcagggggtgctggtgccagggttctcctaggcctctgagaaaactagaagggctgggagaatgaatgtgccagggagaaacgtgctcaaggggaccctgggaaggtccctgccaggccattgtcctagaaagcccggggcacgtggggtctagacggggtccttcagtgacagccctctggctttggctttggcttttcccagggccttggccaacctttatgaggacccagagtggtctcagaaggacctggcagggcccactgagttgctgaagacccaggtgaccaagaacaagctgggtgtgctggcccccagccagctgcagcggtaccggcaggagctggccgagcgtgcccgcttgggctacccaagctgcttcaccaacctgtgggccctcatcaacgaggcgctgctgcatgatgaggtgcgggggctgcagcctgggggcagagccagggcaagggctggagctggggctcggtgctggacagcagggtgggaaaggccctgggcacccaggccgctgtgggtttaggttctacgcatctttccccagccccatgatcacaagctctcagatcaacgggaggccctgagtcatggccagaaccctctgcccatctactgtgccctcaacaccaaagggcagagcctgaccacttttgaatttgggggtgagtggcccaagagctgagacctgtgcccttgcagttggtggaataaggggagaatgaggcctgtgtgcagattgcagatgtcacacccacctctcctgagccaggtcccgtgctttctggagaccggcaccctaccagggtccctcagccctttgggaaggaggcaggggccttaggtcctatgcacgaagcccaggccacaaggcctgggcctcctggtcctcagctgccctaaagcaaaaccctgggtcggggtgggggtgtgggtgcctaagggctctgcaccatgaggctgaggcgtggactcctcacagagtggtgcgagttctctccctacgaggtcggcttccccaagtacggggccttcatcccctctgagctctttggctccgagttctttatggggcagctgatgaagaggcttcctgagtcccgcatctgcttcttagaaggtgaggggcactggcaggctggggaagctgggccgagcagggaaaatgggtcctgggtgagagggcagcctcggtcagaagagtttcctgggccaggactggccatggggaagggtaggattgggacaagagtcgggggccctcttccctcacggccgctctttcaggtatctggagcaacctgtatgcagccaacctccaggacagcttatactgggcctcagagcccagccagttctgggaccgctgggtcaggaaccaggccaacctgggtaagtgctccgggcccttcataagggtgccaaggggcagccagctggggctgcaccagggggcggggggttcacgcctcttccccctccagggtcaccaccaaggtggggataaaggtgcaggagtccccatttcccccaccttgcctgtgtagacaaggagcaggtcccccttctgaagatagaagaaccaccctcaacagccggcaggatagctgagtttttcaccgatcttctgacgtggcgtccactggcccaggccacacataatttcctgcgtggcctccatttccacaaagactactttcagcatcctcacttctccacatggaaaggtacctgcttctctccaaagtcctcctgtggccacctgagccttgagtccccagtccagatacccctcacagtccactcccattctcctgctttgagcttgattccctggactacttggaacaggggtctttttctccttgtcttggggacccagggcccacctgcagggctgtgggggtgttggttcagcaggagagcagggaccagaggccagagtctctccttccagcaggaatctggtacccttggtatctgtgacaattgctgctctccccaaccttccagctaccactctggatgggctccccaaccagctgacaccctcggagccccacctgtgcctgctggatgttggctacctcatcaataccagctgcctgcccctcctgcagcccactcgggacgtggacctcatcctgtcattggactacaacctccacggagccttccaggttgagaagggtgggcagcccaccagggaggcggtgggtggcccctgtcccctgaagagaggggctttggagtccagtgtctggttcagcttcctttaggagctgtgattgggacactggaatcttaatttgccaccagaggagctcattcttttccggaagttgggaggctggcgaggttctcctggtatcttgtagctgggtcccctttactgacctgcgaggtgtggtcctgggcctctgggcccacctgctgagtctgctttggctcccagtgtcagaactggaatgctgggagtaacccggctccgtctagccccagaggagctgccaccgaggcctgtcaggtgtggagagttttttccaacgactggcttcataggccccactggagaccgttttggcatttgagccccaggtcctgtgcatcttacgtcagccccagtgttgaggatgccaggggccctgtccctctgaagccccttctgcctgccctgcagcagttgcagctcctgggccggttctgccaggagcaggggatcccgttcccacccatctcgcccagccccgaagagcagctccagcctcgggagtgccacaccttctccgaccccacctgccccggagcccctgcggtgctgcactttcctctggtcagcgactccttccgggagtactcggcccctggtgagctgctgttcacctccccatcctgctgccccagtcccccacacctcctccgtcccctgtgcctctccaaacctgtcttccccacaacgtgttccccatgccaggctgcactctctccacaggggtccggcggacacccgaggaggcggcagctggggaggtgaacctgtcttcatcggactctccctaccactacacgaaggtgacctacagccaggaggacgtggacaagctgctgcacctgacacattacaatgtctgcaacaaccaggagcagctgctggaggctctgcgccaggcagtgcagcggaggcggcagcgcaggccccactgatggccggggcccctgccacccctaactctcattcattccctggctgctgagttgcaggtgggaactgtcatcacgcagtgcttcagagcctcgggctcaggtggcactgtcccagggtccaggctgagggctgggagctcccttgcgcctcagcagtttgcagtggggtaaggaggccaagcccatttgtgtaatcacccaaaaccccccggcctgtgcctgttttcccttctgcgctaccttgagtagttggagcacttgatacatcacagactcatacaaatgtgaggcgctgagaccatctgttattactgctgagaagggccatgtcattctaggctcttggctgtacatgrcaagggctggtacagagctcgctcatcagtgttcttcctccgaagagcacattctctgcacacgtctgcgtctacctgtgctcagagtcaccccttccaagcaaggaggargccacatgggcctggggtagccctggccttgcccacctgctctgccgtaacacgtctcctcttcacccagacaggaatgcagggggaggccaggcaatggctgtttcctgccacatggtaggacccatctaaccagaaggaactgtctattccagaagctgggcctggggaactgggttgaagcagccacgggaaggagcccttttgcctgtagctgagtcttattctggtcccttagatgtgtcctcgcttgtgcccctgaagtttggtgttgcactggggttcacctcagggatcagacctgttgggaaaacggaatgaatttagtagggtatggccaccccagaatcttctccaaacaaacacacactggtgcccctgccctcccctggaccagccagcctcctagaataagcgtgggagtggattccagagctgactgacaggcgctgcagcagcgaccacagtgacgsgtgagtgggtgggagttgcctcgactttcataacccaactctacgtctgtcagctggcctagcagccccagccctgggttagagacagcagaaaaaatggctgtcctggtagcctyaggagccactgtgtccaggacaaggcctgtcccgtcagcaacacatcatctaaatcatatattgggctctgcaggactgggagcasatggttacactggagaccacagccgtggctgccacccctcatggtatgagccctccaggcacacggctgtatatgcgtgtgcacatctaggcacatcctggcatggggcccatgcacggaggatttgcctgtctccagtccctcctccactttcacctaacctcaggtgtcccctccccctggagagcctgaagccctctggtttggaagggaaggagatgtgggtgaggggggttgagcatcgaaatgatgctgggatctacaaggagggactgaggagccakgtaagagcctcctgcccctgcacatccaccttcgcatctcctccctggcctgcaggccgggacatgctggacctctccattgccatggagtggggattggggaaagcaggggaggaccaggtagagaacgggttggaacaagggtggggcagggtctggycgtcctgccaatgtgctgtgccttggagaggggagaggagggaggaaagtgaggagtgcatgggaaacaaacccaggcaggctctcagcactgggcagagggaaacctggctgctcctcccacaagcagccgagcaggaagggcacagggagcctgggcagcttcgtctacagggtccccacactagagcctggagtgagccctgggaggggaccactgtagagtctgtggaaatctgggctttgtggcctggattcctctcagctgagagtgggcaggggcagctgagggttccaatagcatttccctacagcccaacagagtaagtctgaggcccagaacctcaggcttcagaggacagcgcctgccagccactgaagcccagggctccccgccctgcttcccccacccaggtgtcccacctgagtagacatccaggccgggcatccttggtcgtgcactcattcagagagctgacaggtttggctttgagttttgggctcagactctgggctgcagagcaagggaataaccactgttagcccggcccagaccatctgcaggcgccaggtctggctgctccttcctccagcttctggaggctcagcacagccttaggcagcctggctatgccaggcccttcccacgtgggggtgtggggcgggctgagcacttgtgggcaggtttttcccccatgcgtcctgcctcttaggaaactcctcacaggtgagttaagaaaggctgagcstttcttaggaggtgggaaattctggaatgtcgaacaactcaagatccctttgggctcctgggaagacagactcttgggaggagagtccaggggaaccagcgacagagctaggatcccagacacattccctgaacacacggtccacacggagcctcagcagagcacgctgaccacggaagaaagtccaaagggttgtctctatatattcctccaagtagaacctggcttgcttactgtctgcaaaacaactcaagggtggtgacattcaaagttgtctgaggactagaaggttagagaagcacccagatcagacagaacagagcctggaaagcccttggaggaacacagtccatgaggattctggcaggaagggcttggggcagtctgagtggcagactccaaaaggggcagaacaggaccaggacacagctgggggttcaaaactggccccatctctgctaattagctgtgtgatcttgggcaagttgcgtaacctctccaggacctaaattctttgaggaaaaacagtaagtcccacttcttggaggttagagatgctaactgtgaaacctccctaggatgcataaaacactaggggcccaggagcttggggcccagggagtcggccgccctccccgcatccttcccctgaagcccacctgcagtgctgcccagggctcgccaccagctctcagcctgctcttcggacggtgctgcaaacaggatctctgccccactggtcagcctggcacccmcagtcacaggtcaaactccactgtccctttggggacccccacgcctccagcccccgctgagccaggtggctgctgggggygatgccggagtccatgtctctccgctcaccttaaggagaatgtgtgtttcctgccgtggcggccccgcagcctctcacaccgggctcccgtgaggtcaaggagggctatggaagctactttctgaggagagatgagaggcaggggtcactgcggccatctcagcttttccctgtggggtccctctgtcctggggcccctctgccttgcttcccagcaccctgatgtctgcatctcccctaccccgcctggtacctccgctgccatcctctcatccaggaacaggctcagagagctgccctgcaagktcccgcggcagctgtcccaggagctcgagctaggctgtggagaggaggcgggaaggtcgcatgrgccacacgcaggaagccagagctagggcctgtccacgcctcaccatgtgtgtggagcttcccaggaaaagcggtggattggaccaaagtcccaatggggaaagggaagccacagaggggctctgacgggaaaccaagcagaaggggaagagcaggtggggaggaggaatcccagcacctcctggbgggggtgggtaggtgggggcggtggcagragctgggaagggtcccaaggagccaaactgcctggacagcatggtggggggtggcatctgcccaagttcacagtgcaagggtgccaggcccagatggctcttcgagccactcaagtgctgctgcaagtggggagctgcctggagaaggaatctccaggcactcacctgcctcccgccaggcagcaggtgctgcttgaactccaaagacccctccatggtgggggtaccctttgcatcctgaaaatgcaagatggggcccagaaatgtcaggaccagcaccctcaggaaggtgggcaaggcacccactgcccccagctctctttattcctcccatccaagtactaaccaggcctgaccctgcttagcttctaagatcagatgagatcgggcatgttcagggtggtatggctgtagacagccatctttattcctaatgaccttcagctcctgtgcccgggctcccagcactggctccagggtgtgggccctcacccccacagccccagccccactgcatgctycagggagaccacggcgggggtgcctgcagccccatagggacacctgcctgggggtccctcgtctcagccagctgtgctcctagcccctggtgtccagagggcctccactgaaaggatgtcagcgagctgccagctctcccgggcttcagctcctgtggctgcagcaggagctcctgttccatcttggggagtgggcaaggtgggcaaggtgagccaggtcagggagaccagccacacctcaggttcccgtctacctcccctcccccagccctcccggtcagagggggcctgcctccccatcactagctctttcagctttggctctggaggctcacacccagtccacaatggtgcctctcccaccaccgcagctggccagggaaaggagcaggtaaggcagggccgggtgagggctcagtgccctgggagacactgacttgcaggctgagagggactgttcccccaccagccctcagcccctagccgaggcagtcgtcacctctgtcttttgcatttgggcaaacttctcttcctgggctgccagcagcttttctaagtcctggtgtctgtgcagcagcaactccacatctgacactgagtgctggggagaagcatgttcaggtgacgcccagcttgggggggggggsccagagcctggtagccagctaaggggcaggacccccactcaccccatagtcgggcttcagcaggagtccytcccagcaggccagccaggcctcagcctgctccagcctctgccgaagcttctgcaggccccagctctcggcacagcgttgccagcgcagggcccaagcctcctccagctcctgcagccgcccttccagctcctgcaggcactctgtcacctggtggggaggggctgctatgggtgacagcttgggtagggctcccaccatgggcagggcagggctggagagccaagtgttaatggaagtgcagagggaaggctgtgagacccgcacctgccccttcccagcctctctccctgcmtgcgcccagccttcctttcctgctggtttccatgcctgtgaggggccctgaggccctgggcaatcaggctgtatccccagcccaaccccaggcccaccctctgagttcacacctccgcagacatgaagtggctgttgtccaccagctgctgtccttcctgccgcaggtcctgggcttgaaggcggcactccctgatttcttgccccagctcttcatgctgcccaaggagctgctcagcccccgccacgtcctcagccagctcctcggaggacgccagctcctgcctctcctgtgcccatgctctgtggggcagggaagggagctgttgtcagggctggctggggagcaggggagggagggtccagctcccccaagagccaggatacccccaccccacagggtagagctgagccggcagctgaggtaggacacctacagcagttcctggcagcgcccgaggaaggcatggccctgtgcagcctgcgccagccactggcctcgctcctgggccttcgcctgcagggtggcccaggcctcctgcaccttggccaggccccccggagctgcaggatgtagctggcccagtcggcagvcctccgtctgtagccgtgccacctccttctccatagcttccagctctctctgcaaccagagcatgagatcaggcctcagtccccccactgagcygatgcgtgctctgcattcaggagcaccaggcctctctgaggaaccacctccactctgctgcacaagctgggccaagtcctagggcccctcggggaaggatctgggtttctggagaagaggctgaagcaggctggggtgggagggctgagataggtcccytcagccaccgccttcgggcaggggctcagacaggcaggctgcagggcgtgggcctcacctccaggcgcctgtgctgttgctgcagggtccgcacagatgacaggctgtggcctccgtcctcccccttcatcagggccgtcttctcctgcatccttccctggagctcagctgctgcctgctgaaagctgtggacctcatgggctgcagccaagttctgggagaggagaaaggacctgctcagggctgttctctgctcccaggattcctttctccctggagacatggccttctgggccacctccttttgaacaaggaggatcatggggcttgatgtgtccccaggtacagaaaccatcctccatgctgcagccctcagtgaacgtgatgatatgggtctgcggcaggccagggggtggggagggtggggagaggagagggcctcgtgcatctcagggaaaggcagacgcgaggtgttgggtccacgtgagggagcaggccggttctcggggatctggctgacccyggcagtaccacctgcagtgcctctcatggggctgggggaccgggtcagctcaggaggcagccccagcccaggacctacagagatggaatgtcctgggctgcagccaattcctggaagaaagctgagcaggtgagggaaaaggcacattcacttgaggccagcagggtgtgtgtcttgttggaaccaaagcctgtggtaaggagggcttagagggattttttgaagactctgacaccccttagcttggcccggcctgtgatcacctacctctgtgcgggcttttattgcttggtccaacctctcccaagcagcctcaatgcggctcctctgggcttggatgtggggatagcgcctgggtgcaccccgctccagggtgcctgccaacttcctcagggcatacaccttggcctggcccaggctctgcacttcctttctgaaagcatcaaacttctcttccagcacctgcaaaggtatgaggcccagcagggtcactygagatggtatcatgagctctcaaagctcatgaagagctcagcagactctgatggctctgaaatccctcagcccaggttctggaaccatcgggatcctccctaggacaccctctccaggctcctttctgctgactccccagcaaccctttcatcccagggcaggccttcctcagcctctgcccactccccgtgaggtttgctcaggagtaactcaccttgacaccctccaggtcctgcccgtagtcctgggactyggyggtggccgccttggtggtcagccaggcgtcgaggagcagggtctctcgctccagctggtgtagctgcagctgctcctgcaggccgtgccccctggcctccgccctccgcagcagctctgcgtgggcctcccgaactgcctgcagctgggctagcaccttggggctgtgggaagagmgcgacagtctggactgcagccctscctttccaggctggagcagtctcctgccatctctgtagggggcttctctctgctccttcgcggatggtgtggcttccgcccacctttctgggttcttcctgctctccaggagtgctgctgtctgctgcagccgctcgatgcgtgggctgaacgcttccaggtctctcttggtggcctccagccgccgcagaagggcctgtgtggcttcagcactgtggcccatgtcctcgctgtccaggacatggccccgctcagccagccaggatcccgcctccaggagctgggggtgacagagtggagatccgttttcccggggcaccctccagggctcaggatttacagccacgattctcagcctggctgcacaggggaatcacctgggagctgtcacgctccctcagcctggccccactcctaagcagcctcatctggtccggaacacagccagagcggcagtgttttgtaaagggtccaggtgattgtttttttccatgcaaaatagacattttattcttggttcataggcatagattttgtcacttaaaaccaagttttagcaaatattccttgcagtgtttctccctttcacttattagcctttttacttcagtttttcttcctttacaattgtattcaccattgtgaagtaattgaggtataatcgttcaagtgaaggttccaggtgattctcatgtaaagccctggttgagacccactgatctagagggaaaaaagacaaaagccaacccagccagcagctgtgttctgggaaacatgtggaaggaagcccttgggggcaggagaccactgagtggaggagacgaaaggtgcccaggccaggagccccggagtgacctcccagccgcactcgccctgtgttccaggcytgcctgctgtgccctgcccatcactcccctcacctcagtcagaaactgctgggcctcctgagcctgctgcagcagaagccgcctccgcgccgcctctgcccgcaggtgggccatggccttctccagctgctgcacccgggcggycacctcgtgggcggcaaagtgcccagcctgcaccagcttgtrcccagtgcccagcaccacccgggtcagagcctcgtggctgctcatctcactctccaggttctgygggggaggaggcaggaggatgcggatgttrctgacccttgggggactcccacagttgtgcttgaagtttcacgggaccccactaacttgtccccaaggagttccctgtccccatgactcccaaagaatccagggcatcccaaaagcccccacaggcagagagttcctggctgggccacagagagtgccatttccttggctgagaagccctgctcatgtgcgaggccagccctccccgggtgggcccacacctggtgctgctcctgcaggtgccgcaccgcactcaggctctggccatagtcctgggcagcggccagaggcagcttctcctgcacccaggccatttcctcgtcggcgtccctgaagaacttcaagaggaggctccgggcctccagggccgtcctgcgctcctgcaggggctccctcaggctcttgaacctgcagcggtggagggtgggaccaagggaggcagggaccagggtgtcagtattagggatacctggtgacacagatcacccagctgtggccctcaccatgggcaaggggagaaagtgagaagacatcagttaagagggcaggggtgggggtccctccaggaaggcagggaagagaagctgagggcacgggtggatctacctctgaagcagccgccgggcctgctcttccacatctygggcaaggcagtggccttccctcacaaaggcctsggcctggcccagcartgcctcagcctgcctggccttcttgtccactgctgcctccagctccctctgtgtgcccaggagctcgcccacccsaggcagggcctggcccacagtgggggctctcagctcaacctcgatgggctccagccagttctccagttcctccatgctccgccgcagacgcagggcctagggtagaaagtgaggtaggcaggaggggagtgtcctggagcccggccagccacccctcggcctgcacaacctcacctcacaggccttctggagcttggccaccttcttctgggagttgtcttgcagctcaccccagagtgctcccagctcctccagtcgctcctggatggcctccgaggctgggtggcccccctgcagcagcctctgtccctcctgcagccacaacatgaaacacaccttgtggactcaggactgcyggtaccagggcacttgtgttgactctgaccaccagcactagagctgcagagtccctgcsgtccagctgcatgatcttgagcaactttctttacctaagcctcattttcctcatccgtatcatagagaaaataatggttattttgtttaaatgagataagtcatataaaatacttagcagggtgatttatatcagagggagccagcctggggtcaggacctgcctttgcaggtggaaaagagaatgttttaaaaagtgctatgctrggcacagtggctcattcctgtaatcccagcactttgggaggctgaggcaggtggatcgcctgagctcaggagtttaacaccagcctggacaacatggcaaaaccccatctctaccaaaaatacaaaaaagtagctggatgtagtggtgtgggcctgtgatcccagctacttgggaggctgagctgggaagatcacttgagcctgggaggcggaggttgcagtgagctgagatcttgccactgcactccagcctgggtgacagagcaagaccctgtctcaaagtggctatgttttgactccttcgctcacaggactggtggctatgtcctgttcacatcaaaatgttatctttaaaattaatgaaaagctgccatttttggagagggtgccccccctgcccgccggaaagcaacttcttctcactacacttctgcctaaacaaccgcttagccaggtgcctgcatgcagaaagtactggataacgctggccaccgttactgtggttcagcaccagctctggggcactgtcctgtgttctgcctggagagctgtcccaccaccctcctgcctgcagggcctcacccgctgcagctcctgctgttggtgcatgctcgcgtccagctccgcctggaaattctgctgcttctgtaactgtgctggcagcatggctrtgtccagcaaaccctcctccaaggccaccaggttcttctccctcagccacgcagccacctgggcacatggggaggacaggcctgctgtccagggctttccccttcccctgacctctgggataccccagaggaagggtggcctttccctgggtcgactccttccccaccatgaccgcctccctctccaagcgaggcgaacctcctgggagtcctgcaggaaggcctgcagctgccggarctcctccaggcgatggcggcgggtcccggcttgcctgaagagcgcctccttcctgccaggaggagaggctcatgggcctggagccacccccggggccaggtggggtgcccgtccagcctaggctttctcgggtatgaatatactctgagtctggagtttcctttggaataaaggtacattgcactccccctctgtatttgtgtctgttatgcgccggattttgtacccccaagtttgtttttgtttttgagacagagtctcactctgtcacccaggctggagtgcagtggcacaatctcggctcactgcaacctccacctcccgggttcaagcaattcttctgcctcagcctcccgagtagctaggactataggctcacacctccaggcccagctaaattttgtatttttagtagaggcagggtttccccatgttggccagactggtcttgaactcctgacctcaaatgatccacctacctcggcctcccaaagtgctgggtttacaggcgtgaactactgcacccagcctgtaccactgagttcttatgttgaaggcctaactccagaagtgtttttggagacagcgtctttaaaagaggtaattaagtgaaaatgaggtcatatgggtgggtcctaatccagtgtgaccttatgagaggaggcaactggggcagacacaagcacagggggacgatctgcctcctgcaggagggcagaagccaggggctagaagtcagggtggcactgtgctgggggaagctgagcctgccaggaaccacctaaggtgactggggtagggggtggtgacaragaccagcaaagcaaagtttgcattctgttaattcaaagacctccacaggtacccaggtgtggtccacctgcaagaatggagagggggtggccgcgaccactgccaggacaccagcacaaggagccatggcatttgtgggtgctggttggctctctgatcggctctctgagaaggacaaaagcccccaccagtctgggatctggcttttgaccgtatctgccttgatctaaaagtctgaggagctgcatgaagcagccaaacctgatgagcttttacagggaaaaagaactgcagagctggggtctcatgggccatgcaggtcacatgcatctgtgtctgaacttcagttagatgaactaagacttctgctagcctgcctgtggggccagcacagtgctttcgtcctcatcacagccgttaaagcccaggatgtgaggctcagctgccgagaggaggaacttgtctgagtcctgccattagtgggcagcacagggactcaggactgtgaccctggaaggccgatgcttgacctctgtgccctgcgaccttcygtttcgtgagatgatttcctcttggtctcctagcataagcctctctttaaactccctttgatctcaactgaatgaagaaggaagtgggattttccacgtggtgtttgatgtccataacaggcagacacattgcagggccaggggtggtggggacccccggcatctgacctcagtccttggacaaggctggtgagcctgggccaagtagtggaagggtgggaagggaagaaccgggatgccagatgcctgtgccagcctgcccacagcacccctcaccccagagccaccactacctcagaagcatggcctggcacctgcccagggcactctgggcctcggggtgcccaccctggtgcaggccgcgggccgtggcctccagagcactgatctttcccgcctgcacctccaggtcccactccagcatcttgtgcttccacagaaggggctccatgggggccaaggggtcctggtgggagtggggaacccaatactgtccatgagcctccccctcccatcccaggctacctgccttcccacctagaaccatcctaccaaatgctcatccacagagcggctgctccgcccaaacacatcyctcacatccctcaaggctgtttccagctttaggacagtgattcccagccaggggaggcatttggattagggatcaagagccagaatctctgaggcaagcagagctttttcatttaaggtgaaagctccctcctctgcactccctggaggacsatgttagtccccagttatcctctgaggtctcctataagttacactcgtctgcttcagggttggggcagtggcggsaaaagccaacctctaggcatttgggaagcgaggagggcaggggtgaggtggcaagaatgggtcaggcccacacaggcactctagaagctccttggtgttcgcggtggggcctgcccacagctgcatgggaactgctctagatgacgggtaagtaactgcccagtgacggatgtggcccagggtggggagatggccccgaaggggagsatccctggcctagggagctcaggcagcactggctggtttgacccctaatgctgctctggtaattcccccctcctgcccattcctgctgggcacctacccatagaccctcactggctagggagtcttccttgctgcaaagccaacgttccatcttctccactgagctcagaaacagctgagaacaaaggaaaaggcaagagacagtcggtggagggtccagccactgcagttggagtgactgttccagtggcacaggttagggaaccagggtcctggaaggcaggagtgctgagtggtggggaagtccctggcacagcagcccctccagtcttagccttgaccagaggctgtggggtcagcgcaggccctgttcgggggggcaagatgcaggctggggatgggactgtgcctgcctgtagctccagggcctgctgcagctgtagctgatgctcctgccaggccccttccaggctgctcagctcctgttctaagccagccagcacctggcgaatgtcggagctgaaggggtgccccgctgtgagcagttgctgcccagtgcttcgggccaggctgatgctgtctgtccaggagtccagctcggcctggaacaggactgggctcagatcactgggggctggaagcagccmagcaggcaggagagaggtggggaagcagctgaggagcgggaggctggaggagataggcagggcgggacactcaggaggcccaagagcaaggagatgagaggaaggggagggcagggcggagctgagagcctgggaaaggcttgggccagctgcccattcaccttgcactcctgatgctcttctaacatacgccgggcttccacagggctgcgaggagcggggctcgtgtccatctgagcccgcagcctctgggcgctgaccagcaattcctgcagcattgcctggagtttctgagcttggtgcaaggcatccagcgcctccctcctgcccacagcgctcatcagctagtcgtcaggccttcaaacccctctcccccatgcccactggtgtcttctgtcccttaatcccctcaaccacaggagggcccatgggctgggagttactgggaggacagtacagttatttgaagggtggagaaggaatcctaggggaacacaggggctgaggggaggtgtggggactgagatgctggaggatgggtcggcgagggcaaggcctgcgggttcataccgcttctgggccctgctccggagctgccaccagctctcagccacctcctgctgcctgtgcctgaggccgtgggctgcctcggggcttctttggcagaggcggcccacttcacgctctagggactgcgggggaagccggggtcagaggctggggcaggggagctctgggccacccaagcccctcctccccacttgtgcccagggtcctactcaggagatgccctgggcccagctctacagccagctaygcacctccacctgggcctggatggggtgcacttcccgctccagctcctcgtgtttccgcagcagcctctgcacgctctccagatctttcccacagtccagggcctggatcagggcttcctggaggaggggcacggccagttacctgctgggcctttgcttcggctcctccttcctggcaaagggcccaaccagtggcttctgtgtgcacagcaagtccccagcgtgatttcctggccccgactttgagggccagagatctcttccttatgtgagggggacgattctgaggagcaactctggatttggagtctcctctgagggaagaacctcacgtgtgtgctgcttccctgtacagtctcactcaactctcatcccttgaggagcgagaaaggaaatagagcaaggatggacagacaggcctgtgccgtcatttgagggcagaagccagcggaggaaacagccaggcatgcccagcacaggcagcagcacttgtttcacacaagggcttcctagaccgggttctaactctgccagattccagcccggggctctgtggttatgtacacagtcccagggcaaacctcccgagggtttgggcttcctcagggatgggaggaaacagagagtgtgttttctggcctctggacctgccatgtatctggggaccagatctgggggagaaaggagacagggaatcccccactgagctcgcaatgsrtgcttctatggtcctgagttgatcctgagggccagcccatcagatgtccctggtgcagactgctgggacccacctccaagtacccagctgaacaggagaggccagtgagsggggagacgcatgggagactctaggcagygccccctcccctgactgcatttgctcacagcccccaccgggacctctttccaccacgtaccttctcctgaatcctcttggtgacattgtccagctctcgggacaacacgtgtatctccaaggccccttcgagctgctgctggtaccggagcaagttgccatggaaactcgcccacctggccaaggggtggtggtgtcatgtggagcctgaggtggccttccacccctcttcccggccctttggttctccccagcctgggactggcctgttgttgagctggcttcgccgctggcagatgatcttgacttcctcagggtcccggttcttgagctgcagtgacaagtcactgatgctcctgatgcaggcatcacccactgtgtcctgcaggggaggtatgggtgagggcattggcaccccccatgcagagccccttcttcccacctcagcaggcactgaaagcatgcctgggccccggagcaygaggaactgcatatttgggcagtgggaagaactgcctcctgcctcctctactgcggcaggtccctgaggtcaccccgtccaggtgaagtgagcaagatcagcttggagcctgcagccccagagtcatctctaaggccagaaaatgggatccctgcactgggtaccatgtaggagggggagagtgggcacatgctcactaacagagactcttgagacggagtctccctctgttgcactgttgttgtagtggcacaatctcagctcactgcaacctctacctccctggttcaagcgattctcctacctcagcctcccgagtagctggcactacaggtgcctgccaccaagcctggctaagttttgtatttttcgtagagatggggtttcaccatgttggccaggcttgtctcaaactactgacctcaagtgatctgcccgccttggcctcccaaactgctgggattacaagcgtgagccactgtgcccagccacagaaacttttaaaatgaaaattcggcttcttggttgaagagaagcaaagggaggttgtggaatggaacagtgagctctggcttcctggggtttgggtgtccccaccccaggactcgtctgagctgaggctggtgctgcttggacactggatggggtttaaaggtacgcagggagggggtccaccgcagggtgtgattgcagatctcctgcctctggcttctgtagagcttgtttaaatttccaaagcactttcctatgaagtgcctcatttgcaaggtaggcagggaaggacattcccctccttttatagatgccggagcagagctcagaggctaacctggctcctttgcggcagagccaggattcaagcccagctcctttggagtctagctctcttcctactgcagcatctggcacagcgtctgtgaaattccaccattaacaagggatgtcttaggtttaagcactgccgcctcttaaaaagtaatacatacatgtaccgggggacaaggttagcacatttggtctttaacacctgattgtcaatacatttgccatttttttcccctgtataccacataagagaaatagatgtttggtgtgtgtatgtgtgagggggcgggtgtggggtgagaagacgctgagacgctgaaatagtcacactgaaggtgggcgctgattatctgccacatccaggcatatgtcctatctttttaagattttttgaaataattatagatgcccaggaaattgccaaagtcctgcagagaggtccctgtgcccttccccagcttcccttacagcagcatcctatataatgataacattaaaaccacaaagctgacgttggtgtaatactaccaactagaccagacctcattcagattttattagtttttgcargtatgcatctgtgcggggcagtgggggataggtctatgcagttttatcacagctagagattcacgtacctgccaccacacacgtgctctcttacctctgaggtgggtgctacccccattctaaagaggaaggagtgaaggcgggtgagaggagggagcctgcccgagggcataggaggagcaggcatggcgcccacgccctgctctacagcccacactctttccctgctctcagttggattttcagtgcgggatgcatggccaacctctacccagcaaggccctcttaccccggccgagtttcctcggaactcgcggagccgccgtcggagctgcaggcagtgctccaggtcctggcccaggtcaccaacattcatcttcacctcctgtgaaggccgagggtggggagggagcgctgtgagcaccagcccaggctcctggcacctgctgctggggatccctcctgtcaagggagggctcctccccccatctctcagcccccacccagctggggctacaccttctcctggatccaggcctctgcaaggtccactctctgcaggaactccaggaagttccgcctgtcctccagctcctggcccctgagggccattgcctgcctcaggtcctcccagtgcttccgcaggccctgcagccrctgggagacctctccggctcgagggtgactctgtgccaggagagcctctcccttctggagggagagaggggacacaggacatcttgcctgctgcacttcctcctaagactgacattgcccctgggccacactttggggcaggcatggggctgagggcccggttgttaccttggcaacagaggtcatgacctcctcatgggcctggacttcagcctcaaaggcctggtgtttcagcaggggcttcagcttatctctcaggtccccaggagggaccggctccttcagctgctgggcccacgcctggatccagtcctcagcctggtgggggtgggacatgaatgctgcaatgttctgcagcctcaggccccagacgccacaggcctagcccccagccattcccaggaggctggcctcaggggtggggcgggcagcacctggtaaatgagccctgaaggttccagctccggaaggttgctgcaggaggcagccgggcagggccttgggtgggctctcgttttggaggtgtggcccctactcctggggccctgggctgctctgctcccttccccacctctcttgccctggcgctgctagagctcgggacactggtgaggtctccacacaaaggggcttagatcccatgttctgggctccagcacagcctctgggaaagccatccacccccgaacctgtttccgcctcacagtgttgcggtgtgaaggcggctgaaaactgtygagtgtggttccagtggaaggccctgggctgggggtgccctctgacctgggttgcggcctgggtgaagctggccatcagcagggaggcatgcagggcgtgtccccggctctccgccagctccttcactctcatccggcgytgcagcaggatgggaagccggtcccgcacccgggggcgcyggagcgtcttcagccgctyacgcagggctgcctcctgtggggcaggggcacagctgctgctctcccaccctgggctggggcagggcctggcctgcagggctcacagtcctttctttgagggccccrgagccctttcctcagccccacatggctgaggggtrtctgatcctcccagccacaagccagaccagtctgctccccaaggaccacayggtgtggacagagccaaatgccccgtgtgggtctctgcagtgtggcccatctccccctgggccctcttcttgagccacacatacaacttgctcagtcaaccccaaccaggaccccagcctygcaggctcatcagcactgcctccaggaacacaccaagygccccgtgacccccttcaggactctctcccaaccaccacactctgaccacrcccaggcctcctgactccattaccttcttgtcctgggcagtcagaaccttcaggaagacctcgtgcttgcgaatcaactgctctacctcttccaccgagctccccaaggcactggttttcagggagacctggatccacagaaaagtcagaggccaccaagccttccagccagccagcccctccagctgcagtctgtgcccatgggcactctgggtatggcagggccttaggagtgcccactgagcttggcatggagctgtgaggagtgggagtccaggttgggaggctgcgatacctcaacctctgcaccatgtggggagcatgaccagcctctggccaacttcctcggggctcagtctgggataggggctggggatgtcagtggacgctcaggggcctcagcacttcaccatggccacctggaaggacttgtgcacagctgcctcatattagagaaaaagccagagaggcaggaggaaagggactgagcagagaggagaatagaaaggaggagcaggaggctgagcggagtgtgagggcgggaggggacctgcctcctgggccgcgaggatctcctccaggcggccgcactctctgaggaagagctgctcctgctgctcggcctgcagcctctcttgcttccgtgcccaggtctgatacacctggtcccgctggtcctgcagggctcgaagctcttcctggacctggggatggacayatgaggagcctcagctggggagggtggtrtgggtgaggtgaggactggatcctgagggaagctcctgaggagaggccagcatggcacagtaggacggggcaccaggtggccaggcacaggcttggtcagctagggtatgtgggggcaccaggggagggggcccacctccttggtgggtgtccctgcagcaagaagtgcctgctgscccagctgggtggcctgctgccacagcttctcccgggcctccagctccgcccggagccactggtgggcactgagcttcagcgggccactgctaggctcttgcgaactctcctccacctgcaggtcctggcgcacgcgggctgcccaggaggcatagtcacgcacctgatcccggggacacggagggagagccgggtgagggctgggctgggcagcaggaaaccaggtgctgaggcaactgcagcccacctgagtccactcacacagcccgagccgacctgggtcagggcctcgggtgaggcacatgtrgccctttgtcacttggtttctccgttctcatccaacccgatcctcccagaaccacgaaccccctacatgagccagacccttaccacgacacatctctgccctttgttcctcctgccttcccatctctacagagctcacctggatgaggccatgagaggactggcggctagcaagatcagccccatcaagactgcttgatggggaaagaaagttcacctgctcttcaaagkccccttggccgcatttgcctggcaaagccttccctggtatttgacattgcactgctctccttgttctctgaattactaatttaacccttacagtcttctgctgatttgtgtacaactatacaagattggtgctggagggacttcaggcccttgtccaaatgtctcattgcatggaggaaggaagggtaaatggcagaaagagtcttgtaaactctaagtgcatgacaaacccagggttaagtgccttgctcaagctcacactgctagcaaatcagcagagttaggtccctaaactcaagcctttttgcagtgtcagtttgggcctcctggtctgccaggtcccaggacagtgggatgccggggacaccccgtggccaggacctactgtcccagtctgattctctgggtttcgggctcatctccccaggaagcagggctccatgagggcagcagttccactttccatagcttctatattgccctcctctctccacccgtggcttcagcagggagctgaagacagacattaaatagatactgactgatccagaggtcactgtctaacatctgggtctccagttatgagctttcctgggcagttcttactcccagccctgtctgggaccctgcatgactgccctgccactcaccttgctggcactgacccagaccctaaggtgtcactgctatgcccatgtgctcagcccctgaccagccagactgacatcccgtgtgctcgtgctctcccacccaagtccatgcttgttctccctccggagctggagggcctcatgcgtgcatgcccatgcatggtgcagcacacacacatgcacacacacaccacccaaagggcaggagccctcaccgccgtgcggaagcgggccaggaggcgtgcccgctccagctgggccctgcgctgctccatgcgtcgctgcagcactgcccacgcctgygtcacagcttgctgcctctgctgcaccgcaygggcctgaggccccggacacagcttctgcaccctgcctgcagtctccagcagttcctgcagctgcgggaggggcagggaatagggaggcaagggtcatgtcctcctgattatcccacagatgtatcccttgcctgggaactctggcccccttgggccacgtcctgccatgcacaggaggcccatgggaggccctgagggacagtggaaaatctagaggaacaggcaggccagcctgagggggctgcaggggcctgggtcggagaggcagccagctgggctcacctgccgctcggtgcccacgagttctcrctccagcccctggtggcttctcagctgcgcctccagcccacacaggtcccgtgccacattgttggggaggctcgtggctttctcctgaggaagggagaatgccgasgagatgagggatggagcgtgggcactgagcctggagtgtatccacttctagccacccctccggctcacacctggacctgggtgaggacttccaagagatctctgtgaactctgagggtggtctcggtgtctcggagcgcrtggcctcgggcctgggtcagctcccacagctccgaccaggcggtcctgcccacggcgtgtggaagaccagccggggatcagctgccgggccgtgtcattcctccctcccgctaggtctggtcagcccgctcctctctgagttgtatcgggacttgcccaaagctcctccttcttaaaacctctcccgcctgtggccctgcctacgcaccttcttcctgggagcctgtcttctagctttaccatkaattcagtgctttgctgctgtaatgctcggcactgcatggtatctgtgctgtgatactctttacatcctgtgctttgactcacagtgcgtcacccaggttatgatcacagacgctttgtgggcagaggccacatctctccgttcctcgctaactctgcaactggctgagctcctaaggcttctgccaggccaggctctgggctaggggttatgagcaagtcatgaccttgcctcaaagctcacaggctgggagtggatccaaatcagccaagtggacagctaggaaccacacgaggcatgggctgtcccgagtgagcacaggagctggggtagctcaggggaaggccctgatgtctggccccaccatcttcccacagctcctgctctcaatcctgggggcaggactctgacctgcacacccagcctcaccttccttcacagaccagagcctgtggcgggctcagcttctctggagctaggccccctgcagagccccgtgggcagccagggccagtgtggccctcacagcatgccatcctctcttaccactctgggccctgcctgcccagctccttcccccaaaccccatgctggcctggcccgytgggcactcactgcagatcctgctgcctctgacggaccatggggccagcactgtgcccacgctctagcaggctctccgccagcagccggcaggcggccacccgctggctgcccatctccacttggtgctgaaactttgcaaacttggtgcagaggtgctgagaagaggggagtgggtgacagggtagcccccagctggttaggcgtcaagcagcctgggaatcgaggcacctcagtgcccaactgggtgatgtgggcttggatagccacggcgtctgcccgctccactgaggaggccccacctcagccagggctcaccgctctgctgccaccttcttcctccgccccgccagagccagcttccccaccccataggctctgcctcagggcaccctccttgaccctggccctcttctcaccagggcgtgctcggggtcctctcccaggctctcccctcctttggctgcctgcttctggcttgccagccagccctgcaggtcctcagcctccctcaggaactcatgcagcctcagggtcccctccagttcccggtccctgtggtaacagtccgtggttccccagaagtgagttgcccacccccctgggggccagtcgggccagccagaggggccaatctgaaaactggggttactcatggtctctgtccaagcctgcggctcacgattcagggagtagtagacacagcagtgcaggtgtaggggcagaggagggtgtggacgtggggagatggactgcagggagttgtggggcctcactgaagaatttatggaaagaggtgagcaacacacacccttttcccaatgcatctctacagcctggggtcatgggttctgattgactttgggccatggcatgggaacagtcagctgtggctaggcctcctgtacccactgatgagaggggttatggtgtcctcaccgtgtggccgccaactcctgcagtgcccgcagctgctcccggagcctctcctgcaccacacgctgctgctcagggacttcggggccagtgagggtttgggccgtctggtcaagctcctccatggagctccagtaaatggctagttcctcctgtagagcctatgatgcatgaggwcccatgccaggctcagcctgggtgactcatccacccacctgtccgtcccccacccatccagtcaccaatcctcatccattcacccaccactcacacgcccatccatctacctcaactcattcatccacccacccagcatccatctacccattactgatggagtaagtacttattgttccataaagtgaacacctggtctgtgcccactgagggctcattatttagcagggaaaggtgaatgctggctaatctgggccaaggaagggagggcacaggaggcattagactggaccccaacatccatgtgtaagagagaggcagagttraacaagctgtccagtatagccgggagatgggtgctccgtgaggccaaggctacaggcctttagaaagaccttctctgaaggtcctgtcgcagaacacactggaactggggctgtgcaggaaacatgcccagacaggaggacagttcagtgacagcaggaaccgggactgccgtgggctccaggctttgaagcttgtgtggttctgggagtccgaattcaggagtgaggaaggggacttcgagacctccctcccttcagccaggggatgtttgtgggaggaggtcggcttcatgaagggcatttggttaactcaaaggatgacaggtaaagcctgggaggaagacacctgtgggagatgtggagcgggctgggcaggtgaccttgacagaggagaaaggtgccaggggtggggtagagaggaagcaagaggaggcrgagaaaccccaaggccacagggagaggcaagactcgtaagaagatgaagggagaaagcgtgtacatcacagtgcccaggttgccttggaagaaggggcactgtgggatctgggtgggaagtggggatggggctgtctgtgtctccaggaagcaagagcagggctccgtgcctctgagagagggagggtgacagccctctccccgtggtccatcatcacccagaccacactgcaggggaggctcaggacgtggtacctggtgcttgttaatgagcctgagggtggctgcctcgtctctgccatagtcccgactgctcaccagcggccgcttctcctccacccagccctccagctctgacacatccagaaagtactgccaagagtggggccaactcaccyggaggatctcagacaggaccctccgtcagccctggagacatctgcccctgctctccagcatcaaaggggcttctgtgcccataggggcacccatcagctcccagcccagagcccccaccactgatccgcctccctgagagtcccacaggtggcccctcaaggagccctgacttctgcctcttcccccaaccccacctctctgcatcctacctgctggaaagtgacagcctgctgcagacactgggcccgcgcttcacatgccctctccagctctgcccagtggccttccagctcctggcactgctccacgatgtgttgggcttgggggtgccctgaggctgccaggctccgcccagaactcagcacccgttgcacctgcccctggtgagcttttacctccacctggagctcctgccacagagtggcttgagaggctgctgctcttaacccaggggcgtccggagcagagccatggatgtggctccaggccccaatcatggmaagacccccagggtcaaaatagctggggcagagatttggaaattgggatacccaggggtgagggcttagaggccaggacacctgagtaggggcagagggtttctaaggtctgggaagcggatgtcggtaatcctgtaggaaraagagggctattaccttgtgcttgyggtgaaggctctgggcaccattcaagcactcggtatagctggtggggctgccatggggcatgtgctcggctacccaagagagctccatgttgctcaggtggcagaactggtgcagctccactgaggcctgcagctgcaggcccckgatggccagatgcccctgcagaagctccagcctaggaggaggaggaagagattggagaggttgggaacagagtgagcacaaggctcctggttctttccttggccaagccagggcccgtgaagaacaagaccagggaatagagcaaagcctcatctgacaaagggaggcagtggaagggcgccagggccccacctcatggcctagatgactcgcgtgactgcactgtgggggtcctgctaaggaagcataatggggtctccgaccctcccatcccagaatgactctactcataagggaggaggtctggacaccccggtcctgtgggtgccatcttgtgggaccttaaattcacatggaggagtgacacacaggtgggtgggaggacagaccccacctccggaggtgcttctgggtctcttccaggatggccggggaggcggccaygccatgggccatggaggcgagggcagccatcttggcagccagggtccggctctcactctccagctgttggtgccgtttctgcagcctctggctggagcgcaggtcctgccctgtttccgagctctgtagggccccttcgagctgctccagctgctcctttgcatcctgggagggacgcrtggagctgcattaggttctctgtgtacagcacagcaagtggccttcccgggctctgggactgttggacttttaggaccagattcaccagggagctctgtccccaccactgccaaccctcggccagaagtgcccaatcttcccctgttccctcacgcttcttcttccctgggggactcaagtggtgctgaccacccgctgggcacacaggagagaatyctgcattggccgactgagcggaaagccacgctcagcttgtcctaggccagaagcctccagaggctgcagagccagggtcagcagaacacccagacttctccctccccgttctgtccagcccagccaggcctccgtctccctcttgtgccctgtccctcttcccagtggacctgcagctgcctcaggagttgctcctgctgtccagcctgctggagctcgtccccacgctcagtcatcttgcggttcaaagcttcccacttgcttctcaggccttgaagcctggtctgtatgtcctcctggccacagggcctcctactcaacagctctctcccaacctggagtggagataaaggcccagggagtttggctgagctgctggtaccaccagtggccgcagcaggctggayctgggtggcagtggaggtgagggggtgaccacagctgcactccacgggctgcctggaagaaagmagttcatgtggccccaaaactgcaggtaggggggctttcctctgacccctgcaaatagagcrgggtgagccggcattaggttggtggctggggagagccgtgttctggtagaggtggccggctctgggacttgccacggagagttgtaggggaagggatggatggcagcagctttgggactggtttgggtgccaaggggatgccagcagcatcaaggaggcttgcagggggaggttctaggttcacgctgaggctratttttccttcaaagactcttccatgaaaacaggtggtgcagtagggttgggaatttgaagacaaggaggctctgcaccctctgtcccgtgtcccccacctgctgcagggcctccacgtgtstgcgggtggcgagtagctcgctctcagctgcttcrtgcygcttgagtgtctgcaggatgtttctgygcgctccggagggctcatgcgcagccatcagccccttctcttccatccactgcatcagctctgccacatcctgcttccactcctgccaagaaccaggcgagagtgggtctcagagcacggtgggtgggggctggtgcctagccctgcatctgagggtggtgtggccacagcccctgttttcctcctcaggaaaaacctgagctgtgttgcctgcctcacagaaggtgttgagaggatgaatgacatagcgcgtgaggaaagtgctctgtaggctgcacagagctctgtacggtctcaggctttcttttcagggaggcgtcatgcgacctgggcccagacyctcacctggagctggagggaagccagcaactgcctcctcctctgctcactcctcccctggagcctggtccactgtgcctggatactctgcagctgctctctgaccctggagggcgggggggggttggaggagggcatgggagaggactcccaccccagcacgaggtgcactctcccccaccccctactctcccagccctagggcggccgtctgtgcaggctgagaaagggtcatctgcaggtgctgcagactgaggccaggctcacgtgtgtgcagctgggtgctggctctgaaccagcttctcgccgtgtgcccgcagagcctctgcccgaggccccagggtgctcaggagccgcccaaactcccggtgctgctgcagcaggctcagrgcctccctcacgtcctcctgggagtgcagagacctgaggtcatgcctgggagaatgggggtcaggaccatctcacccgccactgccccaggggcctcctgcccagcctggcttctggactcaaggggatgagctccctccagtgatggggagtgacagcctagctccacattcctgctccataccccarggttgtccaggtgcagccaggcctggtggttggcacaggtggcagtgaaaccatccacttctcggccaaacttctgcagctccagcccctcttgcagccactgctgcctctgctcccacaaaaccttcagctcctggccctgctgccccaggaccctcagagtgttgggcacctcttgggagtctgggcagtccaaggctgccatgggctggctctgagcgtccagctgctgcagcctgaccaggatgacaggcagagagtcaaaccccagcaggctccctcgtcagcctccttctcctctcacctccagggttcacgcatcttggatcatgaatgagacactgaatgtgataggcccagcagagtgcttagggtgcaggggttcccaatcccccatcggctccagccggccgtccttaagtgtggactgccaacagccgatgcccggcctagaggacatgcggaggcagcacagtgtgagagagaaaaatcacgcaagccacaaaagcacctgaccgcagggccactgcaagcccccatggaggctttgaacaatcagaaaaggtgctcctttcagcaggtggcttgggaacaggtaacacccttgtgtgaattagagcaaggctccacttcctctgagccgctgcagaaccaggtactggagtctggcaagctgagggccagatgcatttcagtgcccacttggccacctgtcaagtgccttcaggaggggcacagcctgtggactgtccctggtggccttgcctgcctgccagcccawaacrtcatccctgcaggaggagaggcgccaccttactaaggaggtggggatctcagacccgtgggtgggtcctgagccattccacttaggggccgctggggtccgtgttaccaggacggcagggggggctagacgccctgactgaaagcaatgcatcgggcccacctggagggggccagccgggcctgggctgcagagagcctcccaggcagctcagtgtcctgggtctctcctcgaagtgtacaggctgcctgacccagtcctagattatatcctcctctgtgtaaacttgcctcaagcagcatgccagacaccaaccagtctgggcccctccctggggaaatcacactacttcccgcatgctctttctgggcctgaacccagagcccagagccctggkcccagcycaaagtgcaccccttctgccctcctgtcctgacctctcctgccacaggtggatctcctccagcaggtcttgrtgctccctcagcagccgctgagccgaggccacatccactgacacctccttgctgcgcagctgagcctggacactctctgcccacagtagcagttgctggctctcttgcaggaagctctgccgggcctgagtctcagcctggcgccgggcccgttgggccacttgttcctgtacttgcttcagcagcccctgcagtgtctccacctgtccttgcagaggctggctctctgcgtagcctggctcctcgaccctgggagacagggygcgctgcacagtcagtgccctgtcctgggcctggtgccccaggcacatgtcctctctccaaacctgcatcccccagggagagtggtgctgactctcaatgcccaccccacccttgacctgggggcagcaagaacatagggctcgccaggtgcagtggctcaagcctgtaatcccagcactttgggaggccgaggcaggcagatcacgaggtcaggagatcgagaccatcccggctaaaacggtgaaaccccgtctctactaaaaatacaaaaattagccaggcatggtggtgggcgcctgtagtcccagctacttgggaggctgaggcaggagaatggcgtgaacccgggaggctgagcttccagtgagccgagatcacgccactgcactcagccygggcgacagagcaagactccgtctcaaaaagaaataaaaaaacatagggctcttcctgtccccaggaccattttctcctgatcatccccccatctttgccacagccctcctacctgttgtctccccatcccaatttctgtcccttcctcattccactgccctgcccacgccttcccatggtcctcactgcctcccaatgccaccactgcgctggccgtactttaygaccacactttggaggaagtrgaccctcctctccagcaccagggtcttcttctgggccagctgcagggcgtggcrggtgtcctctgagctccctggctgcagggcctccagctggaggagcacgtctcgcagctggacctgtgtgggtccacactcctgcagaaaactgcacacttccacactgtgtgccagmtgcacggccttctccctcttcagggcctccagctgcccccacctgggcagagggtacaaggttgtctccacaacagggacacctccccatccatccgggagccttggccagagcctcacgtgacagaagctgccagactggctgycccttgccccttccctgtgcctcggacacgtccagcctctccayctggcatggcgggaggcaggtgagtcaggcccrggctgggcactgtgtctgcctgcctcaccacctgcactcctgcctcattctcacctctggctcagttcctcctgctgtcgttggatttgtgtggagttcccaggatatctctgcctcagttgctcagcagagctgctgacctcagcccagaggccctttcccacagccagggcagtgaggaagttctagggaaaaggaggacccagccctcttgggggactttttctctttccacactcccctctagcctatgacggacctgagtggtgctctctgctacagggatgcycatgctgcctgcccctggaaagacagccatccgagtccttaagggccaggaggccctcgaaattcaggccagctctctgctcccctcccccaggcaggacggwagttaaattggaaaactgagtcacagcagcagaccacagggaggcaggggcaaggcgaggaggaggtgccaagytcccagggctgtacctcatatttgagctgcatgacctccagggtgtcagcctggggctgcaccctttgragcagcactgtctgcttctccagccacaactggagctccccacaggaactgcagaaaccgaacagggccatggcctcctccaaccgggccctgcggagctggggagaggtggcccaaggctggggtgagggtcagggcccccgacagggctctcagagcgggtcaaaggggtgctcctccccatcccagcccaccagcagagcccagggtcagggccagagggggtccctgcctcactgctgggccccacatcctctctcagakccctcttggcaccacctggagggagatggcaagggcttagggaagggtaaagggcactggcagtgtgctcctgtctggtcttgccctgctgaaacctctcagtgccagccctgctctaaggtgaaatccacgccgctccctctgcctgctccacccccacctgcctctctagtctctcctctggccatggcctccccagcgtctgtgctgcagggacctgggccttcgcttcctccgctgggcccccttcytacctttgcacaggtcctggccagcacccctgggtttacctgctttctgtttctcattcaagcctcagcttaaaagtccttccctccaaggtgccttccctgacctccagcctgacctgggctaccttctcatgtgatcccatcacacctgcatctaatgagttgtctgacatcttctcagccatgataaaagctccttgaggacagggaacatgtcagtcactgccttgtcccctgggatcactgcacaggagctgctggcacagagtaaggactcgagcatttcttgaaaaagaagtgttacctgtgccagggcccgcagactctcatagtcctgactcaagtggtcctgtgtctggagtatagtgttgggatcaaagtcagggtcaggctcagctgggagggccatcttccaggcatccccagggccagggtggcaggaagcctcactccagggccctgggttcctcaggctttctcctggagggctcagggcagagttcacctgtgtgacaaagggcagygcgtctacaggcgaccccatcaagcagcaggggctttggccaggccacccctacctccgtgccctgagacctggaggcgctgagctgtagctcaaagggtgtgtgggacatgggtctgggggacaggaagcttccttggggctgagggtcgaggggccaaacgtgagcacaggatctgatggctttgatttccacatcgtgtgctgcatacacagcttcttgaaagagggctgtgagccaagctatacstgttttaaagaactttgggggctcaatgaactgagcaaggggtgtcagaaggcagtctgggtgagtgatgaggccaccccaaaccaacaaggcgggctaagtcaggagagacagtcactactggcctgggtgaaagtggaggggaccttcctggaggaaagtgcttaacggtctgaaactgccggcaacaggagccaggccaagctgtatttggatgccctcggttgacgtgggcagacaggattccactacttctgggctaggtcaacaagtgagatgccactgaggactggggtgagggacacctacacccacgggaaggccacgaatcctgggccagaggccacaaaggccctcccatttttgtcctctgtgtggcccagccgcggtggagcaagggagaccaggcgcccttccctgtccccgtcctcaccgtgaataacgacgcccgggccgaggccgcccgcccctgctcctccagccgccgcagctcggccgcgaaggcgcgcaggacgcgctccagccgcacgtggcgcctcagcagggtctcggcggccgcctggtcctgaccgcaggacgctctctccagcgaggatcgccgctcgcgcagccacgaagccgcctccgccgcgtccgcgaagtactgtgggagggggtcgggggtggtgtgggtgaaggggcgcggctgagcgcgggcaggtgctggcacccccacccccgcctcgccgggccccgcccccaccccgcctccacccctccccactacctgcaggaccagcagggctgtctgcagccgtgcgccccgccccaccacccgggtctggagcagctgccaccctccctgaacggcctctgcccgttccccgggatccggctgcgttgggggcctgcgggcgctgaggtcgcgtcccctccgcacgagatctacgcacacggcctggtggcggtggacctcagcttccagggcctagcggggggcagagcagggggctcagtgaaggcagaacaggggagggggccgggggcccgagagggaagggcaaggcgctggcgaccggcgggcgcgctcggggagctgacaccttgtgtttctgcagggcgcctgcgatctggctgagatcccggcccagggccgcattccccacccgctgtccgcactccttcagccaggcttcctcctcctcacagttgcgcaggaactctgcccgctgcagggtctgctccagcagggcccgcctgagggacaataggggccaccgaaggacatggggagtcgtgaggcatgggcagtgggttcccctccgggtttagacactccccttagacaggatttttcttttccctggatgactcaacaggtgagacggaggctttggaagtgagggtcagtgtggagaaaactgscaggccaacagtactttaacctgggcaggagataatttgggttacagaaaagttctgggaaaggtggaagagttggggcaggctcttaccgggccctgacaagagccaccaggctctgttggagctgggccagtgtcctggccttggcctgcagcacctccacactggtgcccagggaggagtccagctctgctgtctgctgagcaagatggctcacatgggctccgtgggccgagacttgagcctccagcaggtcatgcctctgcagcagctccaccacttctgccagctgctgcccacaggcggtggacctggccggctcctggccagagatgatggtcattgcagtggtcccaaggtgctgggtccctctgagcactggcactggggaagtcccccaccytgctgtgtttcccaagggcctgctggtccagtgcccacctgcagctcctccagctggtgggaggcagcctccacctyctgcagcaggctcagcacagcctgcatgtctgccacctgcttcctctgtccctgtagatgctgaaggagcctctgccagcgcacggtaacttcctcctgcctagaggatatgagaataagggagatctcctctgggttggggcagggaagctacttcagggttcctggtctgtggtggggcttggctgccctggaagagtctgacctccatggctggggcaaggtctatggactctgacagcatcctggcaggcggtggtagaggcagtgtgtcctacctttggacacatgcagagaagccagaaggagggcctggaaggatcaggcctttggggccccctaacttggatgcagtccccatttcagttgatgaaaactccatccttccaggcgcccagactaaaatctttttttttttcttttgagacagaatctgctctgtcacccaggctagaatgcagtggtgcaatcttggctcactgcaacctccacctcccgggttcaagtgactttcctgcctcagccacctgagtagctgggattacaggcatgggccaccatgcccggctaatttttgtatttttatttttatttttattttttatttatttatttttgagacagagtctcactccttcgcccaggccggactgcrgtggcacgatctcggctcactgccagctccgcctcccaggttcatgccattctcctgcctcagcatcccgagtagctgggactacaggtgcccgccaccacacctggctaatttttttgtatttttagtagagacggggtttcactgtgttagccaggatggtcttgatctcttgacctcgtgatctgcccgcctcagcctcccaaagtgctgggattacaggcatgagccactgcgcccggccaatttttgtatttttagtagagacgggtttcaccatgttggccagkatggtcttgaactcctgacctcaggtgatccacccgccttggcctcccaaagtgctgagattacaggcatgagccaccaggcccggcctaacatcttgataactcactttctcacatgccacatctgatctgtctgcaaattctacttggcactacctgcaaaatctatccagaaccccaccccttgtcaccactgctgctccgtcctggattactgcaatagctttgtaactggtctctctgcttctgcctttgccccttggatctattcccaacatgacatccaggtgagcatcgcaaaacaaaagtcagattgtgtcactcgtctgctccagccctccactgatttcccatcatctctctgagtaaaagccaaatcgttactgtgccctgcaaggcccgacttgacctccttccctacctcgtcacccctgtgcccccctgacctcagctcctgccacttgttcactttggccaacactggcctccaggctatttttcaaacctgccaggcatgtgctcgcctaaaaggacactgcatttgccgtttcctccgcctagaatactctgtctcccacgtctgcatggccagctcgtcacttctttctggtttttacttagaagtcaacttcccagtgaatcccctctagccactcaaacttagcacctcatattcattcccctatcctcctttattgttattatttttggagatggagtctcactctgtctcccaggctggagtgcaatggcgccatctctgctcactgcaacctctgcctcctgggttcaagcgattctcctgcctcagcctcccgagtagctgagattacaggcgcccgccaccacgcctggctaatttttgtattttttagtggaaacggggttttgccatgttggctaggctgtcttgagctcctgacctcaggtcatccgcctgctacggcctcccaacgtgctgggattacaggcatgagccaccgcgcccggcctctcctttattattattatttttattaccacatgctatgaatttttcttatatgtctgttttccttagtagtgtgtaagttcatgagggaaggaatttttgtttcttctcttctctactaaatctccagcacctagcacagtgtgtgggacatagtagacactcaaaaaattcttgtttagtggatgaatcagaggctacctagaaagtgaaagtgcttcaccaataggaatgaattactgatagtgggcttgcaagcatcactgggagatagatctttgtagagggatccctgaacccataaatcatccctctcctctctggcaaagaatgggcacatgacatggaaggatgggggtgtggtaggacagcctcagccagctgtggggagagttcatgtgctggggctcacctgcgggccacatctgcccagctgtggtactgctcctgccggaggatgtctgcgatctcagccagggcctggaagcgcccctcctggggcaggatgccagcctccagcatgcccagcctctggacggctgcctccactgtggccaggctggctggcggggctctggcctggtctagcacctgctctgcayccttaaggaaactctcccggagggctgccttgygctggaagcgccgggccagggtttctagccgctgcagctgcagtagcctctgctgcagggcctggctccttgcagcctctgcccactccagccctgcccagcactgggacagctctgcaaggcccaggccctcatgaggcaggaagggcctgcggttctgggcttggagtgctgtctgtagccggaagagcagggcctctgcggcccctcgctgctgtagccggggtggcttctcctgggtgcggaagatggtgaatgctgccagtagctgccgcatggcgggcagcragtctggaaaatcccgcgcctccagctgcatmtgcttctctgcaatccagcgtagaaggtcagccaccagctgctcgtactgggtctgcagcagctctgtctcctggagctgaagcaggatctggtggagggcataggaaggggtcagggtccttctsagggcaggccctggaatgggcactgagtgccagccagagttccccaggtgggctgtagctacttctctgagccaaagatgctttgaagtggtggtacccccaccccagagaactgggtttgcttggattgcacactcagacccaggagcttggggaccctctccatgactgagggtgaggctatcctgccttcttcctcttgttttacccatttggcctcactggtggggttgaggcccttcaggctgctgttctttttctaggccgcctttcccttccctgagcctcctaccccataaagcagctcacagcccttggcctgtgtcacccccacccacaccccaaatgagatacccaccttgagaagagcacttccaggccttagcctctgccatcgtgtccagagagtaaggaagccccccaaaaacatgaattctgcgtagcccccgctggcagagccttttctgtgcctgtccttgcagaatcctggctctctaagccttttaatcccattagaagcttaatagcccgagagtcgggaagaagggggaggcccaggaagggccattcctcccctggcttcccttgtataccaggcaccgtgctgggyccattacccatgctccctggaacactcacaagggccttcbgttatccaggcatcatcatctycatgtgatagagggtgcacagtgaagttgggtgacttggccaaggccacacagctagtacgtggcagggcaggcttcacgcttaggcctgtctgcctctggagcccttgctcaccccacccctcctttctcccccaccttagtgagtctcytctggacagtctgccyctgatgcaggcgggagcagtagtggtagtagagggagacgtaggtcatgatagagcgctcatctggctgtgcggctgccacgtcctcggggtccagcagctgagcaatgcccagctcctgctcagccaccaggaaagcaaaagcaaggttgtgcagtgggcggtctggacgcagggagccgtagtccaacaggtctggcctggacagacagtgagaagggctcttcaccagcaggaacctactgctttcctttaagtagattcttaaatgyactcatgctcctattggccattcacatyttcttgtgaattcgttttcccgacagttatctgaggccctgttgaaggaggaggactctgacagagaaagaggagagttcattcggcacagggaccaggctggggggctggaggaatctccaaagggcaggtgctgcagggtgtagaacatgaatagaattgaggggcacagaaagtggagaaggctggggtcaaaggtaaacttggccaatctcatggcattgtctagggaagggaaaggggctaacccatcagccctttctacatctgtgtccactttccctccttcaagcctagggatgtgggagaacgggtgggctgaggacccaaacccaggagctgttggctcagtgggcagaggcctcctgacaagggtggggtcacacctgtgggcatggatgagggcattgaagcccagcccatcgctccagcttcgggagaaatctgtaatgttcacgttggtgtagctggctgtcttccgctggcaccagaccagcagggcttccttggtggacagcagggctgcgctggccccaaactcctcctggcgggacagggcagcagggtcaccatgcggggatggggtggggaggcagagagcctgcaggctgtgggagaggcaggctggccacagcaggatcctgctcctccctggcccggggccartgtgactctcctctcttcagagtatctgattttgcccaatttcatccacggtgggcaaggattgggggtgagagtgactggccttccaaagaagtggagcaagggaaaagccgtcactgcagaggygctggctttgtgtcaccacaggtgatcacacagcaacagctcccgttttttgagcccttctgacgggccaggtgctgtgctaactgacctakgctcatgggattgtggctgggcttcatgaaactgggtcccgtcactgcaggctttctgtgagccaggcccagtgttatgggctggagtgcagtggcacgatctcggctcattgcaacctctgcctcccaggttcaagcaattctcctgcctcagcctcctgagtaactgggactacatggaggcaccactatgcccagctaattttttgtattttagttggaacggggtttcactatgttggctaggctggtctcaaactcctgactttaaataatctgcctgccttggcctcccaaagtgctggaattacaggtgttagccaccatgcccagcctcacttcctgtttataaactcaaaatatcaaggctcagcaggctgcacttcccctgccctctgggccccagagcttgggtaggaaggacgtgcatggtgcccacatgagggggagtggagtctcgaggccctgggccccagcgaggtcaggccccagtaccctgcatggtggggccaggctggcagacggaactaaggaaaatgctgggatggcttgtgagggatcggggctagcctgagcccaaacayatctgagtcagcagggagcagggctggagggggctgcagacagacagagacggtgctggtcagggaggatgcccacctgctgctcccaagggcctgggctgcaggggacacctgaaactggccaggggcctgaggaggtgagtatggcttcctgaaagggcttgaggtcagttagaaattcatccgtcccttcagccttcaaatagatgctcagcctgcagacacacaagacccctgctctcctggggctcaggccctgagtttccaggccatcctggacttctgccagatctctggcttcttttcatgagggtttcattctccaggttggctttccttacctactagaattgagttttaggtggcattttggaaatcatgaaactatgaaaaagtataactataaggactctttcttttttttttgagacacggtctcactctgtgacccaggctggagtgtagtggtgtgatctcggctcatcacaccctcagcatcctgggctcaggttagcttcccacctgagccctcccgagagctgggactacaggcatgtgccacaaagagtttatagtctttctgatccagtgtgggggaaagaggtggaatgaaggaagctggggaccatgaaagaaatgctgtatctttggtgtgtagggtgccagggactttgtaaacctccagagctgggactccctccacacatttcatttttcccaacagtacattgtggtgtaatggaagttacagwgcctcagtgccaagtggggagcaccacacaggggtgaaagtgggtgctgggcagtgaccctgaaccccccactagtgaatgacttgcccagacctggtttgaagcccatggccctggccctcactttagcatattacaatgttacaatatctctggtatcctgggttcttcacccatggttggagagtraatatggactttgcagtttccaggatctcctatggggatcataaaagttgtgtggaacttatgaatccccaggggtctgaggtgaggccagggctgggctgggtcaccaggtgctgggtactggggactgagccataccttgtccaaggagatgtgggagatctggaaacgcagaatgatgacccagatgagtcccaggatgagtgtctggtctccgtccacgatgttctctggcccgatgagtggtactggcacctgtgggcacagttggatgggctaagccatgaagcccaygtccagagaggactcagtcaccaaaagcttagggggccagctgcgggatgggagcatcctggaatctatcctgccccagctgggagttccctcagggagaagcaggcaggggataagtccaggaaagcaaaggcttcctgcctggttggagccatggcctcaagcccacctgggtgaagccccaacctggtgaactgggctgggccctcagagcaggaggactccctgtgtgtgggctacaggtagacctgggccaagatcagtggttcagctgcagggtttggaaatgaggggtcataacagtcaatgtgtgagcccaacagacaatagcaactgtctgcctccrtctcccasggtgtcctgggatcttcagggggtggctgggtccctgggctcacacccaaatctcagccctcttcttctgttccggctccaacagggccagctataaatccagactcccaggctccacccagtcagactgtcttgggccagagcctgggaatttgcacttgaacaacaccttgggtggctcttaggtacacyaaagttgagactcctctgccctacatcctgccatttggacagggaggatgggtgagtcaaggggagaagccctgcaggatctggcccccagccccctgtggctccatcttccaccctgtggaatcacatagctccaaggcccatgggattcttatagttccatgggattctaagcacaggacttcaggcctttgcagggccgtgcctgctgtctgaaagtattctcccaggtatctgcatggctattcacctccctgcctttaactcttcactcagatgttgcctagcctgaccactttwtttaacacagaaacttaaggactatttctcccacccaaatacacactctcgatccccttgccctgctcaagtgaggatcttggctttgttttctggtgtatcctaggggagtggcacacagcaggcaatcgatcagtaagtacygaatggagaaagaaaaggagtgagactttccataagacctgaagggcaactggcttcagccggccactactagccctgtgggaggagctgcaatcctgggtgtccccctaggtaaactttggtatatctggctggcctctaaaggatcccacccatgctcctggggtggattccacctgccatgtcaatcaccttggcttagagttggagcctctggtgagtggggtgtttgtctgctcctcccagctcctgagagcctatcctcctgacttcctattgagcgatgtcacgctggtggcttaaactcaccgtgatgggggtattaacgccataggatcagcgaatacagcacactggagtttttatttcccccagagaatcatttgttaaacgtttaccagcacaccgctgatctgggttcaatgaatctgtctccctttgaagccaggtgccttgaggtgggggtctgggctttgcttagtgkagcccagcgcctgcatagaatgcccagggcatgggagcatctccataagcgaatgcatccctcattctgccacacattccctgtgtgtttgcggcaactccgtcatcctttctagaccacagttgcctcctatgtgtatggagacaaggatgtcaccctcacaggtatcagtgacatgctgtatattaaagcttggggagagctgcaacacctctgacaaaggctgtggggcttacacccttccccagttcctggaggggagatgactggctcacagggtcattgtccctggatcaactagggcccagcattctgcagctggcagcgttctgctcttgcacytgctcaggacagcagtcactcccattccctttgcttgggcttctcccctccctggctttcctccaacacaccccaggaggctggatgtaagctccactccaggatatagtgataggcacgcacagtcaggctccatccagccaggcccagctcagtgacttcacagcctccagggacagccacctccaggagcccttggccttcacagttcccggtttccaatgatccctttgccccaccccacccctgcaccagcccctcaccctggccatgagggtccctctgtccctggagctccggcctccttttagtgcccatctccttagcctgtccctttctttcaggtgactctgcctccccccatttgctgaggcctcctccctccttctccaagacaggccctgctcctcttccccacctgccrtcttagtcccacatctgggctctgttggcyggttaaccatcgatcttgcctggtaaataattcagggcctctgtttcctcatctgtgaaatgaaaagcctaagagaacgcyaagattcttttggcctagaatcctgtgagtctctcttatgacagacagtgacattttccaccccagtagggacctggattgctactgccawggccagctgggtgctctccaagtcaggggtgctgtgcgaggagggcgtggcttctgctcctctgtgtcccagccactcctcctgtactcaggccccagctcctctgttctgcccagtggcctggcgcaggaaaggtgacccagtagttcagcctgtcccagctgcctgccccagcaccatcccagacccctttccctggggcccaccttggccctgaggaaggccagagctcggctgctgttctccaggaagtgcacacgcaggcggccccggctcgggggtggcagggcctcccctgagatgagctccagcagccgcaggaggtggatgccgtcagccagctctgtgtacaggttccggatcttgatgcccgcctggggaggggacaggggtaagtatggggtcagcccakcctcacctgtcctcccatcctgggacctgagaggtacgacccagagcagctgctttggaagaaggagctctggcctcagcttggcctcaggcagatgaccccacagctcaccccggaggcccactggccagagctgggggcstggtatgggtgggctgtgggtcacagctggctatactcacctrgccgcactggaagacgttattgatccacttggtgaaagtcttctcctgcatctgcatgtgccgggcctgtagcttgcgaatgtggcccgtctcgtactgagagtccatggtgagacttggactgggcgggacccggagttctgtgctgggcctcctgctgcggtgccctgcagccccgaggagctcccggggactgtggggctgaccagccatcagccctgcagactttggggatgaggagctgctggatggctccctaaacctggagggcatgcagattaggggatgatgtgaatggagatggcccctctaccaggggcctggggtcccgccttgccagactgtcctcacatttcatgggggttgcagcttggagcccagccaggtaagggccagtgcttctggtcccctgtgcttgaatggcccagggccccctttgccccaccccaccttccagattcttcttctcagagcccctgctgccaggtccctccaccacagtgactgggacaggtggaaggaagacaggaaactgcttaccttggtgatgcctgggtcccacagagacggctctgctggacggatggagatggtagatagcaggggctgcttaccttggtgatgcctgggttccmcagaggcggcccagctggacggatggagatggcagatagcaggggctgtggagggagggagagggacatcaggagaggccaaggctggagcagggctgcaccacagccctccccttgagccagcgtgctggggtgacggcacacaggcggcattgtcctcccacctgccacagggcgtggcccagacagggagggggtggttcaggaatgctccagggccattgccagatgatgtcctccttcatcatcctcccttccccgccagcaacttctccaactccaggtgggggtcctggctcccaggacgcagaggcccatggagcggccctgccaccgcatggggtgctgcagtctgcgtaggaggtaccaaagggcagagcctctgtgggaagcctgtggacgcacttcccaatctgagactgccctctgtaccctcttggggcctctctgtgagcacccagggcgaggggatgagggagcgtcctgggccgtggtcttctcattcacccccagggaacagcccatagactgagggcctcacagaccctgggcttggctttccaggccctgccagagtgcagcctgcctagcccggggctgaagggtaggctccctggaggaaggggtgacctggaactgcgagggctgtggagtctcctccaaaattagagacacggtgttaactctgggctccacagagctggccgtggcccggggctcggaggcaggggtgcagagggagctggtgggcgcccatcccttcctccccgagcagccgtggactacatgccagagtgaaggcgagttctaattctgggggtctcacccgcctctggctaaactcagggtagcagtgtgggctggggtgtgtgtgtgtgggtgtcttccagcggccctggagcctctgaagcgacagcccgctcctcagggaggcgctcctggcagccacagcccacagcaggacagccgctcagcgcgcccttgagagctgggctagggatgagtcacacttgaaccgcctgggcccactgcaggcagtcaggggtgacgctgagaggtgccgtggtctcgggtggggtgcggcttcctgcgtctgagagacgcttcctctcctgctgtcctctccctgccaggccccttctgcagcggctggcttccagacaccctgcgtccctcccttgctcgcagcagttgctgtggcggtcctcccgtgcacccccccttctgccctcactgcccctgggggtcctcatcacggaccccctaactcggcatcctggacaccaccaccccgcacctttccacagtgcagctctgctcgtgcctgtgaagcctcccacagcctgggaaggaaaatccagacttgccagaccttgcctcagccaggccttggaagcctgccagcttacctaaccaggctagtctgcccccctcactctgggtgctctccatgggccactcaccatttcctgagcaggaccagagctctcctgccccaaggctgggcttcagctgctctttcagctttgaacgtcctttcccactctccatcatccacattcacctatcctgcctgccccagttaaaatcctgtttcttctaggaagtccctcatcccacccgcttaccccagggagactgagcttgttccttctcctagtaagaccctcagcccatggagtcctgtgtgatgttgtgagcgtgggaggacagactgaactgctcggcccgtggagtcctgtgtgatgttgtgagcggggaggacagactgaactgcgtggtgcttcgcacatagacctcaacagggattggcattttgaagctgttggcgggggctgtggactgcttttcttcctttctagctcaacggcagctaaagccactgcatacaatgcaaggactggctcctgtttggccgcgactgattgcagcccctggtgaaatgagaaccctgtgggtcggaacaaagtttggattatttatgttgcaagtaactaaaatctcaagtgaaactggtttaaacattatatttttattatttatttatttatatttaattcttttttagagacagggtcttcttaggttgcccaggctggtcttgaactcctggcctcaacgatcttcccacttcagcctcctgcattgctgggattataggtgtgagccaccatgcctggcttacacagtataaagggaatgcattggcccacacagtggaaaaaaatatctagtaggaataggaaggacttcaggtgaggtttgatccagcagctcaaatgttgtcaccacaggcctggattcctctggcctttctcaaggtctctttcattttcatgctccacaagatggcttctgccaggctgacctccctcccctgaccccagcagctctggacacccctctcagtgccatttatattgttgcatcaataggctcatttctatatactgcaaggttcagagaagacagaatatctctctcaagagttctaacataagtctgggggtcctggctctcataggcttgaacagggccacatgtccattcctgagccaatatttgtgaccaaggggatgtggtcaatctcatccaaacctcacttgaagtgagggtgggaggaggagtgctctgcaaggagactgtaggtctggaccaccaaaaaggtagatgggttggtgggaaaagccagatgcctactatggtagtgggcggggggagggcacactggcaaggtacagcaagaggcaggggcagtgctggacaggcaggggctcctccctagcacgactggagaaaggactcctgtgaagcggtcacctccatgagtccctcctgtcctggcttccaaccactctgaagtggggcttttgtccacagacctggcctctgctgcctaccctcttctgtccccacctgatggggccgctttccttctgaagcggctgcattttgggtttctctccacaggaagagttggggctcacaggcacaccctctccctaactcttctcccccggttcaacctggatccagggatccacactctgctccgagaggccagcacgcagccactggaaaatgagccagtgggagagggcagctccatgtttattgatcagcagactatgtctttttgtttgaaacttctaaataagattacaaaaagaaaaaaaatagaagcattgcgtattaactgcattggttaaccaacattggaacccaatactcttgtattaggcccgcatttacctgagtaaactcagtggttttctgtcctaagcatgcttgcctgctacatcccatggagaaaataaacagtgaaacactttcctcatcttcaaggcaattgtctcaggcatcctccaggcatcatgaaggagggtgagcgagggtgcgaggtggaaaggtccaggccgcggctgtgactcccgcgggtgaaccacagctccacagccccaaatccaaagatgctcttgctgcagcacgacaagtgttcaaaagagaaccaggcccagcccggagaaaggaaagccaaaagccaactgaatgaatgaccctcccccagaagagcaaccctgcccccaggccatccaagtgcggtgagttgagaaatgaattgacagacgctgcagggctggagcaggaggcggaagcaggttggaaggctgttgtgtgccacccctccctgggagctggggagattcccaagtcttagtgcagtgtttctctacaaacggggtcaggagaccctcactggcaggctgacaacttggaagcagactgtgggagcaataggctggagttttcattttccctttaaactcaagaccggaaggtttgtgttatgcgataccatatgctgtgtagaaaacagggcctcagcttcttagatgttgtagttctagagtttaggtacttccaccctctctcctatacataaacactctgcggaagaggttctttgaaaattggggtggtgcaggaagggcaacggtgatggtgagcaggccccagggtcggccctgccgccctgccgtgtggggtagggagacagctggtggtgtggacacattcacagaactttgtactggtcctgggaagatacaagtcctcacttggtcgccatccctcatattttctagtgttttcttttccagtcaacttttcttgatgaatgactgcatgtaagaggatattaagaaaagtggccaaatgatttcctttttttttcctttctctccaagaacattaccaggtgccagcagggaaaggactccgctgcctgacgcctctcccacctgagagcgcagaggtagggagatcacagtgcctgagaggttttcctccacggagaaatcagagacctcaacctgctgccctctaaagcagctttctgtatccagacaaaacttacatatgtacacgttgttttaaaacgacatactcatgtgacacacatgtatataaattcatgtttatatatgacaattgaggagagttaaagaacaagataattctggatggaaaaatcagtttgcctgggcatctgtaaacctttgggcaagtgaattccctcttctctctcagttcaccctttggtgacctccaccgtggctgcagacttcaggtggtcctcacgcattcacagaactgtctgcttaggttacagcactttgggaggccgaggtgggtagatcacgaggtcaggagatcgagaccatattgaccaacatggtaaaaccccatctctactaaaatacaaaaattagccgggcgtggtggcgggtgcctgtagtcccagctacttgggaggctgaggcaggggaatcacttgaacctgggaggcggaggttgcagtgaactgagattgcgccactgcactccagcctgggtgacagagacttcctctcaaaataaaaataaaaataataaaataataaatggttcttttctatgcgtctaatgaatttaagtgcttgttaagactaaaaaccatgttatgcatttcctgctcttaaaactaaattatgtagaaagtaagctagggagtgtaagggtaggcatctggatataaatgcttctcccaaatcaagattttctcttcaatctgtgcctttgaccctgtcaccaaaggcaggtgacagaaaaaaaaaattatgtgccttttggaagactcagtgggacggttctgatttcattcacttctggtgccagcaggcccccataccatgtggccattgctgtttcgtgtctcttcctgcataaataatgcagagaggccatgcaggtatgcaattttctggagatgaggcagggagatttgcaaggaaaagtcacctacctccccaagctggtgcccacagagggggaggcacctccacctgacgcaggtgtctgagcagcagtccagagaggtttactcaggggatttggggagcgcacactctggagcagaagtacaggtatgtgcccgaatcctgcctcgtgatgggcattcatgatacgaaccacacagcctttaaagaaaaggttttatatgaaaggttccattttgtttctgtataaaggcttttatcctgtaaggaaaaaaaaaaaacacaaaaccctagacataataaatgcctgttttctacaaaaacaatgtctaactctgggtggactgatctcttctcaacagcccagggcagggctggtccctcattcacctgtgtccacagggccgaagacactgcacacactaggacaggatttgattgaatttaaatcctgccacccaccaaggagacctggggatatttaatgtttgagggccacactaaacgatcactgcagagaaccacctcttttctttactgtagtttaagtatgataagtgggctttgctattacttattggaaaaaccagtaagaaaagctaatcttcaggcttcaatgtgatttgacatgcaaacgggaagttttgccaggggttaataaaggttgtgaattccaaattcctagccgaatatggctttgctggtaagccccctggaagggaggttgggagggctgaccagatggtcatcggggcactgggatggaggcacgctggggcctgactgcctgctctgctggagactgcagaatggatggcagatccacagtgcatcccccttc

SEQ ID NO: 98059 - DNA, 65436 bp, Homo sapiens
agttttcaacctagaagatgagatttgtattgagtatagaaatgatgtttcctatctagtttgtaaataatcatggtgcacttgaggggtctcttggaaactcctagggggtcaagaatcactattctgaaactgtatagactgggatttagctgctgcattttgcctttcttaaataattatattttggaatgtaacccctgttctgtcttcattgacaggatttgcttgtgttgttaaaacactaacacaagagcttccagtgcctgggccgtgcctaggtgatgctatttcttctatatctcctgtcttctttatcccaaatcccactcagcatatcttcagacctaggttgtaagaccaactttggattggatctagccagtgaattattatttccatggttggttccctttctgttaactctggtaatcaacagattgaaaacggtggaagaacttcttctgaaaattgcagtgggagcaaattcttgttggttttgtgctgcttgcctttctagatctgctcatcagcacttaaccttccctcctctaaaggttactaaagaagcctgaagtaggtaaagagtgctcctcagcttcttatccttccactctttacccagcagatttcattcaatgccttagccaaggagtccagcacctgtctcccctgctaataattgtccttagagatgctagtactttaatccaggtatagcagtttcccgttattttcttgcttgtcgttcccctacatttcctcctgatttcccaagactctctttgtggcttttgagggtcagccaaggagcaggcaagtgagtgaacaatcctcaggaaaagaaggaccattttagcttaacacttccttttttttttttttttttttaagaagaatataggtaaacaggtaatgattcttgattggagataccatttgactcttgatgagagttgtacgaagatggaaatgagggatgattccaggcgttttagggggaaggctgcagataccattctaacccccaagatactgtgttctcaagacctcttagaactaggtgttgtcagggataatttgaggagggcttagtcttcagaacaatcctgcagtcttgacagaaatctaaaatctccaaaaactcctaccctttaaccttaccctagggggaactgatctatgaatattacatgtgtgattatgaaaggtgaagttgagtgagaggagttgaggaacgtggaagacagtgagctctcaccctaacactataagaagcatgatctcaatagaccaataattcacctttttatacatctgtaaataaatggaatgtttttaagaatataattatgtcagatttagcattttcttttatatattaaatatatatatctttccttttctgctttcgaaaagtgactatttttttagaaatctaagaacagaagtttggtgattgaaaggtagaatatataaacctgaaataaagcagttaaaacaattaaagcagaacttggtgttgggaggtttgtgccaacttggagtggagaattctaattccctaagacatatttgagagaggtgccactgaagtggttttatcataggaatcctttccttttctctaagtttctgatatgccatttgggggaggttttcgatgttctaatccttgtagcatgttttacatggaggcttcaaaattgtgtgcaacctgatggcaagtatttgttttagaagtcattctaaaatcattctggtgtcagtatgagcaaggcagttcacctgttaaccttggggagtaaaggtacacaaacacagtcttttagtggtaaaggacagtaggtgttcttaagggaagatatgttaaagagtttgacagttaacaaaaacgtttaaaggaatcctttagacatccaactactcctatctattaaggtcactaacagatcaagtccagttatataagcttcatacaaattgttcactttgtgtgattttatagtacatacaatagttttttcgtggaattacagatgaaatacctgatgctaggctcttctataacaagtttgaaaatgttttgaacacacaagaaaggcagacaatccatatgttatttttggtttagtggtttagataattttttttctaactatactggttgagatatttgaaatcaaatagggtgatgcactttaaaaacgggtctagaaaatagtgacagcccttgtccctcactccagaattaaacaacaacaaaccatacacagcacattttccaggtacttttatagagaatgactgataaccaagaatcagaatacatttcttgcacaaaactgttggttttgaagaaggtgctgtaaaggcatcagtacttcatgtcactgtattatcactaatgaaatttttatttttattttttttgaggcagagtctcactctgtcgcccaggctggagtgcagtggtgccgtcttggctcactgcaagctctgcctcccgggtttacgccattgtcctgcctcagcctccggagtagctgggactacaggcgcccgacactgtgcccggctaatttttttgtatttttttgtagagacagggtttcaccatgttagccaggatggtctcaatctcctgaccttgtgatccgcccgcctcggcctcccaaagtgctgggattacaggcgtgagccactgcgcccggcctactaatgaaattttacatggacacaaatatctaggtgcagggaaaattaaagctgagatattcagactcactgccagttggaggaaaaaaatcagttataacgcattttttggaatagagggaaataatttgataagtacaactttttgtttgaggtgtagctaatgttagacatgactgagctgttctacacataagtgttgaatagtgatggtggtgcattaagaggatgggaagactatgggatgagttggaaattttgagacaaatctaaactctactaatttctattgttgtaaactctgctggtagaaaagatattaagtaggaaagcagtcttggaagcatggttttgagatccattgtgtttccaactgcaatcattgatctcagctgttgcacagtgcctttgcatgtaaaggtgctcaataaatatttgaattgatgagcaaatgtttagactgtttcccaggaacttataccttatttgcatgttatgcctagggtgaattttaaaatttgatctaatgagtatagtgctaaacagacaactatataacgtctattccccagacatctagaatttcagaagctggcaaacactatgtatagatgtttaggacatataaaagtagaataaagtgttaaatagtgtatggatgatgaaatacttatgaagagttaactgcattttggaggattgggatggcaagtagagtcatgcgtcacttaatgatggggatacgttctgagaaatgcaccttgggtggttttgttctgcaaacatcatagagtgtactgtacttaaacaaacctagatggtgttgcttaaccacacacctaggctgtgttgctcctaggctacaactctgtacagcatgttaactgcactgaatatcataggcagttgtaacacgtggtgtttgtgtgtctacacataggaaaggtatggtaaaaatatgatattataatttaatgggatcatgtggtcattgaaatgtatacagtgcatgactgtaaatctgagtggagaaaagtgaataatgcttctgttcacattagacctgggactgttattttctgaggaattaatgaagaatgggaatagcctatatagcttattcctatattggtatctcaaaggcagtgtagtacctagacaataaaagttggactgaattgtgaagaattaaaaatatgtgggccgggcatggtggctcacgcctgtaatcctggcactttgggaggccaaggcaggcggatcacgaggtcaggagatcgagacctcctggccaacatggtgaaaccccatctttactaaaaatacaaaaattaactgggtgtggtggcgcgtgcctgtaatcccagctactcgggaggctgaggcaagagaatggcttgaaaccaggagtcggaggttgcagtgagctgagatcgccactgcagtccagtctggggacagagcaagactctgtttaaaaaaaaaaaaaaaaaaaaaaaaaaagcgtggctttggcctaagactggaagtacccagattccagacttaagaaatcctcattaaaatgctttcagttgtttttcatgaaagaaatgaccagtgatactttgtaaaccatttatctggccatgagtgatcaggtgagaaaaccgttagcggacaccagaatgatctggagaggattagggacggctcttgtgggcacatttttactctagtttcatgggtggagatggcatctgccgtggtctgcagcatgcaagtaaagacaccaggtggcaccatttattagctttcaatcccatggagaggtcccatcatgtaactaccaagaggttgaaggaaccaactacctcttgcatattgtagctaatggttcttgccttcttcttccagacttgggaaataaatttgaaaatcgtattttctgtttcataatatttgcagtgcatggttgaagggaagaaggccacgtgctattgccagttggtctccaggaggtgacatccatcatctccatgtcaacttgtgagctttacaaatctaattttcagtacgtggctacagtatacacaagcaaatatgtgctttgccacttggctctaaaggctcaccgttgtacacaagcaatgagtttaggggttcttccctcttgttatcacatgtcatctccacagggtttcaaaagatctggatagggtgagacagacacaccagtgtagtactcccttgggtcccttgtctttggcttaggctttttcataaggtataataatttgttagaggttcttccctcttgcagacacatgtcatctccacagggattcaaaagatctggatagggtgagacggacacaccagtgtactattcccttgggacccaagtctctggcttaggctttttcataaggtgatttcttgtggtagtagtcaagtggagaatactcaggaaatactatttcatgtaacatttccgtgtattccctctgcctcccccgacatgagttagaaaactacccctcgatctagtatcagcaagctcgacagtgacctcagcaaggaacagccctagataaaaggattcataagtaaatggaatgaggaaaagatctggagcaacaaagtcctggtcagctttaggtgaggaagcacaatgggatgttggaggctaaagaagccatgaaacctaaagtattataacatagcatattcacttctctttcccccgcacgcccaaagctctgttcaaggccaccctttcccctttcatgatgaccaggttgcccagtgcaaaaatactgttcttagctattaaattgcattactcagaataatcctttccacgttgagtctacgtgccggactggctgcgagcagaaactacttcagtcgctttaaatctcaacacttgtggtcgctgggagcagagcttttaggctgtagctcagtcttgtaattctgagctaggagtttcagctacggtccctcgggcctatcagatgacaaccttaacaccctggaggcgtggttatcgtcttggggctctgggaagtgcagttccatgggggaccaggcctgataataccataaaaggcttggttctctcaattctgaagccatgttctgttgaccttcctctaaaagcggtacccgcaattgtgcggattccgtggttccctagtcccaagccgtctgcttcctgggccctttcattggctccgcccccgtaaaccttgctcgtccactctggaagcgctctcctgactacaggccgcgcccctcgcgtcggctccgcccacccagcccgcggcttggcccaggcggtagttcgcgttttgagccgatcgtgccaccatagctcctgctgctgcctctaccgctgcggctaccgcggcggagctgaaattgccgaacgcgatgcccgagggcgctgtgagcggggtggccttagctcgccgaggctggtgaggctgggcccgaacgggggcgctgacgagtagcaggggcctcagaggcgggtgaaagataaaggtccagagccgctgtggagggcggagagcgagctctggaggatagggagtgggggagggaggctcccgtggcagaacgagttgtgggctacggcgagccccgccgcgtccccgccggcgctagcgcaggtgtccaggcctgcggaaatccctggtggtctcggcggcctcctcccttggacactacagttgccatgggaacagttgggcattaacgggaaccagatcgtccacgagaccaactggggcccatcccatccatctcgccagttaaacgcctctggcgggcgtgggcctggcatttcttcgtggcttaggattttccccccctttttcgtgagcctttccttccgacgttgtaagaaactgtgcagggctagaaggtggggatgagggaaatggtgagagcaatacccagaggtaaaagctgcagacttcgctaggcagaaggtaagacactgtgatactaaggtggcttctgccatctcaggtcagtgagagggcatactgggaagccctctggagtgggaagacagtgccgctgttgagacaagacccaggactgggccggggactgtcccaaagggtttctcgtcataatggctgtggaagggtcaaccattaccagccggatcaagaatctgttgagatctccatccatcaaactgcgcaggagtaaggcaggaaaccgacgagaggacctcagctccaaggtgagtcctgttgggatccacctctttccaaacccaccctctcctgctccatgttcctcgttaaccttcctgtttcttgggaaagataactagaagcccttgttgactctaaaggatcacatatgatctctgcaggcaatgatttggttttaggttgaaggaaaaagagcagcaggggtgggcatgctgagattcatccatgagaaaaggtgaatagtaggaagaccacctgggttcaattgtggcctcactatacactaagcatgtgcttgggaagccagttgatatgctatgactcagtttcccttcttgggagaggacagtaggaacacataccttgtgaagggctaagctgtgactaatgtagctgcaggtgttaacgtaacagctggggttatgtaagactgtagtggcagaaagaaatatgctaaaacacctagtcagagttactggcttggtaattgctcttgcctacggtgaaaacaaattttttttgtctcttcaagaggctaactggagccttttggcttcttaggaataacatgcaagaagccagatatctgtcagcaaaacagttctggatggcccttgagcattgcttatctcattcactatatgccaagagccacatcccactcagctgcagatgatcctcagaggcaaagttcctttccatcgcttcacttgtctgtgttttggtccttatgctttttcaactaaataaaccccacaactttgggaatccagaagtagtcgacatttatttaatcccttgagggaatccagggctttactcccacaggatcagatcagattttgtgtcttattagtagcctgtaaacccaatagggttgtgaggtacaaggttgttacagggagaggcatttgagaccacagcattgtattgctttgcctgtatctcttcagtgatgagtaaatcccatgaggaatgatttagaatgccactgtacaaatggcagggttctgggaggacttagttcagccctgtgttccttagcagaactttgagtagatttggtaagaaggtgaagagctttcctgtatatttcagcagaagttgtgttgaatcacagtttgctacaaggttttgtgatggtggacattgtgacccttccaaggtctcttattcatcattgtttctattctcctgaggcaggcaaagaagcctgaaatgtagaaattgccttagatatgactctgttcattcttaatactgcaagtgctcttattcttggctggtagcttggcagtgaccagcactgttagagcaatcttctccaatctttggcctctttttctggccaggaatgatatatgtagtagaaacatataatgagagtttagccttcattgttaattcttactgtaattttggtctggaatccagaaagtatagttgccattctttaagacttccaatatcatccattattaatgcatttaacaagtgtttattgagtgcctatgaagtgtgcaatcagtgatgggtaaaacattacccttgccatcaaagagcttatggctagtcagacatgtaaacaattaaaacacggtgtggtaagtgctgctgtagaagtatgtgtacgttgttaatggaagcacaggggaggcgacctaagtcagttcagaggaattaggaaaggcttcacaggccaggcatggtggctcacccctgtaatcccagcactttgggaggccaaggcggatggatcactaggtcaggagttcgaaaccagcctggtcaagatggtgaaacctcatctctactaaaaatacaaaaattagccgggcgtggtggtgcatgtctgtaatcccagctactcgggaggctgaggcaggagactcgcctgaacccgggaggctgaggttgcagtgagctcagatcctgccagtgcactctagcctgggtaacagagcaagactccgtctcaaaaaaaaaaaaaaaaggaaaggcttcacagaggaagggatgcttgaactgtgagtcctaaggcaggtggagaagagctctccaggaaaacagtggaaaaggggcatccctggcaagaccatttaccattccctgtttaaaataggaattcagtgcttcagactgctttagatggctttgtctgtcctgaagctgtgtatgaaagaaatacttagctgaagttgaatgacccttgaatggtctggcagcaaaatgactggtgcatatctttagcacccaagaggagtagctgtctttgtgcgcccaggaccctagagatgccagactccccacactccttagtaaaaggtctctacctgagattattctaaaagcctgccttgtgattactctagtgtattaagctctgtgagttgctctaacatgtggtggctgtgagtaatcatgataacaggaaatttgtgattcatggatagctaattctcaaataaaatttgaagacaaaaaggtacatgccccttttggggggcaaagaaggaaatgtcagaaagcttttatgcagctcttacttcagatggcctcctgctttgaattatactgttctttctatctaaagtagccttctcctttacaccaaattgtacacttatttttaggtccaattctgtatttatcagagccacagggctttctgtgactagtcccccaccttgaaaccaatatcttattgttattttatgtatgtcttcatttcctaaggatcggggtcatgctctttatttcctttacatcacaccgtttaggacagtgtaagataggcagtaagtactaaaaaaaataaatgagactaatttaaagatgtcaaatatagtgcgggataaacttggacatccaggtgaataaaataatcaggaggaatttatgacctctttagaagagagatcaaaactacgattaataaaatggtgacaaagaagtagagatgcagcctaattaggtgtgaagaacataagagagaagaagtccacgtatgcagaaagcagtgctcagtaaagggttcttaattcaggggagacctagttaaaaatatggctaaaagctggtgtgagagagccagtggaggtggagatttaagttacatcaaagagtagatgagtgctgagatttttattaagctttttcagagggaggggagtctcttcagtggagtacattggaaaagactgatttaaagttttatgctaaatcagcttagtcttggtgaagtgtgacttgaagttatcagtaaatacccaagttcaaatcctgtagacttgtcatttcctgcctctcatctctaagttgggctgtgttttccttaagaagcaaatgtatgtgttcttgatagctaaccctcctcctctgaaagtttctgaaagatttttatgtggagggagctgggcttgttttcaaggacaaaggatagaaatggaccaaagcccagcaggcaagatttaagttagggttacaaaaggattgtctgtgctggagggttgctagatttttaaaaagtaactgaaggaggtattgagatcgtcctcctccttaagagccattaatctgatctaggttatattattccttctggaaacaatgggtaagatgactttcttctagttgtgtttttttaattgtaaatctaattcttctttctctatttgtttccccaagtttttttcctgtatagttgtgtggtggtacttcgagccttttgagaagtgactctaagaagagtttggttgggtgggtttcatgaaggagaaaaagtggcaatactctaatttcagcttttgctcagtgtttgaacgcatatatgatttggtattggggaaacatactcatttttttcgagacggagtcttgctctgttgcccaggctggagtacagtggcgtgatctcggctcactgcaaactctgcctcccgggttcaagcgattctcctgcctcagcctcctgagtagctgggattacaggcgcgtgccaccacgccgggctaatttttttatttttagtagaaacggtgtttcaccatgttggtcaggctggtctcaaactcctgacctcgtgatctgcctgcctcagcctcccaaagtgctgggattacaggtatgagccaccacgcccggccagttatttttgttttttgtagagacagagtcttacgatgttgctcaggctggtctcaaacttctggcctcaagggctcctcctgccacagcctcccaaagtgctgggattacaggcatgagccaccatgcccagcccctgcctttctgagtagctgggactagtggtgcttgcctctgcgccaggctccagtcatttcttagtgttcaatacacacgctctgagttctccacatagaatagatgactaagagtggatgtccctgtggccagcagctatgcccctcaccagcctttgtgaatgaccttcaaagctcttgttgaattttctgtctctgaggtctcttgaaataaggcttgtgaagtgtcttgagatcctcacaacaggtggtatacaatgaaaaatgtcaatgttctcctagttttgtttctttgatcaccatttcatccctccttccggtgcctgcagctgccctcagccttcaaagtgattctcactggagagagaggatgcttctctccctggacccaacacctcttcatttactgtctaaaaatagcccagcctcttcaggctgggagttgtctttcgaaacctcctctcacctacttggcctcactcatttcaaagtggaagagcactactgctttccaagtttttctctctttcagtttgcaatttagggcaggttcccttcttggatttgagtcaatgtcttatttcctgctggtattttgaatgtctttcatttgtcacctgtgtattttcatttcttgactgatgaaaaaacaggtagaaatgaggcttcagcctgacatctgtaasctccccaccaaccctctgagtctgaagttgggcttgatgctgttatcactgaccctttgtttggagaaaacagtccaaggtttgaaattgggkctatgtttattcaaactaagcttctctgagcacatggtctgtcccactcatcctcagagtatccgttggttttacttcatgttcagactgcagtgttgttaaagaaataaagctacagtgttttcagaaggatttgttatattatacttcatgttcccactgctccaggctaagcgtctcctctgggctccattgtttaatgcaggacaaagccaggttttctggcagcttccttttcatagcaattctcagtagaggtatagaatgagacctgcctaccttcttgggtgtttattaccccatttgtggattttactttaacttctgttaccttaaaaaaaaaaaaaaaagttggtgaggaaggcaagaaataaaagtgagtatgacagccagactgggtagtgtggatttttagcgttggtatttttgaatgtccagattttccaaatccttccttccttcctttcaacagttatagcaacaggtccagtgcttcttcattggtcacattattttcctctggttttgaaggacacttaacagaagaatgagtttacagtatggatagctcctcctagatttcaagggagtaaattcccccctctcattttgtcacaatgtttgcaatgctttttttttgctttttttttttccttttttcttttttgagacagagtctcactctgtcacctaggctgaagtgcagtggcgtgatctcagctcactgcaacctccacctcccgggttcaagtgattctcttgcctcagcctcycgagcagctgggattacaggcatgtgccaccatgcctggctactttttgttttttcagtagagacaggatttcaacatgttggccaggctggtctcgaactcctgacctcaagtgatctgcctgcctcggcctccaaaagtgtgcaatgctttttttggttgcttccctatttggtaaaacaatgctgtgggtttttttgtttttttkttttttcttgctgggattttaaagtttatatgccttatctctcctcctaaaactgtaatgaagctaaagatattttcctttccctgctatgccgggcatggtggtgcacacctatagccccagcatcttaggaggctgaggcgggatgattgctcgagcccaggagtttgaggctgcagtgagctatgatggcaccactgtattccagcctgggcaacagagtgagaccccatcttaaaaacaaacaaaaactgtctgcccctctgtttataattgagattttaatttacttgaagatcttagaacaaccctttgtgaaaccatatggctgatttttttttttccactttgtcaaatgttcttttggagaaatcctgagaagaaagtttatttggtggttcaggatttgagygttgctccttatttatcacagttctcatcagcctttgagacccatcttcctttagtggctcttctggtcttttcttcataagtttggctgatgctgttacagatgctagcacttaagaaaacaagactttaaaaaattatgaaatacaggccgggcgcagtggctcatgcctgtaatcctagcattttgggaggccgaggcgggcggatcatgaggtcaggagatcgagaccatcctggctaacacggtgaaaccctgtctctactaaaaatacaaaaaaaaaaaaaaaaaaattagctgggcgtggtggcgggcgcctgtaggcccagctactcgcgaggctgaggcaggagaatggtgtgaactcgggatgcggagcttgcagtgagctgagatcgcgccactgccctccagcctgggagatagcgaggctctgtctcaaaaaaaaaaaaaaaaaaaattatgaaatacaacagacattaagagagtgtacaaatataatattgtattataaataatgataaatgatttccccgtgtaaccactgcccaagtgaaaaaatagaacaatggtaaggtattggcagtttctgagggacgtgatgcgaatgttgtcatcagggtgggtgaggatgtactaggcactgtgctaagcattttacatatactatcttattcaagttttacagaagtctaccataaatactattaccaccccattttgtagttaagaaaactaatgataagagaggtcaggtgagtagctggtagttacatagccagtgagtggctaagcaagaattcaaatagaggctttctgaactccagggcccacacttaatctttattctgcattcctcccagggagccttcatgtgcacagcatggcactgactgcagaagtgtgcctagtattgccatagtcaaagggcacatcatgcactcagcttagaaaaagggacagttcccaaagagggggaaaaaaaagggacagttccttaaaaaaaaaatactttgtccccaacattccttataaaagtcaatttaatgaatttctcagactattattttagatccatcactcagtaacccttgtccatctatatccktactcctcttcccacctccagctccagatttcctgaacttttgtttctgctgcctgttcttgtcagaaactgtgcaaccttggttctgtgggtatgtgaatgtcaggttggcagggtgcagctgtgtggttccagatgaccagaagccacaagcggttgctgcttctctcttgggattggttggggagtgaagggcagaccgacggatgccttggttgtttttgtgtgtgggtatcatggggcttcaaactgttgtgctctttgttggctggttgattttgtagctcatgctcttgaggtgctctttcaggtctctccctgttttcctctgaattccactgttttgttatctcttgttagcatacaactgaccttgtttttgaagctgtggagagtagctggtggaaatacctcttccagttgggaaaaaatggacttaaaatgtcccatgtccaggctgacctggatgatgacagttggttgatgagttaatttgaacatgagcagaaatgaggtcacttgcctgcctgactccatgtggccatgctggctccaggttgcaaagttctttgagcaagtaccttgtcttgcctaatctcgaatgtctgttctttttatttcttatctcaaataggcattgtgataacattataggtgcaaaagtatgaggtctaaaggcctctgcttccctgtactccctcagtttgtcctgagcagagggagccccaagccagatggattggatggagaacagcccataggcagtttgcagttgtgggcgcgtagctgggagcatgctcagaaactgattcttggcctcacgcctataatcccagcactttgggaggccgaggcgggtggatcacgagatcaggagatcaagaccatcctggctaacatggtgaaaccccgtctctactaaaaacacaaaaaatcagctgggcgtggtcgcgggtgcctgtagccccagctactcaggaggctgaggcaggagaatggcgtgaacccgggaggcagagcttacagtgagccgagatcgcgccactgcactccagcctgggtgacagagcaaaactccgtctcaaaaaaaagaaactctgattcttgcacctctacgctactgctttggagaaaagcaagcagctgcttgtcaggactaaacttgtaacatgcaggcctacctccattaccctgacattcattggttggcttctgtttgagagggcacagtatctttgtatgccatgattgttttcatataacrtaataacctgctgctgacttttctcaacatgtcctttctgcttatgatgttctttctccaggctgctttgggttctcttgtaaggcccgtacagcagctgtcactgagatactgcctcatgacaaacctagaactggctagtgaaaagagcttctcaagagttaatatgagctggacacagtggcttgggcctgtaaccccagctactctggaggctgaggcgggaggatcacttgaggccaggagttcaagactggcctgggcaacatagcaagatcccatctctaaaagcttttttaaaaaaattagctgggccgggcgtggtggctcacacctgtaatcccagcactttgggaggccgaggcgggtggatcacaaggtcaagagatctagaccatcctggccaacatgctgaaaccccgtctctactaaaagtacaaaaattagctgggcgtggtggcgcacacctgtagtcccagctactcgggaggctgagggaggagaattgcttgaatccacaaggcaraggttgcagtgagccgagatggcgccactacactccagcctggcaatagagcgagactccgtctcaaaaaaaaaaaaaaaaaaaaaaattagctgggactttgggagaccaaggcgagcagatcgtttgagtcccagagttcaagaccagcctgggcaacatggcgaaaccctatctgtaaaaaaaaaaaaaaaaaaaaaaaaaattagttgggcatggttgtgcatgtctgtagtcccagctacttaggaggcatgacgtgggagaattgcttgaggctaggagttctaggtctagactccctcccagggccattgtgagatttaaatgagatttaatgaatttgaaaacacattgtaagttttaaataacttcacagctataaggggttgctaatactatcagtgtctgagatatctagaataccaaggaattttcttctaatttgttagcaagattttattccttcaagtttccatttgtgagaggtccttttttgtaggctcgcctcttctgttccaacatttttaatcagcctttctgcatggctttttattgtgaactatcttcagtacctttttcttgccaatattctaacttgtatcgataatactgaccaaaaggaaggcttagcagaaattctttttgatactaacttgtgtgtaatgtatttcaggactatgactatgattttggggggaatttttttaaaatgtcaaaccagtgaactccaggagtagaggggagtcctaattttttctttatctgtttagaaaccaccggggtgatgagcatgctttttaacagcaaaagcttctctagatgtagaaataattttttttcttttgggtctaatttatattgacaaataatttgagaaatgaattagccttttgtctaagaatttacaggccaagtgaaaatgtgacgtgtgttaattaaataacccgttatttaagtttctaatgttgtgaccagagtaaaataatctattaaaaaatttttttttgcttaaaaaaataaagatacatgaagatgtgaagatatagrtgcaatcatacccttacactactggtgaaaacatacattaatccaactttcttagaggacaatttggtaatatctattagaaaattttgcatattcataccttttgattcagcagttataattctggcatcttattctgtgcagacactcatactgcacgaaggtgtatctaattgaattttttggtgttattcataagagtgaaattttgaagttatccaggtacctatgagtaggggattggtgtacatcaataagatgaaattccttgtacctgccagaaagaatgaggttaatctatatgtactgatgtggaagagtatacaagatatcttgaatgggggaaaaaagcaaattgtataatacttttttatgttaatgattatttatatttttgttaaaacatatatatatgttagtatatgcatactaaaaaatgaggctataaataccaaacttgttaatattggttatctcagggagggatagtagattatgatggactttcactgtctccattatatatttctgtaatgtttaaatttttcacaaagagcctgcattatttttgtaagtagaaaaaaaataaagatggaagtctctccaatttaaacatgtgtatttcatatgtaaatctaagatgtttaaaatttaaaatccgtatgctcattttattaaagcagttatgcacaaatgctattgaaaaatatatctggtatagccgggcgtggtggctcacacctgtaatcccagcactttgggaggccaaggcgggcggatcacaaggtcaggagatagagaccattgtggctaacacggtgaaaccccgtctctactaaaaatacaaaaaaattagctgggcgtggtggcgggtgcccgtagtcccagctactcaggaggctgaggcaagagaatgacatgaacccggaaggcagagcttgcagtgagccaagattgcgccactgcactccagcatgggcgacagagccagactccgtctaaaaaaaaaaaaaatatatatatatatatatataggtataataagctttttttgttttttaaagaagtaataggacataaaaatattttcttgaagattaatgattagcttgttgaatttgagacaattcatttccttttttctttgacattgagtcttgctctgtcgcccaggctggagtgcagtggcagtatctccgctcagtacaacctctgcctcccaggttcaagcgattatcctgcctcagcctcccgagtagctgggattacaggcgtaatcctgacctcaggtgatccatctgcctaggcctctcaaagtagatttttttcctgttgggattacaggtgtgagccactgtgcctggccagtttctaatatcttcaaaaatatctccttggttagctttgataaatattttttgatactttttgaagtacatgtgctttctgaaaagatttgttacaactaatacagaaaagcataaagaagaagaaaaattatccataattccagcacctagagataacactgttctgattatcaagggcatttaaagctctttttgatcaacatagtcgcttttattttattttatttatttttgggtggggggcagggacagagtctcgctctgtcgcccaggctagagtgcagtggtgtgatcgcggctcattgcagcctctgcctcccaagttcaagcaattctcctgcctccgcctcccgagtaactgggactacaggcacccgccaccatgcccagctaatttttgtatttttagtagagatggggtttcaccatgttggccagaatggtcttgaactcctgaccttgtgatccacccacctcagcctcccaaagtgctgggattacaggcatgaaccaccacgcccggccgcgaacacattctttaattataacttaggtcagatttgtgaagagccatgccatgcatgtctttactaaagtcagggataagagtgttctgtttgtaatcatgtatggcacatggattatgttattcaggccttcctctgtctttctggaaaggcatcagaatcttacttcctgccacaacttctaggggtggcattgataaatagttgaagaattccctaggaggtaaaaaaaacttaataagattaaccaaagagtattcataaaaattttaagttttttattttaattaattaattaattatttcccaagacagagtcttgctctgttgcccaggctggagtgcagtggcactatctcagctcactgcaacctccgcctcccaggttcaagcaattcttttgcctcagcctcccaagtagctgcgattacaggcacgtaccaccatgcccggctaatttttgtattcttattagagatggggtttcaccatgttggccaggcttgtcttgaacttttgacctcgtgatgcacccgcctcggcctcccagagtgctgggattacaggggtcagccaccgcacccggccatgattttaagttttttaaaaatgtttttgagtatttaaaaaattgattcaacaaatatatattaaacactgtgccctgtgctataagcatacagttatatgagatacaacttctgccctccaggagtgtgtagactggtaggagagataagacaaatccataaagaatagaagttctttacaaggttctaagcagtgcatgccatgtgaatgatgcaaattaggtgctgctgtaagagtacggaggaggaaggaatcatttctggccaggcgatcacagaaagaatcagaggggatgtgacatttgagctggtcctcgaaggaaaggtaggatttcagtatagggtagtggaagggaaggttagaagaagcatatgagctataaagccccaaggcttctttccagaaaaatgaatagtccagattgacagatgcacatgattcaaataggtgagtagtaggaaatagaattatgagaagggcagagttcattaatgctaggctaaaacatttatattttatttagttgacaggaaggagtgactgaaaaagtttttgggcaggggagaaacatggatcaaagctatgctgtggaaaaattacacgctgatgggttggaggaggggaggaaagagtctatagtaaggaaattgattagaaatccattgctatatccaggaatgtgttgaaggcctaaactggggtgttggcatgaagtgagcattttgtagagaataggttgaggaaaccttccttcttccctggagagtttcatggcataagttgtgtgattgtaggggcactgagagccctccacactcccctttttgttccaggagacacattcactttgcacacttagtccagataaggaacagttaatattctcactggttacaaaatagaaaagcaagagtttaagaaaatcaggtgtgtagaggaattagatccttttgatgaccagatttttagctcataaagctttgtttgtggttctggttttgctgtagtactgtagagaggactgactttagaggaaaaaaaaaactacaactccacccccacccgaattctgcatgcttacattgagataactccttttcttgcctttctgataactgtggaagagaaagagagggcagaagggctgtaccaggcactgtaaaagctgttaaatctgctctctggacttgggcacgtgctgatgactgtactattaatataactgggtccttcattccctctccctctagtctgacgccttccttacctcttcctccatctgcatacgaaatcagcttctcctgcttctgaccctgcagtgccagttggcttggaaatgggtgtctgctgtctatatttggctatagcataggctggacatgggcaagctctgaccacatgggatactctggcattaggaagaccctccctctttcttggaaccatctcagtgaggagaggtcagaacccattttttagacccactttagctactgataagttctgctaaatttttttgttaatgttaaatatagcatgaaaggtctctattgtctgacttgtggccctctgccttctatcttggctctcagacctgtccctgatgcctgcacaaaggcatagtgacttccctgtgtgctgtttcagaaactgtagcattctgttggtgctagagaatttgaactctctcctcaaagcaccatggtttctggaaccagacagccccaggtctaaatcctggttcttccactcactacttactctttcatgtgtaaaatggagataatactagtccttcatgaagttgtcaagagtattaaatgagatgatctgtgtgaagtggttagaacagttattgctacaaagtatacattcagtaaatggcagctgtagatcctctctctgccccagaccttttgtacccccggtgcgttcttgtaaaatacttggaacactgggactaacccaagagaggctaaaattgggaaatagaagggcaaatgccttagtttagtagttcccaatctggtaatcattagaaccacctggagagctttaatatgcagattctcaaaccctactccttatcttttcattcagaatcttgcagtcaggggaagtggatagggtggggatagagtagggactgttgttacatgaaaaaaaccttaagttctttgggtactttgttgactggccaggtttgggaacttttgttccagtcttcttgtccccaggggctgtggctagcggctttgtcaggttaccctttccaagcagtggcaaatgcaccttccttagaaactaaggctgttttaatcttagtctggagaattgactcagctccaactaattctaaaccgttaagcaggataccctttttttgtttgtttgtcacattggaagttatttgtttctgggagtctttgtggtatagatggaactctacatcagccaaactgggtagagaccaggagcagagactagacccaaggtctgctctcttcttcagctggccattgtgcccctgcctacctctgaccagatggcactttgaactttgaagcaacaggaatgagttagcctgggcatgatacctgcccttcctccccattcccaggtctggtcactgggtcyctgccctactgtctaagtctctgcacaaagcctcctggccttggcttcttctgtggcttttgcgttaagtggcagttctcagaatctggtagagaatctgctttgtgagattagagtgtagtgtgtgggcaagagacaaatatagttcttaacctgcaggaagggaggggaaggcgaagagtgctctgccttggacaggtctctgacatgcttgtttatagaaacagcaagtccatggtttggctggaatgacttacaactcaggtatttataacttgaattgagtgggattgagaagtgggggaagggaaaagggggaagaaagtagctggtggcaacaaaacatagcaacaaaaacagatctttttcctcacagttgctggggtttctttaccagtatgaggtcagccaaatcctaggggaccctggccttttgtgactctggcctcttagttctctatctcaagggagcagccactcccgtgccattgcagacttcctgtagtggtccctcacactaaaagggaaagcatttcctgccaacttctgttgtgggtccaagcaggaagcccttcctaacagtgccactgtcttggctccacctggactcgcttccattggctagtgcctgtcctctagctcgtgaactgatcagatccagggacttgagagagcagaaaagcttcgaaggccctgcccagtgtctaggattgtatgtttagggctctgggaccgcttgggatcttatrctgtgccacctctgttgaggatggctctggactctggagagttctgtccttgcctccttcatttctttcagcactcactattaatcacccctcccttctgggagctctccacttcactggcttcctggttctcctcctctctttctcactgcctgtacctcatcttctccatgctctaaaaataggtgttgtctgaggttgggagtttgagaccagcctgaccaacatggagaaaccccgtctctactaaaaatataaaattagccaggtgtggtggcgcatgcctgtaatcccagctacttgggaggctgaggcagtagaatcacttgaacccgggaggtggaggttgctgtcagccgagatcgtgccattgcagtctagcctgggtaacaagagtaaaactccatctcaaaaaaaaaaaagactgcaatctgcaggctggaaactactgttctatctagtatgaatgagcagtcctgtctcttgcctctacgccacctgttttttccatctactttaatgagagccagaagagcacttaaacacgtggctttattctttctttctctcctgggaataggctagtatgaagttacccctttatcttattaaagtgagagatgattttgctggccctctttctctctggaggatatgatagtgctctgcctagttcctactgggagtggtgggtattcaagccctccctcacattatacttgtagtaattctgcctccagtagccttgcttcaggggaaagatgacacctctgtcaggttggtatacgctttcttccatctcaacactgtccacctgccaaagcaaaagctgggtcacagtttgggtattctccatgcttcaaggctgcattctgggtgtggaggagctcactgtagagaaccaagtgggtcctctcttcttccttctgagtttccacttgtgcatgaagcagtgttcctagagctgtagatggatgggtcagggtgccagctgcctgcagcagttgtgtcccaagtcactgcccagacacagttgcctggactggtgtgtctcctgggctgtatttcatcggcatttgggccttgaaggtttggagctgaagttcctgtcagaactttgggctgaatcccagactttatggacagtaattttctcgcagggcctctttcctaactcactttcttcaagcgatccttgaggccagaactctcacttgtgggcttgcttcctcatgtggaaagatgctgtagtatttagaggggtgggtcattggttctcagagtgtggtctgagaagcctggagtccccaaaacccctttagggggtccatgatgtcctgtttccaactacatatccaaatgaggctaggttttcttcgcatacttccactagataatgtcaggacagattgaatgcagatgcagatatgagaacccagctcccttctgttaagccagatatgaaaaaggtttgcaaaaatgtaaaacagtgccattcttctcactaattatttttgttttggaaaataaagttatatttaataagaacgctaatatgtgggcygggtgcagtcgctcacgcctgtaatcccagcactttgggaggccgagatgggtggatcatgaggtcaggagatcgagaccatactggctaacacggtgaaaccccgtctctactaaaaatacaaaaaattagccggacgtggtggcatgtgcctgtagtaccagctactcgggaggctgaggcaggagaatagtgtgagcttgcagtgaggcaagattgtgccactgcactccagtctgggtaacacagtgagactccgtctcaaaaaaataaataaaaataaaaaaagaatgttaatatgtaatgggtttattgttatttctaaatgatttagtaaatatttttaatgtttcagattgtgatttcaaatatagtaaatattgatagacataacccgcataaacagaagctctctgttgtccttgataagctctaagactgtgaagagttcccaagaccaaaaggtctgagaatctctgggctaggtcctgcttgataacaaaccacctcaaaaatccccctggcttaagcaacagtttatttcttgctcatgctacatattcagtgaaggtcagcatggggacccaggtcaaggggcccatctcatcgcctgctgccgtgcttagcagtcagaaagaggggtactcacgatggtggttctgtgacatgtcaaagaattatacaaatatgtagctgcataaggacagacatgagaaacttaaatacaaacacagatatttggccgggcgcggtggctcactcctgtaatcagcactttgggaggccaaggtgggtggattgcttgaggtcaggagtttaagaccagcctgggcaacatggtgaaacctcatctccccactaaaaatacaaaaattagccagacacgatggtgggtgcctgtaatcctagctactcgggaggctgaggcagcasaatcgcttgaaccctggaggcagagattgcagtgagctgagrtcaccccactgcactccagcctgggtgacagagcaagacttgtctcaaaacagcaacaacaacaaaccagatgtttgagttcttcatactctttccctccacattgccagatcagtgagtgtcaaccaaatgccttgaggctagagagagaagtggggatgtgagttatagaaggatgttgctcataaggtcctgagccccacaccacatcttccactatattttttctctctttttaatatttgctatgcaatatttaagacatacaataaagacgtggaataataggcaatgtgtgcctaccatcagcttaagaaacaaaatgttacctgtaccattaagtgccctttctgcttgtcctcggtcggtcatagcctttctgtcacaaccagttttagatactttgtggagaacaactttattggtctgaaataccccagttttcctgggctttcactgtttctgaagcctctgtaaggcattcatttattccttaaatatgtatcaagtgcccattgtatgccagagactgtttaaagtgctgggaatacatccatgggggacagcaacctaggtcctgtcctcaaagagctcacattctgatgggacagacaggcagtagtaagtacatggacagagatgtaatcaatgttgggttgttacctgcctctgagctatgaagaaaagtaaggctgggtggccgggcgtgatggctcatgcctgtgatcccagcactttgggaggccgaggcgggcagatcacttgaggtcaggggttcaagaccagcctggtcaatatggtgaaaccctgtctctaccaaaaatacaaaaattagccgggcatgatggtgggcacctgtaatctcagctgcctgggaggctgaggcaggataattgctttaacctgggaggcagaggttgcagtgagccgagatcataccactgcactccagcctgggtgacaagtgaaaccctgtctcaaaaaaaaaaaaaaaagaaaaagaaaaaagaaaaactaaggctgggtaaattgggtataagattatggcagtaaagctagtctggaaggccctctctgaggaagagacctttgagcaaagacttcaggaaattagctttgtgcatagctgagagaagaactttttagtccaaggaatggcatatgtaaaggacctgaggctacaattggcttaaggtgcttaaagttggtaaggtggctggggtggagtgagtgagtgaaggggagggtgtaggaaatgaggtcagagaggtaggtagccagaggcctgatgatttggggccttgtaagccggggtagagtatttggatttgaacttgagggagatgggaagccatttggagggttttgggcaaaatgatgacatgatttcatttatattatattttatttttatttatttacttatttatttatttttgagacagagtctcgctctgtcgcccaggctggagtgcagtggtgcaatctcggttcactgtaagctctgcctcccgggttcacaccattgtcctgcctcagcctccccagcagctgggactacaggtgcacggcgtcacgcccggctaatttttttttgtatttttattagagacggggtttcaccctgttagccagcatggtctcgatctcctgacctcgtgatccgcccgtctcggcctcccaaagtgctgggattacaggcgtgagccaccacacccggcctctcatttatattttaaaagaatccctgtgacctaccatgtggagaaaagactatagggggtaaggcctgaagcagggagagcatgtgggtgttacagtccaagtgagagataatagtgacttgaaactaagtggcatggtggtaaatagttacaggctctctgagaggggaacaaactgtgatttggaagatttgtgagcctttgctgatttccatggtgtaagtcgtcctgcggtggtgatttcagggccactcgtttgctagcaccgaatgtgggaaaagttgtgcccagtcagcattcttgagttggtgcaagccagctccagcacaccaccgattgaacttgaatgcattgaacctggggtgtgtttgcaggggatgttcaaatttgtctccatcttctagggcaggtggaagctctaccaccttcttggaaaggaggcgaggaagaaggttatcagagggagagtcagtttatgaagtccatcatgttgaagccttgcaaaataagcatagatgttggaggccttgcaggaactctggactcttagatcctttgaaagtggagctcaacgcaaaacctccctgcaaacaggaagctggtttgagttaagaacataaaataaaaaccagctgatgcccctgaatgttttcccctgctcctccccttccacagagccaaaggaaactgcttttccccccccttggatagctgcttagaaagccagaaaaagccaaaaacataaatcctttgaaaataagccaagttttgagcccaggcaaactcctgcctgtggggttttcctagtgcggaagtatgttccactgctgagagtcctaggaggaaaatgactaaggaacacaaaggtgccggtgatcagagcctgtctcccaggcctggcagaaagagatggtccgtagcagggtttcccaaactagagcttccagcccatttgtaggtcatgaaatcagtaaagtgggccatgaccagaattctttttaatgaaatggaatataatagaaaatagagtatattgtactctaggattaacaatagtatattgttttgtgaaactttcagttttatgcatatgcacacacgtctctatatactggctcatgatataaaatgtgtttcttactgtgggtcatggccaaaaaactttgataaacactggtctttagagtgttagtagcccacgtctccttcttgctttagagaattaattctctttggaattggatcatctacccacaaaacacctacccaaattcctgttagaaagaagatcagctgagaaccaactgacttggtgtaattcttcggcaccaacactgaagcatgagggacggaagggatcaatgcaaatttaaatccaaaggatttacctttaatcagattaccaggagaaaataagagttgagcagccctttagcttactacacttgattttgtggcctctcccagctgtgtgggtaatgccagcctggggccgttctctttcctgtctgcagaaggcggtgggtgtggcaggaatgtccctaaatatcccctcctctgggagagttgaaggttcagtgccaggatgactggtgacttaaactgagtatcccccagacttccccaggatgattttgttgctctccagtcagtaataggtgactagatcccagtggttcattaagctgagaaaaagtagaggaggcataagttaggggaacctatcaagaatgtatagagaaggccaaagttactttgttccacactaggtttagtgcctcagatcggcgcaagggtaattggcaagtttggtgcttgccaggtggctgtgggttgctgctctgtattgaaaccacatctaccagtgagcagacacatgttagaattcctcatctgcatccccaagatacacagataaccttggggacctttctggggaataggtattaaatgtaacatctcaggagacttattttggtcttcggccaccacagggcatttccttccaacctaattcaagctaaaacgatcttcagagataagaatttaaacaggttcagccgggtgcggtggctcatgcctgtaatcccagtactttgggaggccgaggcgggcggatcacgaggtcaggagatcgagaccatcctggctaacatggtgaaaccctgtctctactgaaaatacaaaaaactagcagggtgtggtggcgggtgcctgtagtcccagctactcaggaggctgaggcaggagaatggcgtgaacccgggaggtggagcttgcagtgagccgagatggtgccactgcactccagcctgggtgacagagtgagactctgtctcaaaaaaaaaaaaaaaaaaaaaatctaaacaggttctctaggagtactttttgagatggcgtctcgctgtgtcacccaggctggagtgcaatggcgtgatctcggctcactgcaacctccacctcccaggttcaaatgaatctcatgcctcagcctcctgattagctgggattacaggcaccaaccaccatgcctggctaatttttgtatttttagtagagatgaggtttcactatgttggccaggctggtctcaaacttctgacctcaagtgatctgcccaccttggcctcccaaagtgctgggattacaggcgtgagcaattgtacctggcccctctaggagtacttttaattctgcggttggagcaataagagagaaggagaaactccaaaactgtcctaattgattctgagcctcccctctctagaaactggcctggactaagaatagaccgccctgccacaagcatccaccctaagtgtttctggtttacattgccctcttagggcctctgagactctcctcaggttcggtgttttcatagcagagtgctgtctagcctgttcacatgtccgtcctgcattctgaagccccactctctgagccaggggagatcagggacattcttgagcagagccagtgcagggagtgcacagtcctggagcaggtaaagacctggagcagcaagtgaaagacccagagcagaggatgacatggagtgacagcaagaggttagagggaagtctcaatctcacttggcatcrtctagcagaaagaccaatgaattaatttgaggttagttcgtgtgggtcctgaggcctgcagacagtgtggggtaacaatactaatgatgagagtgatgagtgtctcccgtggccgtgtcctctctgaatctctgagcattttatctttcatctctgtgggagttgcggcttartaataataattagagtaccctgagcatcggtgctttgtagaacacagcattaagccctgtttctgcctccttggagtgtagtctgtatgaactggcagacatttgggaggtggagccctctgacagaggggaagaacatgatagaatgcaaaggtcagggatattctgagtcacctaattgatacctaacattcttttggctcttggtaggtcagagtggcctttccttcatgcctgccaaagcacaaagatcagtggcctcacccaagtctcacagacccaagagtctagtctggggatcccaggctctagcttatacatggtaccttcctggttttggggaatgcttgttcctctgtggccatgagttatgctttaacgagttggtgttctttcctgtggtaccagcagactgagccctgccgaaaataggtgatgcacgctgggtttttcccgtgtgatcaagaagcccggtgggcagaacagaagaagctgcagaagtcatagctccattctcctgaaaacatgggtgtctggaaagtagccagtgcctcaggatggtcccaagtaccttcagcaccttcttcccaaacacactctgtctgtaacatgtcacttctctcttcctctaacaggtgaccttggagaaggtgctgggaattacagtgtctggaggcagaggacttgcctgtgacccccgatcaggtttagttgcttacccagcagggtaagtaagcgccttggaagagatcttgatgcatgggaatttatagccacgctagagcagttgggatgggcagggattttctggtatcttctggaagatagatacaggttaatgttttgttgtcatttttgtaaagagacgcaggaccaggtaaaggttctttgtcgggtgctgtcattgttgccatcctgtgctgcttttcagttatctaccccacctcccacacacagatttacactttatgttacacacagttcccagcaccatcttcagtaactaccttccagtcatttaaaaaacagctttattgagatgtaattcacataccatataactcactatttaaaatacccaattcagtagttttttagtatattcacagagttgtgcacccatcaccacaatcaaatttaggacattttcatgaccttgttcccttttttttttgagacaggttctggctctgttgcctaggctggagtgcagtggctcgatgttggctcactgcacctccgcctccgacactcaagcaatcctcccacctcagtctcccgagtagctgggactacaggcgcactgccccatgcctggctaattttttgtagagatggggtttcaccacattgcccaggctggtgttgaactcctgagctcaagccatccacctgcctcagccacccaaagtgctgggattacaggcgtgagccactgtgcctggccccattcctatcagtcacttttcattcccacccccaccttaccagaccttcatccctaggcaaccactgtctccattaatttgcctattctggatatttcatataaacggaatcaggtaacactgtatttggccttttgtaactggcttctttttgttgcccagcctggagtgcagtggtatgatcatggctgactgcagcctcagcctcctgccttagcctcctgaatagctggagctatgggtgtgtgccaccatgcccagctaatttttccatttttttgtagagacagggtctaactctattgcctaggctagtttcgaactcctgggctcaagcagtcctcccgcttcagcttcccaaagtgctgggattacaggcgtgagccaccacgcctggccagcataatgttttcagggttaatctatgtcacagcatgtatcgctaccttattcctttttgtggctgaataatattccactggatggatgtagcacattttatctattcttcagttgatggacatttgggttgtttctacttcttagctattatgaatattcgcctgttctagtcactttgagagagatcagtgccatagaagagaagtaggggagtggggctactattctttctcttgctgccttttcactcctctgctcctacaagtgggaaacctccaaccatagtttcttcaggcttctggagaaagcttggaacccctcctgcttctggctcactctgttccatgctgataggcacaggaatgtgaaaatgagtagcgctactgctgtacctttcttactctaccattaacttgttaatgcctagttcattccccaatgtaattttcatagcaacttttatagtttttatactagatacatgatttgcttagttttatcacctcatcaaaaaagcttcctttatcaggctgggcccggtggctcacgcctataatcccagtaccttgggaggccaaggtgggcggatcacttgaggtcaggagttggagaccagcctggccaacatgttgaaaccctgtctctactaaaaacataaaaaaatttgctgggtgtgatggcgggtgctggtagtcccagctgcttgggaggctgaagcatgagaatcacttgaacccaggaggtggaggttgcagtgagtgcagatttcgccactgcactccagcctgggcgacaaagagagactctgtcttaaaaaaaaacaagccaccaccaaaaaaagctacctttatcaatcaagtacagtcatgtgtcacttaatgatggggatatgttctgagaaatgtgtcatttggcagtttcgttgttgagtgaacattacagagtatacttacacaaaccctagatggtatagcctactacatacctaggctacatggtgtagccggttgcgcctgggctacaaacctgcacagcaggttactgtactgaatactgtacataatcctaagacaatggtatttgtatatttaaacatagaaaaagtatggttaaaatatcatataaaatatattttaaaaaggcacacctgtrtaaggcacttaccatgaatggagtttccaggactggaagttgttctgggtgagtcagtgagtgagtggtgagtgagtgtgagtgccagaaacattactgtacactttacaaacactgtacacttggccatactaaatttattttaaaaacatacattcaataatagattaacctaacttactgtaactttcttacattttataaacttttttttttaacttcttgactcttgtagtaacacttagcttaaaacacaaacacagtacagctatacaaaaatatctttcttttatcttttttccgagatggagtctccctctgtcacccaggctggaatgcagtggcacgatcttagctcactgcaacctctgcctcctgggttcaagtgattctcctgcctcagcctcctgagtagttgggattacaggctcctgccaccacgcctggctaatttttgtatttttagtagagatggggtttcgccatgttggccaggctggtcttgaactaatgacctcaagtgatcagccctccttggcctcccaaagtgctggcattacaggcatgagctactgtgcctgacccaaaagtattttctttttatcttctataagctttaaatgttgtttttaactttttaaacttttttgttaaaaacaaagacacaaacacacacattagcctagcgcatagaactacatagggtcaggatcatcaagatgtcactaagtgacaggaatattttagctccattataatcttacgggactactgtcatacatgcccttcgctgttgaccaaaatgttattatgtgacgtatgactgtacttattctatgccaggtactttttaagcactttatatgaattatttaatactctgagcaactattatcaccctcatattttagaggaggaaattgagatccaaagaggtcaagcaggccaagtgcagtggctcacgcctataatcctagcactttgggagggcaaggtgggcggatcacctgaggtcaggagttcaagaccagcctggccaacatggtgaaatcttgtctctagcaaaatacaaaaattagcctggcgtgatggcgggtgctggtagtcccagttactcgggaggctgagctgggagaatcgcttgaacctgggagacggtggttgcagtgagccgagatcgtgccactgcactccagcctgagcggctgagcaagactccatctcaaaaaaaaaaaaaaaaaaaaaaaaaaaaaaaaagaggttaagcaggcagggtgcagtggctttgggaagccaaggtgggaggattgcttgagaccaagaatttgaaaccagcctgggcaacatagtgagaaccctgtctctaccaaaaagtaaaaataaaaaaaattagctgggtatggtggcatgtgcctgtagtcctagcaactggggaggctgaggcaggaggattgcttgagcccaggaggtgaaggctgcagtgaactatgatcgtgccattgcactccagcttgggtgacacagtgaaaccctgcctcttaaaaaaaccaaaagggttaaggagtttgcttgaggtaacatagctagtgtgtgtaatggggttctaacccaagtagtatgactgtagagctctgattgttaaaatggcacagagtagggggagaccacactgtttttttttgagacagagtttcattcttcttgcccaggctggagtgcaatggcacgatctcagctcaccgcaacctccgcctcctgggttcaagcaattctcctgcctcagcctccagagtagctgggattacaggcatgcgccatcatgcccagctaattttgtatttttagtagagatggggtttctccatgttggtcaggctggtctcaaactcccgaccttaggtgatctgcccacattggcctcccaaagtgctgggattacaggtgtgagccactgtgcccggccactttctgcttatttttaacaaattgcttttcctctaagctgcctacctgccctttgaatgagaagagccccatttatgggcagctcagtctgtgcaagggagacttctgcccctgggtttggggtcagtgtctctcccaagtggtcctctggtgtttaatggctgcagtaagggtgctgtgggagccacacgggctctgcctggcaaaggctgggctaggctccattttcccctagagaagcaagctgatggaaagacctctctactggataagtttgtgcagcctgcctcaggggaattccacttgttcttgcctctgcctgggaaagccaggttccctcttgttggaggtggggctggggctggatgtagcacaggcaaaaaaggccttggggtgctgcttggtgcatgctgagacctgtgtccctgccctggagagtgtggagtcctgcccgctttcttcctcacacacccctggactccaggcctggcctttaagggcatgtgcttatgcatgtttatgagcaggtctcagcccagtgcatgtgcctgggagtcatgatccttccagatggtgtrcaggctttyctgatggaacctctagtaggtttcctaagcgtgtatgcttggcttaggccatccctgggcagtgcccctaatctgttccctgaccttttgatttcttagaacttgaagttgtctgtgcaaatggcttcttttctgggtgtttgagttttgctgtgttctagaactccctgatgtgctgctgtgatgttgggggccaccagattctgtgtgagcacaagcaggttcttcacctccctccttgtctcmctgcttttcttatctgatcatccttacactgcccccagcccccacgctcttgttcctcctgtgcctgttgctttgggagccagctcaggtatcctagaaacaaggagagaaacaaaactcagaaaattctctgaggcccggaggcgaatatcaaaccaaaacaaagttttctgaaaggaaatggaacagcacaggaaaggagggtgggcagtgtgtcaggcagaggtgggtaggagctccaggctgagcatggagcctgtcctagtggctcctacatcccttggccgttgtttccccacgggaagcccccctactagaggatgccagacagcccctttgagagacttaattgagttgaacacccttaattgagttgggccttttcctcagccagctggtggaaggttgatgggccttcaagcccagcacagcccctgtgcccctgtgcccctgtgcccagtcctgagaatgggtttctcctggctcctatgccagaatggcctgggtgagtgccctgcgcacagctgctcctctcccgctgggatgggaagtgtcccagcaagrtgacggggtgtatctggcagctaagaagagacctcttggttgatttaagtggggaggagaagagggaacccctgctctcctgaggaggccctccatttcctcagcccatgttaaaattgattctgagatcctcagctttgaagcattgcactgggtgtgacagaattctcctcctgaactgtgttctcgtgacacctgagctgaaggaacacagagctaccttcttacttgctgtagggtattcgccagggacagtagagagaccaggtgggcctgagagaagaaaaggttgggacttggtgcccaggatcatgcagtgtgttagcagacaggcctgtgacctcagtgttctgctctttccacctctacactgcccttgagcatcaaggagtcctaaatgcctgaggtacaggagaaccatggacctctccccagggccctcattcacactctgctacccaggaggttccttggcagccagggctttgagatcttgcccctagtgacttgaagacatattcacttgtttacaaataattactgagggcctatcgtctaggccctgggaaattaacagtaagtaaaacagaccaaaaataccatcctcacagaactggcagtctggtgtgtgaagatggatccccacccccagtgtaagttataagcgtgattacaaattgatgtgtgctttggaaacagtagaagcggtagcagtgacggaggtagggttgtaatgataaatagggctggagggcgacatttgagcgaggccagaagcccctttggcatgcttctgtgagtcattctcagattttacctggtctgaaagaaaacaattcaaaggcccagggtccctggttgaccttgtgtgtcctgctccctgtgtctgtgctgccccatgcatagctcatcccatctgggggatggagagtggtaggaggtggatcctatgggaatcctgggctctttgtggtagcagcaggcctggacctgtgtagggaagggggatgttgaaggcttggcccttcctgggcagtgggcccagcacctggcactggtactccacagcgtgactcccccaggctgaggccttacgtccttctgtgagagtgagcagccgccctgcaccctcaggtgctgagttgcaggactcagctgattggtccaacccagcccttggcatgtggtggatcccagccagcactgagcaagggctcaccctgctgggcagggtcaggggatgtggagagaaagattgatacaaactgtgccccgcactcctctccccagctgacctaggagcttgctcagagttcaccaagaaggctgagagggctccttggtgcttttgagaacaggtcaggagggcctcaagtcaagcacacaaggagccctggctatgctgctctcacttcagcatctgcgttatcgtccctgcatgtgtagctgcgaccgtggttgcatgctgtctttctcttgttggatggcttccaaatatcaataattagaaataaaaatagttgcttaagggatgacctctgtgtgtttccttttcttgcttagctcttccatggcacacctgagaatttcttaggctatactgggggcaaggggatgttagaggagggagaaattgcctcattgcctctagccagtcatccttctatctacgtagtgttcctacacacacacacatgcatcattcacccttcttccaccatggagctgaacataggagaaggaggaaacagaggatattgtgtcccaggaagactgagtttgtatgcagtgacttggaaagtgttttaagcagtctgatgcactaccctttaaaggctgaaatgctgctttgggatgagaattaagggaaaactcataaacttgcaaatagatcccagtttttctggatttggaatatggttggctggattatgcatcgagtcaattcaattagatcaactctcagctgaagccctttactgtggttcctgtgtaactaatcagaaggctagggaacctgtccccattcagactagagcctttgctggagagaggagtctgtagagggcctcaggtcagcacagattgcaggaaggttcagaaaacgttgtttaaccactgagaactttctgggctctgaattcatgatagtggcaggcctggggctattacttttcatatactgcataaagtattaaaacctaaatatctaaatttggctgggcacagtggctcacgcctgtaatcccaacactttgggaggccaaggtgggtggatcacctgaggtcaggagtttgagaccagccgaccaatatagtgaaatcacatctctactaaaaatataaaaaaattagccaggcttggtgatgggtgcctgtaatcccagctactggggaggctgagacagaagaattgcttgaacgcgggaggtggaggttgcagtgagccgagatcacgccactgcactccagcctgggtgatagagtgagactccatctcaaaaaaaaaagaaaaaaaaatctaaatctgtgcactttgaactcttataattttctttctttctttcttttttttttttttttttgtagacctagtctcgctctgtcacccaggctggagtgccatggcgtgattttggcttgctgcaagccccgcctcctgggttcacgccattctcctgcctcagcctccccagtagctgggactacaggtgcccgccaccacgcctggctaatttttgtatttttagtagagatggggtttcaccatgttggccaggatggtctcgatctcctgacctcgtgatctgccagcctcagcctcccaaagtgctgggattacaggcgtgagccaccactcccggctctgttataattttcgtttgcctgctcaagagcgatggggtgcagagtttccagagccatcttgcttttgtcgtactttttttttttttgagacagagtctagttcttgtcgcccaggctggactgcaatggcatgatctcaactcattgcaaccttcacctcctgggttcaagcaattctcctgcctcagcctcccaagtagctgggattacaggtacccaccaccacacctggcttatttttgtatttttagtagagatggggttttaccatgttggccagcctgatctcgaactcctgacctcaggtgatctgcctgtctcagcctcccgaagtgctgggattataggcataagccactgtrcccggcctgtcatactttttaaaaccctcctgactgtgacattctagaaggggaagcaggagactagaaagtggtataaaaagagaaaggagttcaagaccagcctgggcaacatggcaaaaccccatctctacaaaaaatacaaaaattaactgggtatggtggcatgtgcctgtaatcccagctacttgggaggctgaggtgggaggattgcttgagcccaggaggtcgaggctgcagggagctgtgatggtgccatggtgccactgcagtccagcctgggtgacagagcgagaccctgcctcaaaaaaaaaaaaaaaaaatgaaggaagggctgagccagggtggcatgagcctgtaatcccagctacttgggaggatgaggcaggaggattacttgagcccaggagttcaagaccagcttgggcaacatagtgagaccttgtctcaaaaaaacagagaaaggaaacaggaacaaggaaagagtaggaaatggagaaagaaggaggaaaaaaaaacaggaagagttgaggggttagaggagaaaatgatgtgactcaggaattccacagctgttggtcagcctggcagttctgggcatatctagtcacatcggaggtcccagtgtccccaaatttgcatatcaaagtggtttattgagcccaagatgcttagccctcactagcaacttgcacctacctcccttcaagtttccagccagtagtggcgttcagatatgggggctgcagtggggtcccactagggaaaattaggtctgggggaagtagctgtctcctctttctctcctccctgcctttcctattcgcagtctccaggcttgctcttgtctgctatttccagtgctaatgaagagttgaggcagaaggggcaacgggccagggcctgctgacagccaggaagcctaaagagaagctgcctggctattggcctttggcttcttgcccccgattcctactacccagcttccatctccggagctgcctctggaaaggcaggacctgattccatccagcagccttgctgcctgacgggagaggttgcccccaccttctctgtgaggcaggcagagtccctgattctgcttctggcagtcggggggttcttctcaggtttcttggggccagagattctcagggtggggcttgggacctctgtggcactgtaaggctttcccaggccttctcaggctatctctatcccccaccccatcttactgagcctctctgctgtgtggcccctgcctcgcctcccacttccttccttattcaacacatggtgtggggggccagctcttgccargtacacacgtgggtgcacacgtgagaggccttacatcttaaggcacacatgcttgatacacgtgtggccccaagcctgtgaacgggctgtgcacccgaggcctgctttgcccaaatcacatttcttcttccctcctacaccccttcctggggtatgcacaagggctgcgggatggcctgtgtccctgctgccctttgtgggtatggccagagatagagctggtatttaggggcctggctggggggacaggcttccagggaaccctttcaccctcatggggctacagagatagtwcctcttgggtggggaaaaggagcaagaacaggttgccaggagaaagcagtggaggctgggcacggtggcttatgcctgtaatcccagcactttgggaggcagatcacttgagttcaagagtttgggaccagcctgggcaacgtggcaagatcccgtgtctacaaaaaaaaaaaaaaaaatmcaaagattagcttgcatggtggcacatgcctgtggttccagctactagggaggctaaggtgggaggattgcttgaacctgcaagttgaggctgcactgagccatgtttgcaccactgcactctggctgggatgacagagtaagatcctgtctcaaaaaaaaaaaaaaaaaaaaaagaaaaggaaaaaaacagtggagcccttctgagctctttctacccagctccctctgccgggtgactggaagtcctgggtggcctggagggctyctgggggagctgtggtttgctgctgagcctgttgtctgctcatctcctcaggtgtgtggttgtgttgttcaatccccggaaacacaaacagcaccacatcctcaacagttccaggtaaatgggctggggtcctcaggatacctcttccttctgggagctatgagaagggcactgtctagagtctctatggctctgggggctgggacctggttgggtcctaaagccagatggggaagtgccacatgtgccattggtgtctgctggtctcaccttttgagaggctgggagggggctaggcttaggccaggctgccagtgcccctctgagcctgccccatctcttgcaggaaaaccatcactgcccttgccttctcccctgatggcaagtacttggtcactggagaggtgagtgaggaagagggctggcagtactgtaaagagggcaggtgtcctggcctccgcagagagctgcggtcctaggcctgctgtcactttggcttctgaaacagacaccaaatcctggttttcgctataccttaaaatagtggttctcaagctttagtgtacatcagaatcacttggagggcttgtgaaagcacacatcactagcctggtcctcagagtttctgattctgtaggtctgggatgggagtctgaaatgtgcatttgtaacaagttcccagagagtgctgatcctgctggtgaaggaagcgtgctttggaaaccactgccttaactattccttacccccgggggccccctgctgggctcaggaggaacgcttctgtcctggyggcgtagtcttactaggggcagaaatagacctgagtggtagtggctctcaatgccggctgcccatcagaaccattcagggagctttgaacaacctgaagtacagacggccacccagagatgctgactaaaatccggggccactttcttcctggtaatcactgttgccctcagatctttatcatatttcctctataccctgccctgacttttggctggggaagtgatggtatctagtagctgaggaggcgagggccccgctctggaagacgaagtrgggctgtatgcctgtggagaagtcaagaactcacttccagttcttgcctccctgcagagtgggcacatgcctgccgtgcgggtttgggacgtggcagagcacagccaggtggccgagctgcaggagcacaagtatggtgtggcttgtgtggccttctctcctagcgccaagtacattgtctctgtgggctaccagcatgacatgatcrtcaacgtgtgggcctggaaggtgagtggctgggtggggtggcctggcagcctcacaggggtcaagtgtcagctggggaggcaagagactgctgacctgcactgctccattccaccccactgaaccattctcattctagaaagttatttgaagcagaaaagagcaactgtgtggccaagcatgttggttgaaggggctagctttatgccttcaaagacttctgcaggaaacgaatcttttcagctcctctagaaagggattatttccctacccctctttttctggccagtaaattctggaaagaaacactttgtcaagtacaaattctaattctcctccattctctgagtcactgtcttcttagctccaagagacagagccttgattcttcctttggcatcccctccagaaaaacattgtggtggcctccaacaaggtgtccagtcgggtgacagcagtgtccttctctgaggattgcagctactttgtcactgcaggcaaccgacacatcaaattctggtmtctcgatgacagcaagacctcaaaggtgaggtgctgaagctgggagtagccaccaaggcccctggcagggcctgcccagcccaacccaggagactctgccccacttgggcctctctctgcattcccagcagtcatgcagaagttttggatgagccagatgctgtctgggctgaggagtaggcccaaagagcaaggaggtgctggaggcgtcccctgtactctcctagggcccagtttccaggggcaggctctggggtggatgggggtgtaacagtggtgtgcctccacaggtgaatgccactgtgcccttgctgggccgctcagggctgctgggagagctacggaacaacctattcactgatgtggcctgtggcagaggaaaaaaggcggacagtaccttctgcatcacgtcctcagggctgctgtgcgagttcagtgatcgaaggcttttggacaagtgggtggagctgagggtaagtacctccgtccccaggggtagggtctgctcatgtctcagctcaggggagaactagtgcccagggcttcagactaggggctggtcccttgtgcatacgggagatcccaggagaacgaagcttgggggagctagagcttggcccatttccagcccttggtgatctgtataactgcctcctctctgctctttctgtctctttcccctgctttcctcttccgctcagaacatagacagcttcacagtaagtggtgcctgcaccttcctctctttctcatgctatttctttctcttcactgggcttttcctactggatcctctggtgcctagaagaatcctcggttcctaatccctggctggacagggctgaggggctcagaacagggcagctgggcggcttttcccttgcccctgccttggccrgtccctcctcttggcaggtggctgttgatgggtggggaggagagaagactgagtgggcaggtggccttgctgagctgagccactctgcccacagaccacagtggcccactgcatctctgtgagccaagactacatcttctgtggctgtgctgatggcaccgtgcgccttttcaacccctctaacctgcacttcsttagcaccttgccccgaccccatgctctggggacagacattgctagcgtcaccgaggccaggtgagctatgtgggccccccttcctccatttgtagccttacccctgcccagtctttcttgtcagtgcctcagggagcaggtgaagagtgtattgatgccccaaagattattgggaacacctctttagacagaagaatttgggtttattggtacttgttgcaaccaaggagaccccaccccatggagaactgtggagagtctcagtaagtgggtgttaggagggacatatgggatttgggtttgcgttgggtgattttaggaatcgttcaagggattgaagtattctggttggatgctgtccggaactaggggcaattctacagtggaacatcttgttaatttatctaagaggtgaaggaaaggtatggggctaaagctgtatttggtcaagaagccgccagcagtcatgtagatgggaaaggcggtgtttggtcattgtcatggttcgttgtggtttgtatggtgatcttgtttttatctgtgcacagagtagtcttgtttttgttttgccccatcacagccatagaagtaccttgtctaacgttggtgttctgtgaagctgtgttcatccgaacaccatggcccagcagctagtgctgggtcaggttcctgctgatggctagtaggggctcctttcttctctcaagcaactacttccaaacctgcaggtccagggagggctcctcacacactgctccttccattgtggattggcttctcttttcattcccttcagtctgacyagtgtgccctgtcctctccctacagtcgcctcttctctggagtggcgaatgccaggtatccagacaccattgccttgacctttgatcctactaatcagtggctgtcttgtgtgtacaacgatcatagcatttatgtttgggatgtgagggaccccaagaaagtgggcaaggtgtactcggctctgtatcattcttcctgcgtctggagtgtggaggtatgtgggctggctggctggctggagactggccaggttggctgggrtaccattttgaggacagaaaatagggatccccaagtataatcttagattcctgctgcctccctgtttctccagtgacttccctgggatagatcctggggactgagtttgaatgttacaggcttccccagtgtgccccatccttagttttgcctcggtcatcttggacaagttattgaatttgaccaagcctcagtttcctcacctgtaaaatggtgtacttgattcacctaattgttctaagaataaaatgaaataatgtaagtgggagacatagaagagtgcctgatatatagtgggtgcttccccttggtcatgttgaagggtatataccagttatgtatggcctgtgacaggcactgggctaagtcctggccaccattccctttttcgtcccattcccttccatctccttgggtaggcagaggactgctcccgaatggaggtctgattgtgttccctcggcctcttcaggtctaccccgaggtgaaggatagtaaccaggcctgcctgccccccagttcctttattacctgctcctcagacaacaccatccgcctgtggaacacagagagctccggggtgcatggctccaccctccaccgaaacatcctcagcagtgtgagccctgaggctgtggggccccgcttcaccctcagtgcccccatccccacagctattgcaccttgttactgggaactggtccctaggccttggccttccagccttcatttggctgtgctctgtggtccaagggtttgttttgctcagctttcttgccccttgcagctgtactggtcaggcctgcctcatccaccttttctaacctgttccactaggacctcattaaaatcatctatgtggatgggaacacccaggccctgctggacacagagctgcctggaggagacaaagctgatgcatccctgttggatccccgcgtgggcatccgctcggtgtgtgtcagccccaatggacagcatctagcatcaggggaccgtatgggcacacttaggtaatgccaggccctgggtgggtactgactgcctctcatggtgcagagttgggtatttagaactttagggagggtttggctcaaaaagattgggcaacaagatacttatttacaaggcaaagataataacttcacaatgagtaaacctagcagaaatcatcttcaccaagtgatcaaggttaacatcctcatatcaacatcattaagcccatgataggatgtactaagaaggatgtgacaatgtttctgtggtattcttaccaaaaatgcataaactcaatataggcgtgagaaaacatccgacaaactcacattgaggtacataccacagagtaactgatcaatactcttcaaaaacgtcaagatcatgaaaagtaaggaaagaccagagaactgttacagaccacagaagtctaaggagaagtaactaaatgcaatttggattctggataggatctagagtcaagaaaaaggacatagtaggaaaactggtgaaatttgaataaggtctctaattaatagtattataccaacataaatttcctagttttgataattgcactatcgttatgtaagatgttcacattagggaaagctgggtaagggaaatatagacgctctctgttctttcagcaacttttctctaagcctaaaagttcaaaaaaaggaaaaaggaggagaaaatgtagcagaggagggggcgtgagtccttcctgcggcctggccatggcctcttcccacctctcctcatctttgcagggtgcacgaacttcagtccctgagtgagatgctgaaggtggaggcccatgactctgagattctgtgcctggagtattctaagccagacacaggttaggagaatgcccggaatggcacagggctcctccagtcctgccggtgccacttatatctgtcccggctcttggacgtggggtcggtaatctttggatcattggtgtctttgctggtttagaggaagacagctctgtccttgctccatggttcacatggcttggggatatggggctcagttcccttggggctctttgccaggcccagataagggctgttcagggcaytcatgggctgatggagttctttcatccccaggtctgaaactgctagcatcggcgagccgggaccggctgatccatgtgctggatgccgggcgggagtacagcctacagcagacgctggacgaacactcatcctccatcactgctgtyaagtttgcaggtgcgggcagggtgaatgagacacatcctgccactctcacccctgctgccatctgcctcccacctccatgagaagggtctgcccattgtgggggagtgttggacagcagctgggaggcctggagctggttgggaagataggtggaacagagactctcagtgctgggacttgagccaaccaggttggactgaggataaggagacaggaaaacctgggtttccaggtttaatttagttggttttccctggcatgtagagtagcttgatgggggatctcatggagggaaggtgggaggcaggctgctcccatgtggtgagaacagtgggaacagctgggcttccctccttcatagccagtgatgggcaagtccgcatgatcagctgtggagcagacaagagcatctacttccgcactgcgcagaaggtgagggcgctgggctttcctgagaggggcgggacagggcggggtctgccattccctgcctaaggttacaagaggtgaagggaggcgcaagtagggctcttggggcctggtgaggcatttgggtgtgggcctgcccacatgctccacccctgcagtctggagatggagtgcagttcacacggacacaccacgtggtgcggaagacgaccctctatgacatggatgtggagcccagctggaagtacacggctatcggctgccaggaccgaaatattcggtgggcgtcccctcctcagactctgcccacattccttcatckccctacggggtcagctctgtgcagctaagttcccacatctgtcgttctgtacaggactttgtacccccttgagcctacagtactttgcttcacccaagaggtggtagcctgtttgctgctgggggtagctcccagagagtgtagactgggagtgaaagctggcatttccatcccccaggcgtgttccaccttcaccgcctcctcatgagaaagagactatgtttcttacaggatatttaacatcagcagtggaaagcagaagaagctgtttaaagggtcacagggtgaggacggcacactcattaaggtaaggacccagagggggtactggacaggggctcggggacagagtggtgctgggtgggagggactggtacttcccatgtcctccagctgcacaccctgctactcctcaggtgcagacagacccctcagggatctacattgccaccagctgttctgacaagaatctctccatttttgacttctcctcaggcgagtgcgtggccaccatgtttggccactcaggtgagtgtagcctgaatccccgagtagaagctgatacctgcgtaaacctgagtgagttccacccctggaacttcactcttctattagtttcttgggacccgcagagctacctatccctaccctgcagccaacccccgtgtccactgttgggatggagaggacttggttgggaatttaaggtggcttatagaccgtattctttgttcttcacagagattgtcactggcatgaaatttagtaatgattgtaaacatctcatctctgtgtctggggacaggtgagcagaagccagcttccctgagaggcagattcttactctgccacagcaccctgccctcccctctctccatttcagtgatgtctctgggaagtggggttaacagggatagcttttggctgtgcttgacctgaagtggagggtggctctggtctccttgccatccatggataaggggaacgaatggcgctagccattctacctgcccctccttcagccaactgtgtggctttaccccagctgcatatttgtgtggcgcctgagctctgagatgaccatcagcatgaggcagcgtctggccgagttgcgccagcgtcagyggggcggcaagcagcaaggaccatcctctccccaaagggcttctggacccaaccggtgagaacagaatgtgggcaagtgatgggtgggtgtgcagatggcttgctgggacctcactgcacttcctccatgctttgggcctgccattcagcaactctgtctcccaagaccttacctctcacacaaggatccatgatgtsagcctcttccccctgttgagtctcctctccccctattgagtctcatcttcccctcattgagtctcctcttccttcttcccccactgagcctcctctccccctattgagtctcctctccccatgcccttccttgtctcggactcaggcaccaggccccatcaatgctgtctcctggaccggctctctcatcagacagtgacaaggagggagaagatgaggggactgaagaagaacttccagcactgcccgtccttgccaagagtaccaagaaggcactgggtctgtggcagttgggtgtgggggcagacaggccctagttggtataatggctagatatggtttttctgagactgtggggtgagagcagtgtgagctgaggaaactgaggcatcactgtggccacacagggtatgggctgatggggccagggctccagggttgggtggcggggggggggcaggagacacttcctctgactgcctgtttctgtctagcctcggtccccagcccagctttgccccgaagcctgtcccactgggagatgagtcgggtgagtcgccattgttaaaatgttcttccaaggttagaggaggcaaagggagctgtgagaacagggctctctgggcctggtaggrtactggggcatggggtctgcccacatgctgcactcgtgtgtccaaggaaggccttgtcggggaagttgaagcagctgggctggtcctgggtgcgggggtgaagaaagcccaggtatttccttcctgtggaccagttggggtggatggagcacagggttagtcagcactggggaggtggggcacttgttcagctgcctggtgcctggaagtaaatatcatcagagaagagctcaaggtggagaggacaaaggacccctaagccagatagttagaactaaaatgcaggaaatcaaggatccaaagagcggagatctggagaaacagttctaaagatcccggttaggaggtaagcggagaacttccagaatagttagagggaaaaggccatgaggggacccataactcagcgactgccctggggtggccaaagggggatcaaggtgttcagagcaagttcccaagcaccagtaccttccgttgtcagcaacagtttcacagagtgatgatgctgtggtgtctctggagcaccctgaccgggccaggggtctcaggcctgggctataggtttgtccttggtgctgtgaggggactttggggcccccagctattggagtgattggggtagagaggcaaaaggagtggttggggtagacaggcagaagtggcctttgccctgggctggatttcttgggggactcttggtagtaagtggttgctgctggggctgtcctcagagtaggagacttttagagacccccagctctgaggcatccatgataccaggtgaaggctgagactaggggttcctgtgccagaggatgcggaatgcagctaagagcatgaactctggagccagactaayctgcaggccacttactgtctgtgggacgcagactgctcacttaagccccctgtgcttcagtctcctcatctgtaaaacaaggattatactagtgcccatttcaaaaggttgctgtgaggatgaagtaagctagtatgtgtagtgtgccaggcacatagtaagggatatgtggatatttgttgatcttactgtgtggttgttgttactcctcccccaccccctaccycccaccaggcacaggagtccgtggggttcctggacccagctcctgcagccaacccaggacccagaagaagagggcgctgggttcagccaggtgtggaactgagcgttagatccatgctggatctgcggcagctggaaacactggccccaagcctgcaggaccctagccaggactygctggccatcatcccatctggtcccaggaagcatgggcaggaggcccttgagacttcactcactagccaggtgagcctgctttctcccagctctctagagagttccaaggggccttaggcagcctttgccaccagctgggacctgagcactggtccagctatgcttgctctgcccctgtggcacatgggtaacctgaactgcaaagccaggatgggggtggctgggctgtatggtttggtcatcaggataggcaggggaggggttggggtagagaggcaaaagtggcctttgccctgggctgggtttcttggaggactcttggtattaagtggtagctggaggttggcagcccagagtgctaatatagttcatccagaagctcacatcagcaactggagcccagcctggcttctcgatgtctgtccttcagcttccccttgaatgagtgcacaccgcatccttactcacctccacctcttctccaaggggagggttggcccccaggatactcagggcttaccccccagctaccactgcctcatctgtcacctctgctctgttaacatccctttgtgtgttcccagaatgaaaagccccctcggcctcaggcttcccaaccttgttcctatccccatattatccgattattgtcacaagaggaaggggtctttgcccaagatctggaacctgcacccattgaagatggtattgtctacccggagccgagtgacaaccccaccatggataccaggcaaggatcctgccctagccagaccccgtgcccccgtcttcccctccctatgagtgttctttagtcgagggagggttggcccccaggatactcagggctttccttccagctcaccactgcctcatccctcaccctgatcacaggcaggagtccagcggggctgctgcctacccctgctcactgccttttcttctccctgctggaatcctgacagtgagttccaagtgcaggctccagcccggggaactctgggaagagtgtacccaggcagcaggagctcagaaaagcacagccctgacagtgcctgctctgtggattacagcagcagctgcctttccagcccggagcaccccactgaaggtgaggctgtagcctggagggaggggccatggggggtggggcctggaggtgggtggggaggctctggcaacagatgggtgcagtgcgatgcctctctcccctcccyacacccagactctgagagcacggagcccctcagtgtggatggcatctcctcagaccttgaagagccagctgagggtgatgaagaagaggaagaagaggagggaggcatgggcccctatgggctacaggagggcagcccccagactccagaccaggagcagtttctaaaacagcactttgagactctggccagtggagctgctccaggtgtggtcagagggccagcatttagtgcctgcaatttgcccttctcccctccttgcctacctgagaggagggtcccagggtataggctgtggctgggggtctcaaggaggcaaaatctggggcaagggcttggtttttgccccaattcatgatttctctgaccttggtaggggccccagtgcaggtcccagagaggtcagagtctcggagtatctcttcacgattcctgttgcaagtacagacccgcccactcaggtacagaggccccctaccccccagcagcagctctggctctcctcgcctcccagggctgctgccctctcctctccagtgttctgtctctccatgcgcggggtgttttgcactcccagttttgggctaactggcctttccccagcyctatctggctttgtgcttgttctctcctagtgccctggtgctatgagtttctcgccattttggcagggaggagcattgagccttctctgggccttctcccacatgttctccctgtagggaaccatccccatcytcctcaagcctggcactgatgtcgagaccagcccaggtgccacaggcatctggtgagcagccgagaggcaatggtgccaatccccctggagcacccccggaggtggaaccgtcctctggcaaccccagcccccagcaggcagcctctgtgctgttgccacgatgccgtctcaaccctgacagcagctgggctcccaagagagtggccacagccagccccttttctggactccagaaggcccagtctgtgcacagtctggtgccacagggtgagragcctgatgggttcagtgccagggtgcagggtgtatggaacacatgtacatgctggaggagggagggcctggtgtggccctgatgtgccactgtgctggccactaggtgtcccttaatgggcatgtggaggggaacagcagctcttcgggattgggtgttggcacctgggatgccttcctcaacacctgacctgtgtatacctctgtctcctttgcagaaagacatgaggccagtctgcaggccccttcaccaggcgcactgctgtctcgggagatcgaagctcaggatggtctgggctccctgcccccagctgatggccstccgtctcggcctcactcctatcagaaccccaccaccagttccatggccaagatatcccgcagtatctctgttggggagaacctgggcctggtggctgaacctcaagctcatgcccccatccgagtctcaccactcagcaagctggccctgcccagccgggctcacctggtcctggacatccccaaaccactgcctgaccgtcctaccctggctgcattctctcctgtcaccaaaggccgggcccctggcgaggcagaaaagcctggcttcccggtgggcctaggaaaagctcacagtacaactgagagatgggcctgtttgggggagggcaccactcccaagcctaggacagagtgccaggctcatcctgggcccagcagcccctgtgcccagcaactgccagtcagcagcctcttccaaggccctgaaaacttgcagcccccaccccctgagaagactcccaaccccatggaatgcaccaagccaggggcagccctgagccaggactcaggtgtgcacagctccccagctctcatctcctgccccatccttactctcccctctctgttggccgctgtctggctccatcccatttctgtgggtacagcttctggtgtttcttgtcctgtctgctcctgtcgcaggtccgtaagtcacacccctgatggtgagaccctcctgctaaccttcatgatttccttgtgactcacttgcccattcagtggcttctgaacttggggctggccgtctcctctggaccttgtttgtgtggtgttggggaggccgttggaagagaagccaagaggaagggactgagggcaagtggggggtgcaatgctgagggctaggtctctcctgttctgagtgtcttgggtgcggaggcctgaaagggctacatgctgggcctcactgagctgtatccgtctctttcagagccagcggtgagcctggagcagtgtgagcagctggtggcagagctccgcggcagcgtgcgccaggcagtgcggctctaccactcggtgggtgttaggtgccccccggcaggaaggcgggcacgtcagtagtgctgggtgtttcggataaccatgtccagaacagtatgctaagcctcttgtgctgacaggatggcacactcaagaacatcttgggcagcayaggtgagggggttagaggccaggctagcctcttgtaccgggcacctgcggtcatttctggttaagagctggagacttccctcaggaggtgaggcctgaagagaccacacctcctagttggctcaggacaatcccagtttatgtcgttgtcccagtgtaattattaatggcatcctttttcatatccatgaattatttggcccccttagacataggggacagtccaagaaggcccaaactttgaaagagaaagcagattctgccggagttgtcataaggagttgcttataagatgtagacggttctgcaatccaatgggttcctccttgggcgtcacccccagagtctgcctgcatcccatgttccctggccatacatgctgatcttggcgggtagagttcccagctagtcccttctgaggcaggctggacccaggtggggcccctcccttttatatgtctgttgacaggctcctccacctcacttctgggggtgctatttcaggtggctggctgcaagatgccctcagcagagcaaagtcggattgcccagctcctcagagacaccttctcttcagtgcgacaggagctggaagctgtggctggggcagtgctgtccagcccaggcagcagccctggggctgtgggagccgagcagacacaggccctgctggagcaatactcagaactgttgcttcgagccgtggaacggcgtatggaacgcaaactctgagttctggaagcctgtcccaagtgaatgaatgctccagcrattccaaactgcagcccctctgcccctcaccaaaacctgcggggctgcttggagtggaaagcagggagcagtgttcagaggcaaagcagccttcccagccgctcctcgtsgggggcctgtatttattaatttatttccctgactgttgcctcacttccttggaactcctgcctccacagcccctccagtggcagggacaggtcttgggtctttgtcatcttggtgctgtgagaggtaggagggmagcctgccccatctaggaatctgggaagggctggccctctcttagaagccatttgaaattactgcagggattagctccctgtggtggagcatacacagggtactctggggtcgaggtgagaggtgatgtggtattcagtgcccgtcagccaactgtgggccttcacctctacytgcacttcccctctcacaccagctgcactcccstggctgccagagcagggtggttttccccaatacctggagctcagaaaggcagagccatctggccctccagggtgtccccagccatcaggagacttgagttggtatttggacctgagcccgcacattccactcccattctccctccaagaggggcccagcattgtatttccctgtgaccccttactctcctggccagaacttgagccagctgtgggatgttgctgcaggacagtaagccctcacctgggcaaacatgaagctctggcctcctttcctcagccccttgttcttccctgtcctccaccctggaccccarccggctgctggagcccagaggccaccttctccctgcatcctgaatgatgcttagtcagaagcctgtgttggaacatccctcgtttacggggcgctggcctacctcctgaggacctcagccacagatgagatcacacgcatgcacgtgcacacatgtacacacacacacctacctgcacagcacgctgttgagtgttggttgctagagtatcyggctggctgctgtgtgcctggtttcctcacatcctgcctcagcttcaccaccctggcttatgtggaacacctatcagggagcagaaaaggggtgcagtacactaagtgaacccagattctggattcttggtgtccacagcctagctgatacgagatagcccataggacacctggtttaggtagaaggagcctcctcaaaggcagtgctgggcacccacgggtgtgctggatactggagtttgagaggagggaggtgctggggccaaaggagacactagaaaagtggtagatgggacaggtaagtggcagaggtgaggggrtaagttagaatgtaaaagggcagtaattaggggtgagggaaaggagataggggaccctaggaggtagagtgggaccatgtcgtgaggcagttgaagagttgaggaaaggtttttctgggccctactgctcccctctgctgcaggtaagtcagagcagctttaccacagcttcaggccacgagagccccttcacccgccctgctgcgccataggcagaggcttataaagaaatgggttctgggccaggtgtggtggctcaagcctgtaatcccagcactttgggaggccgaggcgggtggatcacctgaggttaggagttcgagatcagcctggccaacatggtgaaaccctgtctctactaaaaataaaaaaattagctgggcgtggtggtgggcgcctgtaatcccagctactcgggaggtttaggcaggagaatcgcttgaaccctggaggtggaggtggaggttgcagtgagccgagatcgcgccattgcactccaacctaggtgacaaagctacacgccatctcaaaaaaaaaaaagaaaaagggttacaaaaggttcccagctccggggcatcagcctgagtgcgcttgagctgctccaaacctggcccttccccactcctctagcatcgccacccgcatggccctggaactcccgcggcggcgggggcgggcccgtgcctgctgtgccccgacttcccacaccagccgcgcccaccgcaggtgggactcaggttcrccctctgggccaggtccttcacgaggagggagctacccttcgccagaagtttgtgagaatgtggccgcccttttcctgccctctgccccatgtgggtggggggcctcgtggcccggccggcgcccygtccccttctgcatgtctgaggccaccggcaaccgccgccccactccagatttgcccccgccytgttttgaaagccccttatttataacttttatactttgtgcaggtcgcggcgcttcctgcctcatcctcggctgcatggggcgggggcgctgtttttaacgtgcccgtttgtactgatgtatgaacttgtcaataaacacaattgtttgttaaccctgggatgccggccagtggggcaggccgaagcgggcgctgccagtcgctccaccgcttcggtggcagaacccggtgtgtgtccaggggcaggacggggcggggtgctgggggtgtggcctgcggcgggtgcctctggaagggcggggcgagggtctgggggtgtggcctgcggcggggactctggggagggcggggcgagtgcttggggtgtggcctgcggcggggcgtcggggaaaggcggggtctcggccggcgctgacgcagccatggcggaggcggctttggaagccgtgcggagcgagttacgagaattcccggccgctgcaaggggtgagtggctctcccacaggctgcggcgatttccgaacacgggaggggccctgggatgccgctgacaccgggggctcggaacctcgtgtgtgcgactgccctgaggccccgctcgggttgctcttctgtggcaacctgcttcccttctcccgtgttcgcgcgctcccgcggcttcctgggtgattctgttcacgttgttcccaaggcccggtgccgtcttgaccgtggtcgcggcgaagccctgtgtttcctacagtcttgagcagcttgctgttacccttgttgaaagctcatcgaaggcacacagctggtggtcggattcctcccccacgcgccccacctccgacctcaactcccttgtcgcactttgggaggattgcaggctgaccaaatggtccctggctcttcccctgcttggtttttattccttttctttctttctctcttccctccttccttcttttttctatttttaaatgatttcttaccactgaacagcaacacaggctcatgtgtatgtgatgggtatgtaatatacagtggtacgcaatgtaaatgaagcaaggtttcctcccagccccagtttgcattcttacagaaagattgtttatatccgtgcacacacgactttttaccctttttttgtacaaatagtagcctgctaaacacactcttctgcaccgtgtatcttggagatcatttcacattcctctacctcagtctttttcacgtctgtgtgctagtgctgtattcacttagtcatttaggtcatgtccaatccgttgttttcaataatgctgcaacgaatactttgaggattgatttaacaaatacttattcagcatctctgtgtgccaggctctgttcagtgtgtttgagatacatcactgaacaaaacaaatctgtcttttacagtctatgtcctgttacattctaagtgagaacgtggacaatcaaccacaggtgtactgaatgagtacattgtagagtagaagaagtaggttagaaggtaagtgcaggcaaagccctctttgggagtatgcctgatgtgtttaggaaacagtgaagaagccagtctgcaggagcagcgtcttctgcgcatgtgtgagtatgtttgttggttaaatactttatattttttgagacagggtcttactctgtcacacaggctggagtgcagtggcacgatcatagctcgctgcacctcgacctcccaggttcaagagatcctcctgcttcagcacctgggagtagctgagactacaggcatgcgccaccacgcctggctaatttttttgaattttagtagagacaaggctggtctcagattcctcaaacaatccttccacctcagcattccaaagttttggaacgccatggaacacataagccactgctcccggccttgttaaattcttagcagagttatggggtcaaagcaattgtttggatcccttttgaaattttctcacttggaagccccaggagaggaaagcagccattctctaaaggaaatggtgagcaagtaaaacaaatccctaattgcagaagtccaaagggtgaaaaaatggcagtttccatgtattttcagaatcccaggctgtgtgcagtactcacgcctgtaatcctagcacttcaggagaccaaggtgggaggcatctcttgaggccaggagttcaagaccagcgtgggcaacatagtgagacaccatcgtgtggtggcatgtgcctgtagtcccacctcctgaggcaagaggattgtttgagtccagcagttttgatgacagtggcgggcagttggaagcagatgctgtcatcatgctggctgcagtggggaggcacaagtcgggcagcagaagtggctctgggagcagcagtggtggtagtgagtcccctgttccctgcatccccgaggcagccgactgcaccacccccaccctcacatggctgggcaggacctgctcctcagcccagaccctctgctgcagcctgaacctcgctccctgccacatcccagaagcctgcgagcaccctgccaaaggtgcaactgggacttgtagggacttgcacttgtgagtacaaaaatactcacacatgtgcacaaagaccctgctcctgcaaactggcttcttcactgtttccggaacacaggactactaggctcatttgtttggggtggtcagagctgccatgccatatgcaccttgcccgccgccgctgtggggaaaacgtgaagaggagaggcagctggggccacatgttccacagagctggcgggaactggggacaagtgggagccccaccccttccaagttggtggagtgggagctccctaggcgcaattacagccacccaagccaggactgcaactcaggcacccctgtgctcttgggagctaggagcaggcaggagccccaccctcctagatgcagctgcagcctcccaagctgcagctgtggacccaggcatgtctgcacttttggggacccaggaaggccccttcctgctgccgcaggcttggaagtgcctgatcctgctgtctggcttctccccactgtcagcacctgatcagatcatggagcaaagttgaggccgagcctgggtgctattgcagtgctgacacaccagccccctgcctccttggccccctctggcctttgggtgccaacgagcatgggagggaggccaagaggggctgagggcagctcagtgctggcctgcaggcacccccttggcacaaacagcttgggtgccgtgaatggtggcaagaggcagacaggttcctgggtggaaggtggcgggtcccggtgaagcccgaccttcaagccagggaaggcctgaagcctgggggctgggctgccggttccatggaccggaatgggaacttttggtgctttttccggcccacccatggctgcccatggaccaataggcatgtacctcctcccctgtgagacccataaaaagcccctgactcagccagaccagaagagacgatgggacgaccagctgcggggaggagctaccctctctgctgagagctggagagatgacaggacaacctgcccacagagaggagctactctagccagggaagcaagcaggcatgccagctctttcttttccagtattcctgggcccagtggggtcttctcactcagttacaatatttgatctaagaacattcactttccaactgatcagaaagtaaaggtgactggcatggtgtggctgtgagagatgcagtgtgacctcagaggtgaacatcagtgccgggaccatttggagcaggatgtggtaaccaccaaatggaaaccacggccttttggctcgacctagagcatgaatgtagcaaagcgaagccctgtacactttataaaaaccagcagaaagacactccagtctgagtgagcagctggaacaaagctctgctgagctgaacactcaacaggactacctgcctgcagagagaggagctatcctctttgctgagagctgaacactcgttgggacaccctggctgcggagaggagctgcccactgtgggtctcctctgagctatcctatggctcagtaaagctcctctttgtcttgtttaccctctgcttgtctgtgtgtacctcattcttcctggatgcaggacaagaattgggacctgctgagtggcggggctaaaagagctgtaacatgaagaggactgaaccatgcgtcttgctcgccacattgtgggtgtccagaaggaaagaagaactgcggccctttggggagtccagacccaggagcttcccaagctggggttctgacaccctctttagggctctgcggttcctggtatctgcaagcttccaggcaccaccatgcttcccagtgtcagctgtggaagctgcttatggtacacctggtctagctgcagccttgcaggaaaccagcacctgtgttggcacctgaagctgcctgccccaccgcagcccacatgcctagctgtgcgcagtggccaaaccccacactcattcgctcacacacccctcgctgccccactcgcccttggcaggtgtgggatccaggccggtagcatgagctgagcacagcctgcagggccgagtgggcccaatgggcccgagcaaaacaggcaaaggcatcactggccacagaggtttccagctggtaaagcaacaccccaaagatcccgtgacagtttatggctgcggtgagctattattgcgtcactgcacttcagcctgggcaacagagcaagactctgtctcttaatctcagcgagtacaacaggaagatgtactgagccccagaccaccccatctctcaaggtgactgcttggatgggctggcgtgactgggaaggcctttgccactttgctgtctcctggattccatatctactggatgggtgccatcttgcctctagccagggaagcaagcaggcacaccaactctttcctttccagtattcctgggcccagtggggtcttctcactcagttacaatatttgatctaagaacattcactttccaactgatcagaaagtaaaggtgactggcatggtgttgctgtgagaggtgcagcgtaacctcagaggtgaacatcagtgctgggaccatttggagcagcatgtggtaaccaccaaatgggaaccacggccttctggctcgacctagagcatgaatgtagcaaagcgaagccctgtacactttataaaaaccagtagaaagacactccagtctgagtgagcagctggaacaaaggtaccacctgaatagagggtgtgtggcaagggcaggcacgagacaggaaatcagactggaagagtaggttgggcctggtcatgcgtgccaaggcaggcagcattctctaaggagcagtggtaagccatcaaggcatttgttactaggggtgtgacaatatgagattgtattttcagaagatgactggggctatgatgatgaatgctttgggtgggagtggaattaagccagagaaaccagctagttcactactgcaaccatccagccaggatactggagacttttattcaacattaggcaaatacttgctgagcacatgctatgtgctaggtactgttctaggtcccaggggtgcatcagtgaacagacaactgtctctgcccttgtggagttcacattctagcaagggtgaaagaatgataaacagtttatgtaggtgaaatacatatatatatatatatatatattttttttttttttttttttttttgagataaagtcttgctctgtcacccaggctggagtgcagtggcacgatgatagctcattgcagcctctacctcttggactcaagtgatcctctggcttcagcctctagcgtagctaggagtataggtgcatgccaccatgtccagttaatttttaatttttttgtagagatggggtctccctacgttgccaaggctggtcttgacctcccggcctcagcaatcctcctgcctctgcctcccaaagtgctgggattacagacatgagccaccacgtctagccctaaaatatatagcatgtcagatggtgatgaatgctaacgagaaaaaatacggaaagggatataaagatttgcagcagggggacagattataaatttagaaagtatagtcagagaaggaagtcttatcaatgtgatat

SEQ ID NO: 98060 - DNA, 17095 bp, Homo sapiens
gtagaaggaagggctttattcagctgggagcatcggcaagctactgccttaaaatctgagctcctcgagtgcacaatttctgttccttttaagggctcacaacactaaagatttcatatgaaagggtcgtgattgattgagcaatctaggggatacgtgaccggggtttcatgcactggtagtcagagtgaaacagaacagggagtttcacaatgttcttttatacaatgcctggaatctatggataacattgggttcgaagtcatgaattgatttttaactactaggtttaggccaggaaggcccagggctgattttaggcctggtgccgggctgcctgtctttgatttcacttccttgttttttctcttataacaaatactgagtataaaacaatataaaacagtatgagagggtctctctcttccctcatttcccccctttgagactctcactttttattagtgggagttctcactcttatttttgctacttatgtcttttcgtgcaatagattgatagtgatttttatagtacacttgtgctgaagcattttggtgaactaaggtagtgatgaagctttttatcatttgaagaagtacaggtagcaaacaagggagcagtaagtaggtttctattactattgtaactcctattgtaagagttttaaatcctcttagtgctgggaactaccttctaaacatggctttagggttgaatctgtgctacacttgtatggacatatgtgccagttttgtcatatttctaactatgccttttaactacttgcctttgattatctatgtgtagacagtaattagtaaggttaaatttcttatagaccattatttcagctgctagcaagtagtcaagagctaatttattttgatagatagcatttcttatctgagttttttgctgggccagaatagtcaaggcttgaccagttttattagtgatgatttttaaaacagcttgcaaccgtatgatttggttgagcatgtaaatgggggtccagtatccccatgatctgtcttgtgtctaagtggcaggcctatagtattgtataattttttttagggggccatttatcatctttttaattacctatggctatgcttcgttttccacgggaagcacagacagggaagcctaggagttctcctgtttttatgggcagtaggaagaaagatggtttaatggtgccaattacacaactacctgtccactgattaggcagcttagcatgggctctatgtctacatatccagtattacctggtgggggcagtccagtcccggtggaattctgggtaggcctagacagtctgcaaccttggaaatttactgaacggatctctttctgtgtggtttgaactccaccgtgtaactgtttttgtggtactattatacagtttttgtcctaggcaactaagtcatcctacagaatgagtgaattttttcctttttctagctatgcaatattgtccaataattgagacttttagaacctagaaatgatcagggtgattcttttgggctgggaattcatcaggaactgggtctgtaggcactaattcttgggctttttatggccattgatctctcattacagtttttctacaaaaataacatgaagtgacatctagagactgggctacctgctcggctaattgcaaaaacaaatttttagtttttcctggaatcccaggtactggcacatttagttcatcatagaaaatctgaaagactggttctgaagagcgttcttgaacctctccttttattaggatgcttacactaggatctagtccttttccatcaatgcctaatgttacatattttcctttattccactttgggtctgaggggtttgtaattatcaattctaaaaggttgcagctcccactcgtgcaggaggggctgacttttcctttttggagctaaacaggatctttcttatcttctttctaagtagcctaaatgacacaagaccagtattgacatatctcacataaatatgattcttgacagatgtacttattttatgctgtgtaacttttttcctaatctagagaactgcatcctatcctatgctgtttactattaatagcggcacaggcatcaaattttaaggttacatttttggggacctttctttcttctgttctagctattattttacttgtgtcccttagagaacgaccagttcttagtcttacttcaaagactgtgatcatgggaagttcaaaggggtcatagcacacattgggctggtcacttcctggattacatactttgtactgggtgttattatacaaataggttccttttggagttcctaggcattcataataactataaaataataggactgtagcaatcttttgtcctacctcagtgacttgatgtaaatactgggaacagccttcagtctgagaaaggtcagttgaagtccttactgtacaactctaaattttaaggaaaatgagtcccgcgatgcatttcctcatgcttcggccgtgtgtggaccagtcagcttccgggtgtgactggggcagggcttgtcgtcttcttcagagtcactttgcaggggttggcgaagctgcttccatccacgtacagctcccagtctactgatgtttaagggtggtcttggaggttgggcctactagaataaactaagtccaacacctctacacagtttatgtttaactgggctctctgataccaggagtaagatggcagggttagggtgttgcaaacttcaatcgttatgtggggattttcacagagcaagctttggtatctagttagtctagcattcattagctaatggtgtcctttggtatttattaaaatcaccacagcatggggggactttaggttttgtctaagagttagcttatctgcttcttgtgctaacagggccgttgctaccagggcccttggacatgggggccagcctttggaaaccctgtctagttgttttgagagataggccactggctttggccagggccccaaagtctgggttaaaactccaactgccattttttttttctttctgacacatagagtgtaaagagttttgtcaggtcaggtagcctcagggctgggaccgacatgagtttttctttttaactcatgaaaagctcattgctgttggttgtaatagatgtagtttatctaatctacatttttattgactgtcatctactaaaatattgacttgaatcctctatttgatttcaagctttaaattgatctggtattccttgcggggctctaattgcatctaaatagatgtgagagttgaaagacctataaggggcttctctcgctttatgatgtcttattttttgtttttcctctggttgatgaaatgccagggtgaaagggatagccaaatggactaaagcacaagtgccactctagttattaggcagagtgcctagtaaaggtccaccacaatactaccatacatctgctaggggacgaacaagggctgactgattgataagctcttgaaaattcttaagctcactgcatcccttcaggtctctaaggaatgctaagtctcttccttgctgtgacagacacgaagtgaacttagtgttgggagatggaagctggatggccctcaggggctgacccgcagggacttcgggatatagcagagagagcttggcatgactttttactccaggctatagagtcccggaaaagagctaccatgcagcctatgcctggtcgactagaggaccaccttagtggaagggggacaatcagggcctctggcctgccatgtgcacaagcataacaattgcttttgtttaacgtgcagatggaatatttgatctatttcaaccaggcatttgcatcttggtatgctgtcttaattgccaaagtttgttttaagtctttagcttctatgatcctttagtaaaatgaatgtttcctgtagcacctatttttattagtttttagaccaaagaaagctaaacaccattttatatttaataatgcttcttgtatgatttttataccacataagttaaattttacctttatattagtgttaatgttaaacttaattttaataaaaccttgtagacatatttatccaattttttatgtttgaccatgtaagattttatagactctttttaactttttataatttttgttaaagaacaggttgatcctttaagaaaaacctgttgcatttttaatgtctagttcacagaaaaactggatgacacctttttaactttagctaatatgtttacacacagaattttctttacaattaatgttttaaaacttgcttaaacttttaaaacaatttttttaactttttaatgtaggtaaaaatccacatttttatgcccttttataatcttttttaccaaaggtatattttacttttcttatacaccttgcacataaactgtttttttaaaatagtactcaggaggccttattacttttaaattatacaacttttttgcataaatactttttataactttttctttcacgacttttgcagacaatttttcaacatgtcttaactttctgacttattacattttttttttaaacaagcagttaatttatttcaggacaagaatttaccatgtaacactctttttacataaattctgcctctccccgtttttttccttttttttttttctttttgaagataaccattccttttttttttttttaaagcgaactttctttatgtctttgaactagattgtctaaggccacaagattagaagttaccataatacatgttacactgttaacttttagcaaacttcacttttgttgaaaaccttgtcagtttgggatttcaattatcctttgctattaataagactttgtttagtctaaattaacttagaattggtatagatggtctctttttctctctgctggtctttccttgcctctgccagctgcttatgctgctgttctcttaactactgtggtggggaagggggtctaaaaccagctgtaactgtctatgtatggaaactggtctgggtgccttggcttaccagttaccttgtgtcatacctttgaaacaagagacctgtccaggcttccttctgatggccaacctacttctaatgctggccagtctatttcacacaaagttctaagttttcctggtgtcatagtaacactgtaatctcccttaaatcctttcttgaaatttttcaagatagttcctagtggggtgggcttactttgcacctgacctatgtttgtttgttttttttcctgagacaaaataccacgctcacaccacacacacacaccagaagacaaagaacgggtaaagagggcacacacacactgttaccgtttataccaaaccaaaatcacgaaattcaaaatccgagtaccaaaaaattcaagccaagtcaaaaccaaaaccacagtatccagcaattcaagtcaagtcaaaaccagaacaaaagtgccaatgcaggcacaccgtgggtgatcaggccacgcttccactcagatggagtggggcaagttccaaagactagttttaccaagtcaagccaagtcaaaaccagaacaaaagtgccaatacaggcacaccatgggtgatcaggccacgcttccactcagatggagtggggcaagttccaaaaactagtcttaccaagtttcagatgtctggactccaagtgccagttccttcccggttcccggtgttcagccactgtgttaatcctccgcaggggcctgctatgtgctgctctggcgaggcgttccaccggggcaactgcctacccaggagcactctttggatggcatcactcaggctggccggagtcccccgcagggacgctccacggggcaggcctaagttgcctaaggggctgtctcagccgtccgtcagtcacctcgtttcctggtcagggaaccaagaaatgtagcaggacgagccgcagacaaaacctctcagagttgtagaaggaagggctttattcagctgggagcatcggcaagctacagccttaaaatctgagctcctcaagtgcacaatttctgtcccttttaagggctcacaacactaaagatttcacatgaaagggtcgtgattgattgagcaatctaggggmtatgtgacaggggtttcrtgcactggtacagaacacaacagggagtttcacaatttttttatacaatgcttggaatctacggataacatcaggttctaagtcgtaagttgatttttaactactagstttaggccaggcaggcccagggctggtttcaggcctggtgccgggctgcctgtctttgatttcacttccttgtttttttcttaaaacaggtactgagtataaaacaatataaaacaatatgagaaggtctctctcttccctcaagagtgtatgactttgctgcccaggatgatcttgaactcctggcctcaagctattaatttcttcccaactcagcctcccaaagtgctgggattacaggcatgaaccacagcgcccagcttaacaggatttttcagagagaaaaagttttttaattttaatgaaatccaccaatttatctattttttyttttacggcatgtgcttttggtgtaatgtctaaaaactatacctacgcctaggttgtaaagatagtctgttttcagttttatagctttccattttacatttagatatatgatccattttgagttaagtttgtattacatgtaaggttggggttcctttgttttggtctttgacaaatggaagtccacaacatttattgaaactcttcttcctccattggttttaagataaatccgttggccatacttctgaatgtctatttatggattccctatcttattttattgatgtgtatttttgtctctcctccatggatacatgaaggaaagggccttggacacaaggcagtggggaaaggggctggggggccacacagagaaaggagaaggcactaagatcaggctcagcagcttctggatctgaggcgccggagattatttatgggtcaatctggcagcccctgggcctcaggtaggactgcttagcagtgaaaagggcgtcctgggtgcagccaacagggtacagctgcaagccattgttgaaggtgtcttgacgtatcagagaaggcaggtaaccaggccacatccctgggcgcccgcgctgtcccactcccttcctggtgcgccccgcctcgcggtcacaaggrccccaccgcccggggagagctgcccaccccgcgcctgacgcccagggcctggaatcgcgctgcaaccgcggcctctttccctggttctggccaggtgagcgaggcctagcaatctctcccgcatcacaaaggattgggtcagttaaggctcatccgaaagcatctgttgagcccctgggaacagcttagccaaatactgactgcagctacacgttaggaaacactggtacaaaccaacaggcagcctttccgcccttgcggagggagagactagcatcatcatcaagagataaaccgaagtgtgctggaaaacacacgagctctttagtaagagcaggcgacatgcaaggaaccatagtaacaggaacagaggtcctgaggctggatatggaacccaagtttgaggatgaccaactgagaccagtgttgctggagcacaaagtgccaaggagagaaatggcaggctaaggctggaatatgcaggtatgaagcgcaacctgggttcttctgtgccatgtgaaaggttctgctcttgatcctacggaaagtgggcaaccaaaccaattgttttccaaagatcctaaacaatgtaaagctaggctttgatcaaagggctaattaacccatacttactatttgttaacaggagtttcttacatcagatttaaagcagaaggctcacagcttcatttcaaccatgccactgtatccatgaaaactctgaaacaagtatttgtggacagcaaaatccacatgtactcaatacctagcttaaattatcaaaacacaaccaatcttgtctctacactaaaccacttcatttgctgactagtctttgaagacatgaaggtctctgacaacctcatgagaagtactgaaaacatcagtcttgtcgtataccttatctcccttgcctggcatatacttccatcaactaaatgatccaatgcctgtattctcctaaacacattaatgtagacacattacaacacagatcctgacacctttaaataataaacagagtggggagcaattttgagtttactatttatcatcttgggcccctgtaagatggatacaagaatgtgcatttccaagggtacctaagataatctatgtgcaatgaaatttggtaactgaagtgttgcacccgatatggaaaataccaagaataaaaaagaaagtatctcactagaatttcagtgagtttttgaagttcccttaaagttcttaaagtaatactacaatactgcacatttattccagatctatcycattttcttattccacaggatgagggaaactgtgccaggttacaaatgttattaactctagagaatcctgaaacaaccctgtcttattgtctcctaaaattggtacaggtcctgcgtttgctggtttaggataaaaaaaataagggggggtggtggtggtaatgaacatgatcttcrtggtgagaacaggggacagtaagatacmaacattttttggcatatgaaartttattactacagtgttttcaccattaatatttatgatcttggtctttccttcttgcctttgtatagggccaaaagagaaacattggctactttgacaaccttaaagcggactccaggaatatcaccaacagcatgacctttgcgaccaaatccagcaaccagaacttcatcattttcctggaataaaataagaagtttatttctggtgttggtggcgatcacaaaaatactttcatgtgaggaaactcccttkcatcagataaaaatgtgagggaggccaccccaasaacagaaggtacgatagagttgaaatactcacctcaataaagttcaagcaaccgtcattgggtacaaaggctgtgattttcttgccattcttgatcagctggacccttacacacttcctaatggcagaatttggctgtttggcttcaactcctctgaaatacaaaaggcacagcmctgtgagctggctttctgaaaaagattatcttttcatattaactagagaactaatgagaaactgtttctatcttttcaatctaacctcaaatggctgagctgaastcctgtgatgtcaacctagttttctgccagtcttaatttcattagcacaatgggggaaatttctagaccttttacagttataaaagtagactggagtggcagcgtgggcctgtagtcccaactacttgcgaggctgacgtgggaggatctatgcctagaacgtcaagatggccagcctgtgtgacaagggaccctatctcaaaaaaaaaaaaaaaaagaaaaaagaaaaaaggtatctgaggtaagaattagaaagtctgggccggacacagtggctcacgcctgtaattccagcactttcggaggccgaagcaggcattatcacctgaggtcaggagtttgagactagcctggtcaacatggtgaaaccccatcactactgaaaatacaaaatattagctggtgtggtagtgggcgcctgtaatcccagctacctgggaggctgaggcaggagaaatgcttgaacctgggaggctaaggttgcagggagtcttgcgctactgcacaccagcctgggtgacagagctagactgtctcaaaaaaaaaaaaaaaaaaaaaagtctgggttaaaatggctctaccatcaaatatgatagaactatatgaaattattattttaaaaagtcaaaaccagtcaaatactggcagtttcatgtctcaatcttaggtgtatgacctcaattaattctgatgcaagtcacttctcttcaccttagttttatcaagtcgataaagttcaatagctgacacgtgccatttacttataacaactcccacagtaaaggtgtttgtgtcctttacttcatcattgctagtatcttctccaattccttccaggccaacgttaaattaaaaccttaactacctaattcccaaaaactaattttaccaacttttaaatagaacaaacgctttgcaattttaccccacaatgcccaaatgaatactactacacaaaaacctgcaattactttcaaaacaagaattcgtaagttcatgtctcgaattcctataataaactaaaacttgacgggagcaatggacttacactttttccagcacgattccttttgcatgagaagcacctccaaaagggttggcctttagggctgtgcccaaatgagctttcttatactgtttatcatgccacttctggtctcgtcggtgactacggagcttcctagcagtacgaagtccacgacacttgcctaaaaattaaatattttagttcttccgtaaaaacacgccatctacgtgtttcccatcttctaagacactcgcctcacctggaataaacccttaagccgattggctctcgtactatttattggcctgtgggccaaacatttggccttcaagttgccctgaaccgactaataaacgttcgaagagggctccggagaatgtgttctcccgaaggacgaggccccgctcgaatgcccgggaggaagcgctggcctccctgcgtccctcggtaccccgacctcggcggcctccacgcctcatgggccccttccgcgccggaccaygtgcctcctggagcggcgcttccccggccctcccccatggagcctctccatggcatcccccgccctactctattcgcatccgcccgcccgtccccaagaccccaagtcccgcttgcagcgcccttaaaccggccacaacagctcacccatcctgtcggcgccacgggcctgagcgaaagagagaagcacygcaggaaggagccacaagccaccgcgagcaagccccgcccagccaaggaccccgcgccgctgtctgcgccgcgcctgacccgaggctggggtctctcctttgaaaacgacgcgtttgcatcactttcctgagccagaatctgcgtcttatttaatttgcaagaaattcagagatatctaatttgcatggtttttttccccctttttcttttgaatgctggagaccggaggaacatggactaccaatcccagaatgcgttttatgggacccgctcaccgcgcaggcgctcttgcccaagccactgagagcgggacgcggggctaggtcagagtaggaaggagtcgctgagctgaatctttgtggagtggagtggggcgagagtcctccgagtagtctggaaaattagacttctgagccttaattcatacttataagcagctagtaaattgtaaaatatagtgaagcaatgtagtgtagtaactaaaaccccaagctttggagccagattgggcctttaaccctaaagttgccgtttattttgactggcgagtcatttacttatagatttatttatttttatttttatttttttctgagacagggtctcactctgtcttctaggctgttgtgcagtggtgcgatcttggctcactacaacctccgcctcccgggttcaagcgattgtcccacctcagcctcctgagtagctgggattacaggcttccaccatcacgcctggctaatgtttgtattttcagtagagagggggtttcaccatgttggccaggctggtgtcgatctcctgacctcgagtgatccgcccgcctcggcctcccaatgtgctgggattacaggcgtgagccaccgcgcctggccatttaattaactctttaatactgtttctcctgtaagatgaactagctgtgagaggtttctgggatattggttcactcagcaaggatgtttaaaaatgccttctatgtgccagacgctgttgtaggtaccgggaatatggcggttaaattaagagggtgaaggtttctgctctgatacagtttatattctaaatgtgagaggacagaccagttagatagatgtaaattaaataattaaatagatgatttttacatactgtagagctatagagaaaatatagctggatgggtgatagtgacttggggatgggggtggctactctggatagggtagtttaaggtgacatctctgtgcagatgtagaatgggctagtgctttctaagaactgaaagatcagtgaagaaggggagcatagtgactgaggagtagtgtggcattagatggggtctgagagttacacaggaacatgtggagcctgtaggccatggtaaagcctttttctactcttctggtgatttaaagccattgtaaagttttgagcatgggagtaggtagcaaaataagatttatatttttatggggttactctggctgttgagaggagaaaaagacatgaatctgggaggccacttgggaaggtattgcaatagttcagatgagagatggtgatagcttggaccctcagtggagacagtaaaaagtggttgggtcagatacactgtttggtggtagaatgaacagaatttgctcaggactgtaggatgtgagagaggagttaattacagcactatgatttttgacctcagcacttgggtgagttgtagagttgtgagttgtgagttgggtgagttccaaagtgggaaatacgaggagaggagcaaatttcaaaggaggaaatgaagagttctggtttggatgtgttaagtttgaactgtcaaacatccagggatgtgaagtggacagttggatatatgataagaagctgaggagtaatcaatgaataaatagtattaaaactgtggctctagttgagatagcttaggtgatgactgtaggtagaacagagattagagtcctgagcacaccaaagtttagtggtacagaagagaaggcaggtgaagcaaaacagatgaagaaagagtggccaatgttacactctgttcaaagccaagtgaagaagggagtgagaaagtgtgaaaagagataagatgaggactgagaattgccttttggacttgaaaatgtggagattactggtcactttgtcaaatggggactccatggagtactgaaagtgaaaggcgatgggatcggagtgaagagaatatgggagggaaggaagtctagacagcaactatagacaatttttgaaagacattttttatgtgcagagaaatggcaccctatttggaggggaatgtggagttggagggttttatttttaagatggcaacttttatgacatttttgtatgctgatcaggttgagaaaattaaaaatgggttattcagcagagaagggataattgcaggagcaactccttaagtagactagaagggtacccaagtggaggagttaactgtaggaacaataacagtttatgtatggtagtagagtgacaggtacagctgcaagtaaattggaagatttgatgataggaagttgtggaacttcttcacttttgacttactttttcaattttttcaatgaaataaaaagcaaggccatcagtgaagagaaagagtgggagaaaaaggtttgaggagagaaggtaagatgtgaaatcatcatcaatgataacaatataagcattagatagtatttactatgtgccagattctatttttggcttatatttattaactcattttattctcataaggaattttactgagggacagataaagataattttactgagggatagatatacaaaaactgaggctttggtgagtttaacttccccaagatcacgtatttagtaagtggtagaagtaagattttaacccaggtaatctggttttagaatcttgtatttgacccctcttatactgcctcctaatctagaatggtaggaaaatgcattgacaagaaaataggttttttgagcagttctgagagcccatttgaaatctgtgtttatgaagtgacatcagtgagttatgtgtatttcttcagattcacaaatactgcatgtttacacttatatgtggaatctaaaaattttgaacggatagaagcagtgagtagaatggtgggcgtgggagtttgggggatctggggagctgttggtcaaaggatacaaaggtttagtttgacaggaggagaaaattttcgagagacttgttgaataacatggtgactccagttgacccacaaacaatatgggtttgaattgtgtgggtccacatacaggcagattttcttctgcctctgacaccccgagaaagcaaaaactcctcttcctcttcctcctcctcagcctactcaatgtgatgacctttatgatgatccatttccatttaatgagtagtaaataaattttctcttctttctaattttgttattaacattcatttctgtggcttaatttattgtaagaatatggtatgtaatacacgtaacatgaaatatgtgttaataggctgtttatgttatcagtaagagttccagtcaacagtaggctattagtagttaagttttcggaaagtcggaagttatacacagattttctactgtgtggggaggtcagcatccctaacccccatgttgttcaagggtcaactgtataaataacaaagtttatattgaaaattgctaaaagaatagattttaagtgttctcaccacagaaaaatgatacaaaagtatttgaggtaatgcatatgttagttagctctatttaaccattgtacaatgtacatatatatttaaaatatgttgtaaaccataaatatacacagattttgttaaagaataaataatttaaaaataatatttaaaaaagatggagccacacaaaaagtgattactcaatgaaattgtgtcactgtcttacactgaaagcataaatcaactctggataaattaagggcttaaatatcaacaagaaaactttgaaattcttaatagagaacaaaggtgaatatctttttgaacttaggaaaggaaaatgtttctacacatgacaagaatgataaatttgatcatattaaaattaagaccctctattcatcaaaaacatctgaaagaaagtgaaaagacaagttccatactgagaattgctattcatagccacaaaacttacaaaggattaatattttaaaaaatttctggccgggcgtggtggctcacacctgtaatcccagcactttgggaggccgaggcagggggatcacgtgaggtcaggaattcgagaccagcctggccaacatggtgaaaccccctctctactgaaaatataaaaattagccgggtgtggtggcgcatgcctgtaatcccagttactcaggaggctgaggcaggaaaatcgcttgaactgaggaggcagaggttgcagtgagccgagatcgctccattgcactccagcctgggcaacaaagtgagactctgtctcaaaagaaacaaacaaaaaaatcccttctacagaataatataaaagaacaaataatacagtgagaaaacatgacaaaggacaggaatagaccagccatggtggctcacatctgtaatcctagcactttcggagactgaggcaggtggatcacttgaggtcaggagttcaagaccagcctggccaacatagtgaaaccccatctctttactaaaaatacaaagaaaaaaagaattagctgggcatggtcgcgtctgcctgtagtcccagctactcgggaggctgaggcaggagaatcgcttgaacccgggtggcagaggttgcagtgaaccgagatcacactactgcactgtagcctgggcaacagagcaagactctgtctccaaaaaaaaaaaaaaaaaaaaagacatgaataggcatatcataaagaaggaaacgtgtatgacccataaatatttgaagaggtattcatcatgtctgattatgatataaatgttaaacttacttgaaattagttgggggaatacttcctctttttctgttgtctctaagtgttcatataaaattgggatgatttgttccttgaaggtgtagtcaaacatcctgtaaaaccattggggcctggtgttttctttatgggaagattattaaccacagcttaaatctctttaatagttaaagaaatacttgtaaaactgtaggttttttttttgagtcagatctggtaagtcatttttctgggaatgtatccatttcatctaagttttcaaaattatttcataaagctgttatgatattctattatgggtatgtatatatacatatgtgtatatatatgtatatattatatatttgtgttggaaggttccaaactatgacttcagtttctttagtagatgtagtgctattcaggttattttttcttgagtgagctttgatggtatgtgcctttctgggaatttgtccatttcatctaatttgtctaacttatggcatgaagctatttgtaatattctcctattatctttttaatatccatagatttatagtgatttctcatctttcattcctgattttggtgatttgtgtcttctctctttcctctcttgtttcttggtcagtgtattagtcaaggttcttcagaaaaacagaaccaatagaatgtatacgcatgcacacacatgcacacacacacggaggatttattatgagaaactggctcatgcagttgtggaggctaagaagtcccacaatctgctgtctgcaagctggagaccaaagatatcagttgtttaattcagtctgagtttgaaggcctgagaactggggctgctaactgtgtaaatcttagtgcaagggccagatgagatgagatgagatgtcagggagaaataaggggcaaattccttcttcttctgccttttgttctatttcaagccctcaatggattggatgatgtctacattggagagggcaatctgctttactgagtcccatgactcaaatgccaatcttatccagaaacatcttcacagatacacccagaaataatgttgaatct

SEQ ID NO: 98061 - DNA, 23676 bp, Homo sapiens
tggctttaatctttttaaacttgctcttattttatagcagcatatattctagtaaagagaaaaagaaacttggcattaattttattttagcatcacttattacagtgttaatattgtaattacgctttgtcagaagataaaatattttgtatagctttaaagtagtcctaatttattaactccaattcttttaaaaagtgacaatccaaatatatcctaggggaaagaataaggataaaattaatactgatttgctattttgagctgaccttaaaacaatggttttcctcaacctgcagcattagcatgggctgagggcttgtttgaaaaacatgcttaggctccaatccagacaagagaatcagaaactcttggggatggagccaaacaatctgtttaaactagctctccagttgattctaatagctacagattgagaaccacaaccctaaagttctgaaagtcagaagctgagtcagaaaggttaaataaggtatctcacccaggatacaccttggttttcctctacatctgctgaaaggtctgtagggggcaatgaactctaaaaccattagttgttttcaggatttattacagttacacattagaatcatctggaaagcttcttgaagacacgggggtggggagagaaaatgagaactggaggaactgggcagtggcatttaaaaaaaattcccagggtgtctccaatgtagcattcaactgagaatcactgagttagagcaggtctgcttaaggccaagcctacctcctctaccttagctgcttacctaaccttctcatgttctcatgtaaaggctgaatattctccacctcagtttatgcccagaccactagatatacatttaatagctgccaatgtagttggaattgttagtgtatgtaatgatttagggccaccacaatctgctttttgtttcatgaactgcgtatctgtgcgatctatattatttctacattagttaccaagtttctggcaataataagctactatcctcagaaaataattccactgcataatgactaggataagacccagtgtctatcacagcgtgcatagtctgaaagcgtcagcaataaaagcactgaagaaaaactgggtaactccttgggccacttaatgagatcacaaatggaatacagaaatatatcttcttcaaaatgctgctcaggtgatttttaaagtagcaaaaaaaaattgtagatgaatggtaaggcttcttagcaacaacaacaaaaaaactgtagacgaatggtaaggcttcttaagggttacaggttctcccatacagcagtcacaccctatccacaggggttatattccaagacccccagtggattcctgaaacctcagatagtacagaacctaattactatcaatcagaacatggttctgttcatgtcttctgcccacaaactgaataccttttccatcttaactgagctcttatcatgttatgtgaccataatttttgtagtttgaagtgcaacagtaaaactagcaaaaatgtctttttctttcttcacaatttcatggatagaagattcattcctaccatagatcttagcaacctcagcatatgatttgtttttttccttattaagccaagaattttcaccttttcacttaaagggagcactttatggcttctctttggcacatccaaattgccagcatcactactcttgcgctctgggaccgtgattaagtaaaataaaggttacttgaacacaagcactgcagtatcacaacagtgaatctgataacccagatggctactgactcatgggtggggagtgtatacaatgtggatatgctgggcaaaggaatgactcacctcccaggtgggattaagtgggatggcatgagatttcatcacagtactcagaatggcacacaatttaaaacttatgaattatttctggaatttcccatttaattttcagaccacagttgactctgagcaactgaaacagctaaacagcaaaaccatgaataaggggaaactattgtactccctgttaagtcactgaagataaaaagaaacaacccaaacaagctttaaagtaatctctcacttagctatagataaaaagggtattattatgtttgagatttaatatctttaagtatactgaagatgtgatagtttagaaaataatttatagtgttttgaagaggattcaggagtcagaccagagctaaagactaaaacaatgttcctgagacaaatatcagactgccgaagaagctggcttccaacagctctgcagaagacagccaaaagtagttgtatcaaccattgtataattatgttgtactttgatattaacagaaactttatttcataagagtctcaatccatggatacttaatattacaaagcacattatttgttagtagtttaaagatgtgcattaagtgatgacattcttagatataaaaccctacccctccttcaaaaacaactggcattttagtactccatgagaccagtatttagctacagctgttcttttacttttaaattaaggtaatttcctcttatatttcttaataaattaaggtaattactttcaaattagtttagcttgaagatttccaaaggttatgactcaactaaatttggaatcaacagctgatgagatatactgggcattttaggcagtaaaggagctgaggttgttaaaggacacttaattttataagaaatgcttacattaatatacacactgggtattgtctgatgactcattgcaaatatcctcaagttggtcaacatcttgatcctccaaactgttactgtctgaaaaaataaatatacaaaatcaaaaaactaaacttatgtattacatgtcagcaaggcatatgtaagttagacatatgtaatatgtatggtaaaatgtattacttttaaaaagttggaacaatatttttagctaccaaaaattcaatgcatcattcagaaaatggaaaattctgattaaatatgagaaatatggtttttaggtttaaaatgtcccttatttgtcaatgtaatgtttaaagaaagatatggcgatacagtagaaatcaacttattgaaattacaaaacattgtatcaaccaaaatgcattgttatgtaaatgtatagaattaagcataaaaagctaagcatccacatattaacttggtaatttctaattggcagtaaaatttattgattcatttgtatactctgattttcctaccataccatgtaaaaactaaatcatgtaaaaaatatataaaagcaagtcctcttcctctctgattatagaaactaagcatctttagtttaaaaacatttgctaaatattcactatgtttcaagtacaatatcaaagctattagaaatataaggacgcagctgagactggggatgctggggagacagacagaccatgttaaaccaagcttgtccaacccgtggcctgcaggccacatgcggcccacgatatctttatatgcagcccaacataaattcgtaaactttcttaaaatattatgaggttttttttatttttttttagctcatcagctattgttagttatcattagtgattttatgtgtggccaaagacaattcttccagtgtggcccagggaaaccaaaagattagacacccctgtgttaaaccattgtgatccatgttattaagatatgtgaaacctcattactactcctaagtctgttctttctggatcttagctaagaaacattcactactcttatttagaaagtcatctaatacttacatttgatttcctaaatatatttgaatctgttccctttgttgtttttttttttttttttttttttttgagacagggtcttgccctgtcaccaagcctggagtgcagtggcttgatctcagctccctgcaacctctgcctcctgggttcaagcgattctcctgcctcagcctcccgagtagctggaactacaggcatgtgccaccacacttggctactttttgtatttttagtagagacggggtttcgccatgttagccagactggtcgtgaactcctgacctcaagtgatctacccacctcggcctcccaaagtgctgggattacaggcgtgagccaccatgcctggccttgaatccattcccttttcattggtaacgccaaagttcagggcctcatagtctctccacagttgtgactgtaatagacattttcctcttctttaactcagtggttgtcaataaaaagataatttgcacaacccagccctcccccgcccaagcctattcgttcccatttattcaacaagaatttactgtgtgtctgcctacccactgctttctagatatcagcgttaatgcagtgaacaaaagacaacaatctctgccctcatactgcctctaccgtagtcaggggatacagacaacaaacaaaagtaacgaatacaatacatagtctctcccatgatgatagggtgctgtagagaagaatgaagcaggaaggaggaattgggacagttagaactgtaagtaaagagatcaaggaaggcctcattcaaacagtgacatttaagcaaagacctgaagtagatgagggaggaaattcgggggattgagggacggcggggaggggcgcattaaaggcaaagagattatataacgtactgtacctaaaatatacaaatgctagttactatttctggttttaaagagaatgatgagatcaccttagaaaatggagccttaaaaaactgcttcaaaggcggggctcggtggctcacgcctgtaattccagcactttgggaggccgaggcaggtggatcacctgaagtcaggagttcgaaaccagcccgaccaacatggtgaaaccccatctctactaaaaatacaaaaatattagctgggtgtggtggcgagcgcctataattccagctacttgggaggctgaacctggagaatcgcttgaacccgggaggcagaggttgcagtgagacgagatggcgcatttgcactccagcctgtgcgacaagattgaaactccgtctcaaaacaaaacaaaaactgcctcaaagccgggcgctgtggctcaagcctgtaatcccaacactttgggaggccgaggcgggtggatcgctcgtacccgggagttcgagaccagcctgggcaacacggtgaaacctcatctctacaaaaactacaaaaatcagccaggcttcgtggcgcgagcctgtagctcgctacttttgaggctgaggtcggaggatcgcttgatcccgggaggtcgaggctgcggtgagccgagctcgtgcccctgcactccagcctgggcgactgggcgagatgccgtctcaaaatacccataaaaacaaaaacaaaaacaaaatactgcctcaaatacaagcactaagaattaatgaaagtattcttttggtacagttctttttgttcatcaactgaatcacgctgcaagctgtgaagtaattaagggaacttctgcaactgtgcagtaaaagggtaaacctgatagtgtatttaagtagacgtactttctggtagttaattacttcttgacactagggggccactaaatacaagtccactcagcatttgattcggtgcaccaaaatgcctcagaaatttctggaatcagtcctgtacctccaaaaaaccagaatgttatcttcttcttttctaacagctgcaaagccccagtagttccatttttctgtacactaagttttcattcctcagtatccttcacaatcatgcacacattacacagagtgaccggaacaaagatgagtcgacttcgccgaatgatagagaaaaacttccatactgagcgaacaccgaggggagtccggaggccctgttgtcctcttccgtggctggctgtgtccgtcgcagcctgaaaggtcagcggtacccagcgctgtgacagggtcacaggcgcgcgatgtctcacagctcggagcagtactcacctggcattaggccgcgtgccgcaggccagctctcaccgctgggctcttgaagcaggaggcgcgagccgcsccaaagtctgcaacggcctcaagtctcgacgccagcctaggcaaaaggyaatgtatctaaacgaaaagaaaataggctttctccgctctaccgcctcgggcagccacacctccacacttccggcggtgtaccggccaaatgccgcctgccagcaacttccgtcctcctagctaaaagcggaaaacagaggctcggaaccgctgcgtggttcttgctcttcactcggccgttttaaarggtgactctttcctgtcccggcctgcgtggtgtgggcttgtgggtctttgagacccgaaaattgagagcgttttcgcactccagsggctgctcctggcggctctgcggccgtcaccatggtaaggaggatgcctcggacgctcgcgacacacagcgtctgagttagtgggacctgaggacyctggggcgctggggtagkgggtgagcggtggtaggcggaaatgagaactgccaagagaaaaggatggtagacccgtggggtgggctctgaggagtggaaacaacttcacattcgagacacagacggtatttgccagaacacaagctttggagcaagattttactctgtcctgttttcttttttctttttgatccaccgctaagagtcctaaaaattcctgatttcaccacaagcgtggttatcagccccagagcctaatgggaatatggttgtcccttgtacagtcttagatgtcagtcccgcccccttcattttactgctgaggaaactgaaggcgtccttgccaaagaccagacagctaatgaattgcgaagccgggcttaacggcccagatctaactgccaggtcctttctctttgtgttacgtctctataatctgcgtttctttgcaaaatggcattccatacacccttcatgtgattgctgcaaagtttatgtgatagcagttggtagcagcacaccttgttggttgttacttaacattgctctctgtgctggacttggctttgtatcatttttatttttgcagccttaaaatacgaatagactcacgcctggccgcgtgtttaaaacgtgtctaaaatgcaaaaagcatcccatacattgctggtgaaaagaaaaataatgcacttttggaaaacggtctggcagtaaacacacgtccacatgaagacttgcatgcagttgtttattgcagatttattcgtaatcacccaaaactgggaacaaccctgatacctatcatctggtcagcgggtaaacagtggtgtatccatacaatagcatactactcaacaataaaaaggattgaagttcctatacctgcagcaaattgggtraatcccaaaagcaagaaaccagattcaaaaggctatgtactactgttgatccctgtttcattctgggaaaggcaaaactgtagggataggtatcaaactgagggttgggaaagaggattgacttaaaagttacatagggaattttagggggaaatggaaattctttgtattttgattgtggtggttacagaactgtgtagttaggaaaaacttagaactgtatacctaaaaaggacaggttttactgtgtgtaaattatgcttcaataaaactgacttaaattttttaaatgtgaaatgaaggtgttattaaaaaagcaaattatgtcaaggaaaaaagatactgtaatcagttcatcccttttgtggtccagtagattttggaccattccctaatgagattattagagatgtaagccctgatgcctcatatcattcaagaccaaaatttaacttacatcatgtgaataaacttaatggtgcaagaatcatttaagtaagtgaacatttggatgaaacagggtctttgtgctgtgtaaaagaaagcattttagaataattgtcagtactttaaaaaattaaaataatatttcttccatcattatagccacagaatgaatatattgaattacacygtaaacgctatggataccgtttggattaccatgagaaaaagagaaagaaggaaagtcgagaggctcatgaacgttcaaagaaggcaaaraaaatgattggtctgaaggctaagctttaccataaacagcgtcatgctgagaaaatacaaatgaaaaagacgtaagtggtctcatttatttgtcataacaagttaacatcttttgagtaatcattattaaaacagataatcttgaatcttttttccttcttggtagtatcaagatgcatgaaaagagaaacaccaaacaaaagaatgatgaaaagacaccacagggagcagtacctgcctatctgctggacagagagggacaatctcgagctaaagtactttccaatatgattaaacagaaaagraaagagaaggcggtaagcaataacaattgaagtctttgttttgtttaggagaattacttaaattcaaatttgaggttcttgtttctcggtttaatttcaaacatgaagtacagctattattcccattatttagatgttgaagtctttgtaaatttaataaaaaacttgctttctcatcataaggttttaaaatttaagttataaaaaaaatttattagaatgccatatgaaattaaaaagctggtaaggagtgaatttcaaattcaatatttgtcttcctgtttgaaaacccacagtgctatgcagtcataaagaaaaatacaaatgcttcttatttgtgctgccctgtagtgccaaacttggttaaaaagtagaatggtggaaaactccctgagttgtcacaaaaaatgtggctttttaaaacacctgtaaatagattagcagaaatccagataaaagaatatgcagtatttatatttaaagaattatttttactgccttacactatttcagttttttcatagaatttgcactcaagggaggcataaaacatctggtgaggattttgtcttgctagtgatctacagatycatctcgggaagaaatacagagacatattaagaggtggaaacactcttccagtattatgctattaaacattagtaaacacatatactgcttatagaagtcactatcggctgggcaccgtgactcacgcctgtaatcccagcactttgggaagccaaggcaggtggatcacctgaggtcaggagttsaagaccagcctgaccaatgtggtgaaaccccacctctactaaaaatacaaaaattagctgggtgtggtggtgtgtgtctgtagtcccagctactcgggaggctaagacaggagaattgcttgtacccaggaggcggaggctgcacagtgagccaagattgtaccactgcactccagcctgagcaacagagcgagactccatctaaaaaaaaaaaaaaaaaaaaccaccacattacaggtggtattttctcacccataacacagcattaagatttttagcttaagccaaccatttatttaacatacccatgatatataaacttgttctgtttaatttgcagcttatgagacaatacagacctctagaagacggttgagccaaaaatgtgttgatggtcaagcaaaaaaaatagatctattactttgtacaactraaacatatttgacttattctcattgtcctttaataacaatataaacttttaactgtggcatatttttagggaaaatgggaagtccctctgcctaaagtacgtgcccagggagaaacagaagtattaaaagttattcgaacaggaaagagaaagaagaaggcatggaagagaatggttactaaagtgtgctttgttggagatggctttacaagaaaaccacctaaatatgaaagattcatcaggccaatggtaagtccttggaagagtgtaatgaccgaaatgttagttgactttattaaatcggataaagaacattatcatttcctgaaattctttaaattgatgtggaacaggttgaaagatatttttatgcaatttttgttattttattgacagaagttatttagtactttttccactagtcaaaaatctttagcccagtgcggtggctcacacctgtaatcccagcactttgggaggttgaggtgggtggatcacctgaagttaggagttcaagaccagcctggccaatgtagtgaaaccctatctgtactaaaaaatacaaaaaataagctgggcgtggtggcgggcgcctgtaatcccagctactagggaggctgaggcaggagaatcgcttgaacctgggaggcggaggttgcagtgagctgagatcacgccattgcactccagcctgggcaagaagagcaaaaatccgtctcaaaaaaaaaaaaaatcttttcagcttcgtgagagatttgaaaaagtagtatcataagacattgtcagtgaattctgacttttaaacatgacatattagaatcttcattttccacagtcatattttcctcattaaactagtgatctacaatatgcctgatattgtctaggtctcaaaacacttcttgtctttgacagcagttcgaaaacttgagtaggactgttttataagagtcaattccagtttgataaggaaagtatctaaatgcttttgaaaatcattgaaaagccgggcgcggtggctcacgcctgtaatcccagcactttgggaggccgatgcaggcagatcacgaggtcaggtgatcaagaccatcctggctaacactgtgaaaccccatctctactaaaaaaaaaaaatacaagaaattagccgggcatggtggcgggcgcctgtagtcccagctgcctgggaggctgaggcaggagaatggcgtgaatctgggaggcagagcttgcagtgagtggagatcatgccactgcactccagcctgggggacagagcaagattctgtctcaaaaaaaaaaaaaaaagaaaaaaagaaaaagaaaatctttgaaaaaaggaagataatttaatatagcttaatttctgttgaaggcagcaatagtaatgtgaccccaaacttccccacccctggggagaaacatagttgaagatatatttttgcaaaatcccttcaaagagactgaactattctcccagttagatacacagcctcaaaaaaacaaagtatcagagagaggaaagttgcaacatgccataatcctagtgttcaacctgagtaattttttttttttttttttgggacggagtctccctctgtatcccaggcgggagtgcagtggcacgatctcggctcactgcaacgtccgcctcccgggttctcgccattctcctgcctcagcctcccgagtagctgggactataggtgcccgctaccacgcccggctaatttttttgtatttttttgtagagacggggtttcaccgtgttagccaggatggtctcgatctccgtgatccgcccgccttagcctcccaaagtgttggaattacaggcatgagccaccgtgcccggccaacgtgagtaatttttaatagattaaaatattggcaaatagcctgtttctgtaaataaaattttaatggaacacagtcatgcctgttcatttacatattgcataacccctacccctagaattgagcagttgcaacagaggccatatggcctgacaaagcctaaagtgtttacctattgggttctttacacaaaatgtttgcccaccccggattatatcatggactcgacttgttttggtttcatattcatagtctgaatatattttggtagccttaacagttctacagggagagaatatacaagtcaggctattctaggttttctgtagtttcacagatttgtcattataatcagatggcatcctgaatggtgtcagtttcttacaagcttgattaatgagtctgttactaagaaactgatttagtgattttttccccccatccccatgcacacaaaaatgaagactgcaaaatgttgtgacgtttaaagtactacaccctaaaagaccttattaggtgactgggtgactccataaccagtttctgtaacaaagactcctctgggtctcctccagtctcatattgccatcaacctaaagaaagctgacagtccactccttttttcatcatggaaggtagccgagttatataaagacttggaatcaggatattaaggtttgagtctgtttaccactcaccatttaatctggaaacaagtcatttaacctgctgatccttgttacatcatttgaaaacagaggagaggggatgtgtttgttgtgaggttattgtgtttaagtgagccagttgtgagctagcatagtggcctggtatatataaagtccttagtaagtctaagtgtagatgactagacagtaaaaatctgggtatgttgctaggtagctattacagggtgaaaaaaaaaaaaacttttcagaggctagctgtggtggcctgtaatcccagcactttgggaggctgaggtgggtggatacgttgagagcccaggagtccaagaccagcaggcaacatggcgaaaccccatctctaccaaaaaaaaaaaaaaaaaaaataagctaggcatggtggtgcgtgcctgtagtcccagctactcaggagcctgaggtgggaggatgtcttgagcccaagaagtccaagctgcagtgagccaagatcacgccactgcactctggcgtgggcaactgggcaagaccctgtctcaaaagaaaaagaaattcttaagtatttgtgtgggtgttttccccacatatttatactgtaaccatcagctttttactctgtaaaacatattttgttagcttctttaagatgacattattcaaccatagttttttggagatggttgaaaaagataagcgaaaacgaccactactcatcactgttaacattttggacgtaaacattcttatgttgtgtttgacttactagggcttgcgtttcaagaaagcccatgtaacacatcctgaactgaaagccaccttttgcctaccaatacttggtgtaaagaagaatccctcatccccactgtatacaactttgggtgttattaccaaaggtactgtcattgaagtaaatgtgagcgaattgggccttgtgacrcaaggaggcaaagttatttggggtaagtgaatttttgaatacagggctgctgtgttctgcagtactaatagaaatactattcaagttgatgtattaataaaatatacagcaaatttttttaatgcagtagagctaaaacactgtaaatcagatgtaaatatttagtaaaaaatactttatagaaaaagttgttataaatacaattgttttaaaatttagcttactggttttagttacataaggtgtaatacattctgctagatttatttttatcctttttagccaggcacagcagctcacgcatgtaaatcccagcactttgggaggctgaggcgggtggatcacctgaagtcaggagtttgagaccagcctggccaacatggcaaaaccccacctctactaaaaatacaaaaaaatcagccgggtgtggtggcgagcacctctaatcccagccacttgggaggctgaggcaggagaatcacttgaactcaggaggcggagcttgcagtgagctgagattgtgccactgcactccagactgggagacagagcaaatctccatctcaaaaaaaatttttttaacctttttaataaaaattattataagggaagcagatgcaaagttatarctaagaaatattataagaaaatagaataaattaaccatgagcagaggaagggaggcatatatcaaacatattttaaaagtgaggtcagcttacatgaagtattagccaatgactaaagatgtcttccgtaagaaaaaatttcttttgccacaactttatattatgtaaatacttcttatatttacatgctaacattaagagaaaatacctattacatttaaagaaatagaactatctgtcccacgtaggtaaactgatcattgaaactgccaggagcggtggctcagcctgtaatcccagcactttgggaggctgaggcggacagatcatctgcagtcaggagttcaagaccagcctggccaacatggtgaaaccccatctctactaaaaatacacaaattagccaggtgttgtggcccacacctgtaatcccagctgctccggtggctgaggcaggagaatcgcttgaacctgggaggtggagcttgcagtgagctgagatcgtgccattgcactccagcctggatgacagagcgagactctgtctcaaaaagtaataataataattgaaagtgatttaacacagtttagttcgttctgttaattcccattaacaggtctcagaaatcatgtagaagcttccaggctttaaaaagccccctcgctatctgggcgcagtggctgacacctataatcccagcacttggggaggccgaggcaggcggttcacttgagactggagttggagaccagcctggccaacatgacaaaacgccgtctctactaaaaatacaaaacaattagccaggtgtggttgtgggtgcctgtaattccagctactcgggaggctgaggcaggagaatcacatgaacctggagcttgcagtgagctgagatcatgccactgcactccggcctgggagacagagcaagcctccatctcaaaaataagtaaaataaaaatattttgatcttttttaataaaaattctttattacaagggaagcagatgcaaagttataactaaaaaaaattgtaaaaaaaaaatagaataaattaaccatgagccgagggaggcatacaacatataatcacactagatcagtaataattaaaacagaaatgtgtcatgcagtaattttaaacgccctcatttgcttagttttctacctttagtacccagatccaatttctttgaaagggaagaatacacgctacaacttcttcagtcattggtttatacttcatgtcagctgacctcagttttaaaatatgttgttaccttgacttgaaactcatttgaaacttgatacattttccaggaagaattatgtgaaaaagtgacaatgctcaggtcaatccacaaaagcctgttaatgcaatgtactaataacatggagctggccattatttgcaaaaacactatttgtatgaaaattgtattcagaactcaaatttgtccttaaatgattgaattttgtaaaatctcatttatcctttatggttcatttcttatttattgaaagtggtaattagaaatattttaggcatggctgggcgcagtggctcacacctataatcacagcactttgggaggccaaggcaggcggatcatttgagctcaggagttcgagcccagcctgggcaacatggcaaaaccacatctctacaaaatacaaaaacaaaaaaattagccaggcagtggcgtgtgcctgtggtcccagctacccggaagactgagtgaggagaatcgcttgagcccaggaggcagaggttgcagtgagccagatcacgccaccacactgcagcctggggaataagagtgaaaccctgtattaagacaaaaagaaaaaaaaggcaaaagttatattctttaaaattaatttttattagctaacaaccctcccttttcccttttttggttttgttttccttaggaaaatatgcccaggttaccaacaatcctgaaaatgatggatgtataaatgcagtcttactggtttgacagcaatttcatatataattattgaggactacacaccaattgaagaaactgccattactgtgatgtttctgaatactaccaaacagccatacatgtctgcaatgaagagatttattaaattgtaaacattaaagtggtccagttttataaatggtctttattttgaaatacgctttgaccccatgttcataaaactgaatgattgaaaaaaagcaaatatacaaatatcctacttcatcaatatctgcatttgtgagtgggtattcagcaatttcctgaaaaaaccaccagtgttcattgaaaatgcctttcaaaaaggttaatacacaattatgtgtctgagaatttaactgaagtatcttcaaaatctcgttaatcattaatcctaaaaaaggtaggtagcattaatacagatgttaagtttatagtgtttgtttacactagaagtatgtgagaagacactaaaagttcagaaatcttagagaaatcttttcacctgtgaaatccagtacagcaaaggtctagtgaattcacattctaaacatttttttcatctcatttaccatgtataataatacctacttggcactattttctacttgaatcatgaaaatgaaaaaaatatactaaagtctttgtactctcttagcattttctgtattctaaacaatatatttatactttcagaatagtattaagaattagtttaagtaactccagctaagttttaaaaggaaaaagaagactgcactgattccctgaggagaaatttatttgcagttacttagatgatgtaaaaaggtaaggatttacggttgtaacttggtgaaagcacttttgtgatctgttatatgttgtggttttaaggatggcgtatattacattaatctataatcaccacattgttttaaattgtttattttttttttaaagaagtctgtcttcagagtacaaccaatgtgattaattgtgcctttaacaaagtcattcaatgtctaaacaaattcagtatctgaaacatcttcatgaggaaaactgaaggaaargaatttaaaaacacagaccaggaaacaatcacaaaatatagstttaattactacttttaaacttaaaaaaaaataaaaaccaagaaaacaaacataggtactccagtaagacttgctactctgaataatgtaacattttttctaagttctataaatatatactggaagttttagaacacatacagacgcttaggaaaagaaaggctagttccttggaaatgacgatccaggatgatacaatcacttgatgacagaaggtaagcctttcttacaattagattttagcagataattttaccactaatataaatgggtgatgtgtggatcacaagttctagaaggcgaataaaaatactgactccaggtaatttctggatactacaaaaatgaagtttgcttgttttttttagaaccaaaaatactatcttgtaaggtacaaagaaagcttgatattaagtatgaaaacataagcataacatttgtaactaatcacacccatgaaagacgactagatgacacctgaaacatttttcaaaatactgtaacacagatgagtaatattagtataaattttttatgtacattaagatctgtttcagtttgctggtgtgaccaaaccttagaaggtaatcccaagggataaagcagaacataagagcagatatttagatattagtacaggctcaatttgatgcaatcataaaccttcaagatttctagtcactgaaaccccattgtaggtagtgttctggagtctgctataagtaaatctttaatgactagatgttttccttaccatctacactgaatggaaataccatgaatatagacacattttaagtagaagactgacgttctaaatcatgctgtttgattttataaaaaaatcataatagaccctctcacctttaaaagttgtagaggagctttataataaattcttaaatatactaatttctgtgatgtctagcaattgaataatttaaacttgaaagaactaaaatactaataaccatctgctttatattacacaaggaaatatacacgtatgtacataaaaagtgaactcccttcacaaataagttcacaaaggactatgtgtaatgtgactggacattcaacaactagactagccggttgaaatcacattttcagtcctctgtaattgtgaaattttttctaatgccttgcaaaaactacagataactgattaagttcatgtaggttccttattgaagataaattgtggtataaattctatactcaagttactgaacatgagagttaggtttttccaagtgatctaacttttccctctataatctataaaccccaaaataacaatttctgtcagagagaatctgtaacagaagtgttcttgtgtgctgaacaaaaaacttctaaattgtttacaattcacttactatttaacccaaacaagtttaacaagaataagtttatactgttagcccccaatggtcatatatgattaataaacattttttgtaaactcaactatattcacacatcaagagttgagccagtgagctcaatctttaaaaaactacacttgtctaaagaaagtcttttagtgctcacttcggcagcacatatactaaaattagaacaatacagggaaaattagcatggcccctgtgcaaggatgacacaaattcatgaagcgtttccatgtttaaaataatttgaaaagaaagtattttaaacaaatccaagtaaaaataaaatatctacaagtgttttcaaatctaagaaatgaaacatgtaaagattaagaatttactgaatcttaacagagtatttccctttgtgatattgacagaagtttctcataaaatgtataaaacagcataaatgtttggtagattgactaatagtagtcatacttttttttttttacttagtattagcatttgttgaaaaaataaatggccaaagtgctttaattttcatttagaatgaaataatctggcttacctttgactaattaaagaaaatatagggtaatacaattgttcaaaatctaacacaaataggagcgtttactatttttgtctgctttaagattttaacttgatcgaaaataccaacatccccaaacaaaatttactgacctgacatcagcttactatagactgaatacactttcaacatcagtccttagctacctcaaataatgacacaaagtcttagtttcttttgcataaggatcaagatcaagctatttttaaaacaatttaaatggtctcaaaacattctccaacttaagtgcaaatttgagtacacataatatttccaaagagtagaactgtttttagattatctttggattctaataaccattttgtccatttttaaataaattacaaaaaataacagttcagtgttttttttcttcaaattttcctaggcctttgttatggcaacacaatatatacttaacaggccagcttgcaaccagtactcagtacaaatcaaaggatgattgaagcctccaatatgattgaagcccttgtaaccacagctcccccaaaggcagtttacccctgccatataggtctaacactgggggcagttttactcctgccatataggtctaacattgtggggtgcacctccaaacctacccaaaaatggacatcaagggcataagccggcaggcaggaagatctgttgattggagaatcactccatgagttacagaagtagatgaaagctgtgggggaatataaataagactgtagaattagggaggtggcaagatttaaggagatgccttaggaaggagcctcatacttctgaaatatagatgttaactgggttgggataaaagtaaaatctccagcttaatttatctatctgatcaggaccagaagtccaaattaaaccatgtctccaaagtatagttgtgatttttacctgattaaaggtgaaagtctaaacttctaggcgtctgcacatatgcagacaaaaaaaattacagcaaactaatacttcaaatgaaattttaaataattagtccccacatgccacagttaaatccctgacagtactgttaacatcagatgatagaatgaatcagaaacagattttatgtgtacctttccatagatagtgaagtcaaaggaaaaaactgcatctatatctaggattaagaggccaaaaccaaaatatcttcatgaacctttgaccgtaagtttctgtttttgtgctctcatttacttgaagttatattttttctaatttattgacacttatttttgtttaggcatgcctacattttaaaaaattggtgattagttttgaaatttaaaacttctagaaccctcaccaagttttactattaaaacccttagtataaaagatttctgtgatccttataagtaatggaaatcctactactttcacagctttttaattatatttttgaaataatggtcagatgtaccacctgataaagaaaatataatatgatctggtttcccaaaattgaaacatggttaataaaaataaaaaattgcatttaccaaaaatagcctggaaaattaaaaacaatggtgaattctacgttctaaagggaagcaaaaaactgcatagtaagtaagttcaaattgaaattttggaaatttttgtcctgtgccccatgctgtttattaattaccatattttaaaaacaacaactatgttacaaagaagaggatttatcatccactttcttcttccttcaggtcagcttagctttcttcttagcaggtcctttatgccctttggcctttcttcttaaattccgcctgtctaccacaggcacttccacttctatttcctctgagctgctatccacagctttttctgccgattgtgtaaactgatccagttgctcggaagatgcttcagactgctcctctgactgattcttctgtcctgcattctgtgaaaatggcacgtcttcaagttcaacctctatcaaagaactctgaggaagagcagtagatgtttcctggggctcagataccccctcctcaccctggtcttccaatgaggaagtagtattaggagacaaattctcagagaccggttcttcggaaaattcagctatcacagagtttggaaaaccaccatcagatcgttcttcatttgacatagtagcaacattgtctgaactcccaagatgtgctttctttcttggaagtagggacaatttctcttccatgtgccccttttcatcagatgtgccttcatccatcaacatttctgagtcaggtatacgtggggtctgaaaattaaaaacctggtcaacaaataaacttgtactacagttctaaaaataaattctcaggctctaatatgcagtgacactgaactagaatttaattcggtattcattactcaaaatcgagtatttttttgaatttctgttctgctatatgtgtatatattctgaatacaactcaatttcttcaaaattgtttcacatggtaattttaatactaagttattactttgaggatataatgaaataattatttcataattaagacacattaagcttcatatcaagattctttaaaaccatgaatcaactcagtttttttagtttcctggtgttactggagccagaaccaaaaataccttgggacttcactgcgctaccacactacgtttgactacgatttcattagataagttagggcaatggaagttttattcttttgcttaggtgagacactaataatgccatacaacagttttttagccataagttgtaatattcaaaagtaacaaaattaaatttcttttaaaatactccaacaagttttttcccccactaacctaatctgtctgcctaattaaaacaaatataaattactgttttggtcatagtctatgtaacaaatataggtactcaaatatttggtaaataatgctttatccaattttctaagcatttcctaactacaaagtattaaaagtaataaaactcattttgttaccacatatcagatatgaataaggttattatttgaatttatagaatattactgattttcttataatatcaaatctagtataaaagttaatcttcctaaagcactgtacatgtaaaggtggaagcaaatatatataccatgcaccctcctcgctaatgtcaccaacattggtaaactttattaaaaaatagctcattgcccccttaccttatctggtgcatctacctcagggggttttgaagattctaccaccagtggaacaagatttgtagagtcttcactggaattaaaaggctgcaattttaattcttcatctaaaacttcactagtggagtcttcctcttctgttataagtgaggtcttaagagaatcgtccattatctcaccattcataggctctaattcagattcctacaccatgaggagagagggaaaaagtaaggacatgattacaaactaacttatttgtcatgcatgacgggtcccttctcagtgcctacctatcctacaccaagactcaaatttacattataggacatgggttaaagaacagtcttactgggggaaggaggaaactcataaggcaatatcagcaaaataaaataatcctgagtaccccgtactcccactgctcttaaggaaagatggggcaggaccaggatgctctgtggacacacagtatgggtcggagattcaatgaaaagaccctacccacttgttgttcctccttcttagagggcaatcagggaaagaactttttcaggaaaaaggcaccagacagagtatagacttgatgctagctctttacataacaccagctgttcagcatctggaatctatgggaaattacagttttctgtgccagaggtaggaagcactaccagtcttatgggaagttcagtttgggtgctgcatcttgctgggaggagagagccctagtctcagtcaacaccagggtcatttctgaacagtcctgctccttgcatatcattaaagtatggaaatgctatttgataacatgaactctccaatttctaaaattctcccaatgtttatccatttacttctatttaatatcaagtatttctaatcctgacattctaataattaaggggaattttattaccattattaaaattataaaactgatgcattcaagtgttcacaaatagatttgactgtgtaggacccctaaaagcatatcaaggaaatttttccaaaagagaaatcacggtttttaatttttctatagtaaaaaatttattaaattgttctaaaataaaaattgtctataaaatatctattttattatatcatatgatacacagaatagagttcacacagaaggtaatataaagctcataaaaatgaccagagtcgagagacatataatctagagttactggtcattcccatagataaaacagttgaagtcatgagatcggatgtattttcaaaaaagataaaatgaaccaaagttcagaaaatcaaggactttttctagagtgtccacaataagggggaaaaggcaagtaggagaagagtcaaaaaataaaaataatacttcagagacagaaaaaacaagaaaccagcatggccaatatggtgaaacccgctctctactaaaaatataaaaattagccaggcatggcggcactcgcctgtagtcccagctacttgggaggctgaggcagaatagcttgaacccaggatgcagaggtagcagtgagccagagagatcatgccactgcagtccagccaagggagacagagcaagactccgtctcaaaaaaaaaaaaaaaaaaacaagaaaccaaagtgcaatagtattataaagtgaggagactagagaacttcaggaagagagggtaatcaacccaggctaaaaaaa

SEQ ID NO: 98062 - DNA, 50896 bp, Homo sapiens
ttcaggtatatactctgcttccctttatgagctctcccaggcctttctgtgttctggatttttctttgtagggtctagctgtattgcttaagtgtctatagcttgctcaactgcaggacccttcctttgtcctcactttctggtattctgtggtatactcacaaggcatttctactgaccacgtggccagcaaagccttttgtttcctatctatgtggcttcggcatctgcaccctattccttctgaccctttacaaactgaatgcagcctggtcctattagctctcagagtcttattttgtgagcctataataataagtggtcttccctaaagaggaaggacaggaaggagatggctaactttaagggccatggaaaatctcatgaatagaaaggcattctgggaatgtttagtatatagaagagggacaagtcaagaatataatgaaatttgataaaattacctggtgaaatctaaactgtaaaatcccatattcatagcacactgaagtaatatctggtctgggaacattatccaagatatccaagcttctgcttggggatcgatcagagcttagcagagatttcttagcagcagctcttgtgtgagatgggatgctcaggtctaagatccaaggaattcttttggattagacccagggatattggaagcacaggccaactctggggagatgaaacgggcaagaactgggtaagggtacagcataccaagatgatgtagggttaagttccacccctaactgggaactagaacaaaaccaagaaacaaatgctgaaaagcgggtaatatgtggtgggctgaaacgagctgcttatacatgtcatatgaagagaggcttaaactagatgtttatacaagtctcaagggtcttggttcctccaagggaaaccatggccatagcctcttaccagtgggatgaaagcttcaagaatatgaccatgtttggtgtccattggctcagggccccactgcaattgagcctgaggaacctagttattcctgttagcagttggggagagctctcaggagagctgacaaggacttacagggagctggagagctcaggataccttaaccacctgtgttagggtctaccagggcaagaggcagaggacagacagggacagaaggaggcaagccattgctcagagccttggggccaatgttgtcgacttcctatctaagccctcactcatttaatgcctcttctctttggcagccctctctgggagatggttcaggatggcattgacctcaagagcatcaagtggacccaacactagaagaatagggccctgactttgtgctggtctggcccctcctgcctcaccaacccgtgcacaaccagacaccttgttacacctagtggatgctctagattggtatagaccagttgacttcagcatcagtccacctctatgacagaaacacaagaaaactgtctttccctagcttcagttccttgggtgtggagcactccccatttcttctcgggtcttaaagtgtgtggacattttcatcccgaagccatagagacatttgctgtcatattgctgctgggcacatctgtgctcttggtgaggagagcaagaggaaccagaagaagtctctttggtcagggaccatgatgctctacatggacatttgagtcttcgtcttctgctgctgctcggctggaccagcttctttaacagcaagcataatccacttcaatgtaatattttctgtagctccaaaggctatctcttcatattgactgcagacagactgaatggacagtttcttagagggcttgtctcctttctacccttgtcctctttcctttcctttgacctaatggagctagaaatatgtctgtgactccaccagttattctaataatttgttttcttgaaaattgttaatttcaagactggagaaataaactcaccttctatttactctgtgactttatgagaggttgagggaaaagtggaagctgtacttgggaattgtggagaagaccgccactccatctgatttgcataaatgactcagtgggcttttgtatctcttcatttaagaattatttgaatgcctgccaggagccagatttgttctgggtattaggaatacactggttaacaggaccaaaaaagaccctgccctcactgagttttaaattttagtggagagatggaaaataattaaacaaataaacaatgttatagattgtgataagtgctatgaaagaattaagtggtaagaggacatagcagggaaaacctaccatgctgggtgtttgaggaaagtttttctgaggaggtagtgcttataaatatgaagagctcgctaatctagaaatgagaggtgagaaggaatggcaagagctaagggcctgaagtgtgataaagcacaaagtattatactttagaaaccaagagaaggccattgtaactagagcttttcatttgtgggtctgaacccataggtgggtagttaccagtacttaaaaaaggagatagtatgttagagtacatttatgcatattttaagaatatattttgatgatatatttgaatttgtataccaggttataaatgtatttcttattgtggataatggtcaaaaaagtttaattgcttttcatacttgccagtagcagggggacaggaaagtttgaaagccactgggctaaagtttggtaaatgtagatggacagtggaaggaggagatgaaattatagaatttttcttgttgaaaaatatcttttttacttagaataattttagatttactgaaaagttgcaaagatagtagagttgtagatctattaccagttttcctctaattaaaaagtcttacataaaactatgctaatttggctgggtgtggtgggtcacacctgtaatcccagtactttgggaggcgaaggtggatggattgcttgagctcaggaattcaagactagcctgggcaacatggcaaaacctttactctacaaaaaaatacaaaaattatctaggcgtggtggtgcccacctgtagtccaagctatttgggaggctgaggtgggaggatcgcttcagcccgtgagatcaaggttgcagtgagccttgatcgcaccactgtattcaagcctgagcgacagagtgagaccctgtctcaaaaacaacaataggctgggtgctgtggctcatgcctgtaatcccagaactttgggaggctgaggtaggcagatcacgtgaggtcaggagtttgagaccagcctggccaacatggcgaaaccctgtctctactaaaaatacaaaaattagctgggcatggtggtgggtgcctgtaatcccagccacttgggaggctgaggcacaagaatagcttgaaccctggaggcagaagtagcagtgagccgaggtggcagtgagccgggatggtgccaccacactccagcctaagcaacagagcaagactccgtctcaaaaaacaaggccaggcgcggtggctcatgcctgtaatcccagcactttgggaggcggagggaggtggatcacgaggtcaggagatggaaaccatcctggctaacacggtgaaacccccgtctctactaaaaatacaaaaaattagccgggcgtggtgtcacgcacctgtagtcccagctacttgggaggctgaggcaggagaattgcttgaacctggaggtggaggttgcagttagctgagattgtgccactgcactccagcctagatgacagagtgagactctgtctcaaaaaaaaaaaaaaaaaacaacaaaagaaaactatggtacatttgtcaaaacttagaggttaacattggtatattagtattaatgaaacgtgattttctaaaattattaaagatttttttatagagactgggcctgtgttgctcaggctggtcttgaagcaatcctcttgcctcttggcctcccaaaatgctgggattacaggtgtgaggcactatgcccggcctaaacttcagattttattcagctttcaccagttttcctgtcttttttctgttccaggatccaaccctggatgctacattgcatttagtaggttttgtttttaatggactatgttttacctacacagagcaaacctataaaaacctataaagcataggtttagtttaacagtgtggcctggttttccaacttgctgtttttggcatactgggctagcaccagtccagtctgccatagaaatcccgaaaggttgttggaattgtgataatttcaaccttttttttcttttttttaagtgatagggtcttgctcttgttacctgagctaaagtgcagtgatgcaatcatagctcactgcagcctcggactcctgggctcaagggatcctcctgcctctaactcccgagtagctaggactacagacttaagccaccacatccagcttttaattagcaggggcatgaagttcggggggctaggcccaaagcggcttgagaacagctttctttttttttttttttgagatgtagtctcgctctcctgatggtctccatcccctgacctcgtgatcctcccacctcggcttcccaaagtgctgggattacaggcgtaagccaccacgcccagccagagaatagctttttctataataaaataatactatagtgaagccgtggaggggtcacgatggatttaattttttttttttttttgagacggaatcttgctctgtcgcctaggctggagtgctatggcgttatcttggctcactgtaaccgccacctcccggattcaggcgattctcctgcctcagccaccctggtagctgggaccacaggcgccagccagcacgcccagctaatgtttgtatttttagtagagacgaggtttcgccatgttggccatgctggtcttgaacccctgacctcaggtaatccgcccgcctcggcttcccaaaatgctgggattacaggcgtgagccactgcgccctgccctagattaaaactctttttttgtttttttttctgagacgaagtttcgcttttgtcatccagggtggagtgcaatggcgccatctgggctcactgcaacctccacctcccgggttcaagcgattctcctgcctcagcctcccaagtagctgggaccacaagcaccgccaccacacccagctagtttttgtatttttagtagaggctgggttttgccttgttggccagaccggtctcgaactcctgacctcatgatccgcccttctcggactcccaaagtgctgggattataggcgtgagccaccgcgctcggcctgtataaactttttttttttttttttttttttttgagatggagtcttgctctttcgcccaggccggagtgcagtggcgcaatctcggctcactgcaagctccgcctcccaggttcacgctattctcctgcctcagcctcccgagtagctgggactacaggtgcccgccaccacgcccggctaattttttgtattttttagaagagacggggtttcaccgtgttagccaggatggtctcgatctcccgacctcgtgatccgcccgcctcggcctcccaaagtgctgggattacaggcgtgagccaccgcgcccggcccccggcctgtataaactcttaaatgggaaaaaagaatcaggttttggctgttttgtcaggatataataactagccaccacgttgtggtccatttaatcctcaaaaaacttagaggtaagcacaattcgctccttccgcggaaactggaagacgtgaagcaatttgcacagtcttgcagtgaagggccaagctagacactcatacccagcccacccgccagggccactagcccaaggtcggtcctgtgcgccaacagtcgcaagcagggactgaatatccccctcttagcacaaaacccagtaacttccgggagatcgcccgagaccgtcagcgcgcttgcgcggccccttgacgtcaaccacgccgttcctcccccttctggaacgcggagccgctgagcgggccgacggccattttgtgaagcggcgaaggaggtggtggctgcgttgggctccgggaagccgttcgggctggggctgtcggccgcggggcggaggcactcgcgcggggggtaattcggggtctgggttctggtgccgcgcagctttccccggtaagactcccgcagcccctgaacgggyggggctgtgcggggctcgtggtgccccttggtggcccggggcggggccttcggaggccttcgagcccgcggcaactagcgccccacacaaagggtcgaggcagggctgcagggggagtgggatgccacttaggcctctgagatctgagaggatgcaaggaggacgcaagaggatgagcctgcgtaccgaagtggggacgaggccatagcgaggactcccccgtggtctgagagggggcaggccagagctggctggctcagcggcctgcgagctaacggggactgcagtaaaaacacgcctacatcccgagtacggaggatttcttgtctcccccagtgaagcagaggttataactacatctctgtgcctggaggtggggagataatcgtagtgaggacactccttcaacccgaaatggaaaggaggcctttgtggcctaccagcaaaaggggacccaggtcacacctgtggggaggaagctgtagtcggtacactcctgtgagttcagaaaggaagtgtcacaaccggccgccttcgtggcctgaaggtggaggggtttgcagtgaaatgcctccgaggtccattgctggggaggggctttactcgagggtgtagcagttttgagaagccggcgtctgaagctaggaggtgagggggtggggtgagtacgcctcctgaggctctgagaattgtagtaagatgccaggcctttggtcccccagtagggaaggggctgctgtgagcagcacatttacggctccctcgggagaggatcctgtggcatttcaggaggacgagatccagtgggctgcggagggtgggtgcttttgatggagagttaattgagtttctctgaagcttggctgcattagtttgcagccacgtgaattgggtggtgggagggactttgaggatctacaggttagtgacggggttggacgccagtgcagcaggcttagctgctaggttgtaaacgtacgggctttttgtgtgcctccaacgtgtgctttatagtgacaaatctgaggggctcttgtgagggttactcagtattaagtgctaaacatttactcatctgcgtggtgtcatgctgagaattgcagactttaagagatttctgggccctaaaaccctccttggctccaggattctcagagataacctaatataaattgaagaagttggtagggaccgttttatattattcaataatagagtcagtataacccactggaaaaaagtgtgatggcaactgaaggtttgttgaagggagaggctaggcttgtgactgcagtattttagagcttcttgcttgaatggtttgaaatggtgtaatttttgcaaaatgcagtcttagcaacaagaattgtctgggaccttgttaactagtgtatattgttaatgcatctcagagcatttgcagtcgagaaaaatccctcaagtctggacacatagggaaatcttgttttttaaattatagaactacaatacaagactggttgtacttgtttttgaaatttggcagttttgataagaatggaggatttctggatttagtggaaagtgtgcagacattttcaaagagtataaaaagttgggaagaactgttacaggtggttcaaataacgttatggtaatttatgaagaaagtgaaatgtttggcgtgtttatacaaaacaatgaagatgtgcttagtatatattattggacagatttttaatgaaacagggaatacatttttatatatgctcgattaaatgtgattactttgcttatggattgtaatgtataattttcattttctttatgttcaaatctgttagatgaaaaatgtgaagctttagaaataattgtgtggttacttgcaacgtattgttacatgctaataccagtactctttgggctkctttcaccttctttgacacgtcaaatgttttgatgattgagtattgagagtttgggagttgttagtacagtctttaggtgtgaaacttgatgttgtgggccagtgtgttccaggtgctggaatccagtgacagtgttgatagtttttactccattttgcagagagccattctgtcattgtatgaatgtatgttttcttctgtagatgttgtaggaagaaccaagtgtcagtagttggttgcacaaaagatgcttttagatgtccctccctaaaatgcagagactgatgatgtccacttttatatcttttgtctggcccacaagtgcttaatagtaaatgttcatggagtaaaggaatattgttaaatgttttcaactaaacagaaaagataattttatctaaactacagttttatcagattttactaccacacccatataccttttggtttgcacaaaatttaattaagtttaaagccagcttttaagactcaaaaacagagtgaatgtggttgtttaggttagaagtataattttgctctgaagtgaaaatgaaggtagcaacatttttgttggcatttggggggattgaaacataacttaatatttttgacaggaggaatatcttatttagaaatgtcttctgatttgctgcctttgagtacggaatggaggttaatggaaaaattgagtaatgcgttataaaaagtacacatctccatcagtgtcagaataattttttcattaagagtgatcccagactttgatatatggtccatttgggaatggggaacaaaatcaagtggctgaaactgtggttgtttcataatgtttattataatgtgattatactgtttttagcattgtgcccgttgtgattggttctctgttgctaatctctgaggtgaacatttgagagtttgtttcttttggatctgaagaacctagctctgctgtaccctggttcttgttgattaaagagtgataactgaacaaagttaaagttcacttttggatgtttactaccagatgaagagtgaaaatagtcgttttagtttgtgccttgacttcttgatgaagagatttgttgtcagacatttttttctgaaattccaagtgattagaatggctagtaaatacgaaagtctgtcttgccataatatgttaaatttttgtagcagatacttgtgatttgtgcatgcatccggtattttgtcaagttgaagcaagcctttatgttaggactaattcctgataatatgaatggaaaacatactaaagccagcttcttgttttagatcttctgaagtatatcagtggctttaatgacaaatcaggcccattttctcctttcctatcattatgctgtatgtatagatagaatatgtattttagatgttttattgtttagttattattttagtcttatccttctaaagttcagcaaagctttaggtaaatggcgtggatttttgaaatcctgcattcagtcgctagctgacatttagaatacaggaatagtagtttcctggaaaacagtgacacttatgttaaattcttgtggtttttacaaagtgaggtgtcaacacagaagtatttcagttctatttccatttacctttcccttttgaagaggtataataccaagggttgtgaagttctgacttgtagcatcaactttctgcatggttttccttggtatggggtggggtgggtattcctctttgctgaaatagaagagaatcataaatttctatctggattgattttgtgctttaagttgtacacataaaacttgaactaggcatttgtcaaattcagctgggcctttcagccttgccttgtggaatgagaaatatcttccttttaaaggtaatttctggtaaccttttagaaatttttgagagtagacctggtgagttccctttgagcttaactggctgaccccagatatgtccttctcaagatagacatacggtatcttttgagtttgcaagggaagaggctgagaggaaccttcttaccttatattcaggcatatgccctggccccatacctgaccttttgaattggaatctccagtagggatcagatgtttattacaagttctagaaactagaaagttaccctgttatgtggctgctggagtcaaacctgtacataaatattacagtacttcatgctcttgctcattgctttacttgaagcaggtttttttctgtttcacattttcctttgtgacctgttaaactactagatatggctttcaaatgaagaatttttaaactccttagacttagttaggctaggccaggcgtggtggctcacacctgtaatctcagcactttgggaggctgaggcgggtggatcacttgaggtgaggagttaagagaccagcctgggtaacataatgaaacccctgtctctactaaaaatacaaaaataagctgcgggtggtggcgcaagcctgtagtcagtcccagctactccagaggctgaggcatgagaatagcttgaacccagggaggcggaggttgcaatgagcctaatgagcctagatcgcgccactgcactctagcctgggcgacagagcgataccctgtctcaaaaaaagraaaaaaaaagaggctagatttctacaacatgtaaaagattaatacaatgctctagacttttgattgtrttgattacatatttgcatagctttttgtggtaaaaccatctcactattctttagcaacttgagtagttgactagacgatgaatagtttgtcctttagaaaatcacacagatttttgaaatatgttttactttttggcgatgaatattaaggtcattagttgtattttggtcttggaagatactaatttaagatgagcatcatttggaaaagtagtcrtaggtaatcttaatactgaacagtggcaaatttcttctctctccgaattaaaacatgacctttgaaaaaaaataaaaagyaaaaaatgacctttgaatatagttgtctagacatttggtcatatatgcttgtgacttgttaataacytcaccagtttggaagaaatgacagtgaaagatgagtgacctgtttttattttgggatatactcttaatatgtcaggcatttttagggtgtttttaaattttattttattttatttatttaaattttacaagtttttgagaactgttgtgatgtcagaggaaaaaacactttcccttaatattttgttaatattttgagctccagtggaattagtccttatagcaagaactcatacttcatttgttttgtgatgttggatgctattttgtgcaaaataaaatatattgaaagaataattgcagtaatttccatgagtacccttgaattgctatcttaagttgtccaagaattgttattgtgcgaacttgtgccttttcatcacaaatttggtgagaacctggggaaatagacttgtgttacggagttttctggactggtttaattataaagtgatcaaagcaattagctgtgaagctgagctttatgactgttttaattttcagtggattcgttattgggctaagttaatgacactcttgtaaatatataattattttgagatactcaaatttgaaagcaataccaactaaaaagcatgtgtgggattttgttacggtgtctttctttttttttttttttttgatatgcattctaatgaagtactctggtggtttcagactcgccttcgtaatgtacagtgtggcctgtgcgtgttgttttgtgtttcctgcattgatttttgcctccgtttattctctattgcagtctaaaagttggttttaattggttgcccacaggattgacttggcctctacttcttgttaaggaaattcatctcttgttttatcaggtaagagattttgaatagagagttcgtttttatacaaaataaaatgagatagcttattaagaaatatgaaaatatatgtagcaactatattgtgtgtgtgtgtgtgtgtgtgtgtgtgtgtgtgtgtttttgtttgcttgttttttgttttgagacggagtcttgctcagttgcccaggctagactctgttgcccaggctggagtgcagtggtgccatctcggctcactgcaacctccgcctcccgggttcaagcacttctctgcctcagcctcccgaatagctgggattacaggcgcctgccaccatacccggctaatttttttgtatttttagtagagatggggttttatcctcttggccaggctggtcttgaactcctgaccttgtgatccacctgccttagcctcccaaagtgctgggattacaggcatgagccgccacccaggccggtgtggttttttacaagtttatctgagggataggggtggggtagatgggtgctttgaacagttgttcctttgggggtcaatttcatttatatggatctatttatcttgtgattttcctgataggcagtaagttttattccttagtagcattttagactaattacaaatacagatgcttgttattgatatgtttatttatatttcctaagagtttaagtatagataatgggtcacatgttttagagtacaaattttagactttaaatggaaccttagcaagtggaatctaaccctcttgtttaagtaactaagataggcccaagttaggttgaaatgacttagctgtcaaacagttacttagtaacagaaaagcagatacttttttaaatttttttttaaatttttatttgttttatttatttatttctttttgagacagagtttcgctcttgttgcccaggctggagtgcagtggcgtgatctctgcctcccgggttcaagtgattcttctgcctcagcctccctagtagctgggattacaggcacctgccaccatgcccagctaattttttgtgtttttagtagagacggggtttcaccttgttggccaggctggtcttgaactcctgacctcgggtgatccacccacctcatcctcccaaagtgctggggttacaggtgtgagccaccgcacctggctgcggatattatttcatattttttggaagctagaaacaatttttctcatcagatggctttatgaataaatcttgtattccactttggtttaatattcagccctttccagctggtaatctgaggcagattttcaatagcatattctcatgtgtaccttgtacaaactttcagtaaatccctgctcttaacagaaaatggcttgaagacttaactgtgtatgtcactttagccctgtgtttaatttttgtgttcttgggactatatcaagtttctgtttgattgtcccagtgcaaactagtctctctctctctctcaagttgttytgagtacctggattgcccatgatgtttcccctatacaaagtgattaaccgttttttgaagttgaacaggaaatgctatcacattttgcatacagccacatattctagattgagcaaggaatgtgaatttgatttaatgacttggaaactgcttgatgaacctccttataggctgctaaatagtaaatgagaaaagagactgttggtgtgatgttttttagcgttaatttttcttgttgactcttgaagtttgtaaatgaaaagcttccccacacttcccaaatttctagtgctttataatggcctcacaaaaagcattttctgtttgctagtccatttttctggattaaatttgaaggtggctttttatttttgtgtatgtgtctgtgagaaaactgtcaaagccaagcagtttgtttcttgtttgtatacggcagttgtaatattgagatataattacagattttgttgcattagtatttatataatatttgacaatgaagttacagaattcttagagcttatagtagaaaatcttgccccttctaatrttcttgagaagtgataaaaccaaatctcttcattaatttataacctttctgagggtcatgagctgattttatgggcttatatttaaaagttgacttttcaggtggggcgcagtggctcacgcctgtaatcccagcactttggaagactgaggagggtggatcacctgaggtcaggtgaaatcccatctctcctaaatacaaacacttagccaggcatggtggcgcatgcctgtaatcccagctacttgggaggctgaggcaggagaattacttgaacctgggaggtggaggttgccgtgaaccgagatcgtgccgttgcactgcagcctgggctacaagagtgaaactctgtctcaaaataaataaataaataaaagttgacttttcagatgggttggaaaacaccctatgttattgaccaccttaatttcaaagtagtatgtttcccaggcccaataattcggtttgtgtcactttccaaagggctgcccttgaatttgctcttagaagcctttggaactgaaatactgaaatttgaggggaacatttcttttttgattatgtcaaaacaggcatgatctaaggagatcacagagatcctgtaggagttgtgtaggtccaagactgtaacaaccactgagtaattcacactctggttctaaaacaaaaacaaaaaatatttttattgtcagccctctcctaggggaaaataatactttaaaaaattttattaaatagaggatttggttatgagtcattggacctgagttttaattaaaatagtcacagtgaatgggactataaccaggttctacttttgggggtaatgaatcaaggtaactcagattttagctgtcctattcagtagttcttttggcttcttagtatgtcttaaccttgtttataataaataattccatatgtagttttytgtaatgtacaaggcagattgaaaagttttaggatgaataaaataatggaaccagttctcatttaagacttgaatctacttttagtcttaagtattatttacaattcattagtattctagttttttgcttctgttggatggattttgagactgagctctataaaatcacactcttgataattctatgaaattatcaagtatatagggaagatgctaagccagttttaaatactaacttctatatattctttgcatgttttttccctatagattgttaaactttgtttcctgatttgacttagacatttcttttaaatcttactgaatgattagtggtctgaatgatgtatatgtattttactgtcctacagttgttttttcttgaactttttgagtcttgggactgaactgtttccaaaattaatgccttctggaagttgaaattgtctacgttttacattgtaaatggcacgtaatgttcagtttttagaatatctaaattaaagacattgcctgtgatagcttgagggaatatttgagggcctaatatggtagctggtcattcttgtagctaaaaacttggtgtgataaacaggagtctgacctggccgttgccttttctcatctgcaggtgtgtgtggtttcagcgcagcatggctgtggtcatccgtttgcaaggtctcccaattgtggcggggaccatggacattcgccacttcttctctggattgaccattcctgatgggggcgtgcatattgtagggggtgaactgggtgaggctttcatcgtttttgccactgatgaagatgcaaggcttggtatgatgcgcacaggtggtacaattaaagggtcaaaagtaacactattgttgagtagtaaracggaaatgcagaatatgattgaactgagtcgtaggcgttttgaaactgccaacttagatataccaccagcaaatgccagtagatcaggaccaccacctagctcaggaatgagtagcagggtaaacttgcccacaacagtatccaactttaataatccatcacccagtgtagttactgccaccacttctgttcatgaaagcaacaaaaacatacagacattttccacagccagcgtaggaacagctcctccaaatatgggggcttcctttgggagcccaacgtttagctcaactgttccaagcacagcctctccaatgaacacagtcccgccgccaccaattcctccaattccagcgatgccatctctgccaccaatgccatccattcccccaattccagttcctcctccagtacctacattgcctcctgtgcctcctgtgcccccgattcccccagttccttctgtgccacccatgaccccactgccacccatgtcgggcatgccgcccttgaatccgccacctgtggcacctctacctgctggaatgaatggctctggagcacctatgaatttgaacaataatctgaatcctatgtttcttggtccgttgaatcctgttaaccctatccagatgaactctcagagcagtgtgaagccactccccatcaaccctgatgatctgtatgtcagtgtgcatggaatgcccttttctgcaatggaaaatgatgtcagagatttttttcatgggctccgtgttgatgcagtgcatttgttgaaagatcatgtaggtcgaaataatgggaatggattggttaagtttctctcccctcaagatacatttgaagctttgaaacgaaacagaatgctgatgattcaacgctatgtggaagttagccctgccacagaaagacagtgggtagctgctggaggccatatcacttttaagcaaaatatgggaccttctggacaaactcatccccctcctcagacacttcccaggtcaaaatcgcccagtgggcagaaaagatcaaggtcaagatcaccacatgaggctggtttttgtgtttacttgaaagggctaccatttgaagcagaaaacaaacatgtcattgatttttttaaaaagctggatattgtggaagatagtatttatatagcttatggacccaatgggaaagcaactggcgaaggctttgtagagttcagaaatgaggctgactataaggctgctctgtgtcgtcataaacagtacatgggcaatcgctttattcaagttcatccaattactaagaaaggtatgctagaaaagatagatatgattcgaaaaagactgcagaacttcagctatgaccagagggaaatgatactaaatccagagggggatgtcaactctgccaaagtctgtgcccacataacaaatattccattcagcattacaaagatggatgttcttcagttcctagaaggaatcccagtggatgaaartgctgtacatgttcttgttgataacaatgggcaaggtctaggacaggcattggttcagtttaaaaatgaagatgatgcacgtaagtctgaacgcttacaccgtaaaaaacttaatgggagagaagcttttgttcatgtagttaccctagaagatatgagagagattgagaaaaatccccctgcccaaggaaaaaagggattaaagatgcctgtgccaggtaatcctgcagttccaggaatgcccaatgcgggactgcccggtgtgggactgcccagtgcaggacttcccggtgcaggcctgcccagcacaggactgcctggttcagcaataaccagtgcaggactgcctggtgcgggaatgcccagtgcaggaatacctagtgcaggaggtgaagagcatgccttcctgactgtaggatcaaaggaagccaataatgggcctccatttaactttcctggtaattttggtggatcaaatgcctttgggccaccaatccctcctccaggattaggaggcggggcctttggtgatgctaggcctggtatgccttcagttggaaacagtggtttgcctggtctaggactggatgttccgggttttggaggtggaccaaacaatttaagtgggccatcgggatttggagggggccctcagaattttggaaatggccctggtagcttargcggtcccccggggtttggaagtggccctcctggtcttggaagtgcccctgggcatttgggtgggccaccagcttttgggcctggccccggccccggccccggccctggcccaatccatattggtggtccccctggctttgcatctagttctggaaaaccaggaccgacagtaattaaagtgcaaaacatgccctttactgtgtctattgatgagattttagatttcttttatggctatcaagtaatcccaggctcagtgtgtttaaaatacaatgaaaaaggtatgcccacaggtgaagccatggtggcctttgagtctcgggatgaagccacagctgctgtcattgacttaaatgacaggcctataggttcaagaaaagtaaaacttgtattagggtagccattcacatcattttttatagggtagatcttcatattgctgtgattaatgcatccagattgttttcctagtatttccaggttagaacctgtggattgtttcaattgcatatagcttggtttccataacatagagcattggttgactgtttacagaagactcactcaccaggataaacattgctgtatgttacagtaaagctatctggagagaacacataaatgattttggcataccattagagaaaccatttgtaaaactcaaatgaccacataaagcttatcaaggagtctagattggttttgttttataccatatgggatgaagaaaatagaaatgtcagtagaactcattgagggtgctcttgccagctgctgaaaatagaagttggctactctcagaatttggtttaaagctggacagatttgctttgttatagggtaaagctttgtctaaagtcctcattttcttttaaaattgaataaaatttctgtatacagattcattgtatgtacctttattgcttcttaagggtccttgctgtatagacagtcctgcttcagaagttgctgctttgtttgtctaattgactcatttgtaaatgagcagaactgttttgttggtttttttccctaaatataaaagtccacacttcgtttgtgctataacctcaaactttgatttctaatgtcacacttaaaactgtgtggaataagacttttgccataaaaataaactatggagtcctttatctaccagagcctttttggtttgaccgccacratttaggttagtcagtttaaaaattgttcatgttgtttggatggtatcgaaaaccagaaaccacttttaataatgtgtttaagatacttgatttgaagtccttttcatatggactaattgtagtatcaatttcctcctgtcccgattatgtgaaattttggcctttaaacaaagaggggcccattcataagaaagtgttatatctaggtttttaaaactgaagttgaaattatctttgttagcagtagtagtatagawtaaaagatccgtatgctggttcrtagattgatacgtgttagtcctgttatttggaggctttttggcatagttgttcgatcaggagcctgtttactaaaagtcttcatacagagtacaagtgcagccgccagaggagaaaattgagattcttgaccctttcatactcttttctttggtattcaggacactaaggcaggaggaccacatgagttctggttggtaagtgtccttgtcatgaaaacacttgccttacaaggctctaattatgatttccctagtcagtgctctgaagatgtgtcacattatattataaacaatacggaaggggagataggtgagatgatatgaaaaacaaattttctcactgtcataaaaggctctaattatggttactttccttgtgatgaaaaacttggccttacagggctctagttatggttactttccctagtcaatgctctgaaaatgtgtcacattataaacaatacagaaggagagatagatgagagatcatgaaaaccaaattttatcttttacatggcccctttgtcttcgtttgaaacatccccaacatttcctacaaatcagcgtagttacaaaggggtcagtcttttaaaataagtatttcctattaaactatatatatatacagtgcctttttggtgttgtgagtcagtggaacactgaaatacagcggttgtgtaatttaagagtggcaacagtttcatttgataagatttgaaaaggctttttatcactacaatcttagaggattgacagtacaggatttttgtttaagagaaggattgtttagactcaagaggtgactatgttgtgggtcttttgataattcatgaatacagatttgctttgaccgatcactagatactgcctcctcaatttcaaaagcaatataacgtttgtatatgctgtttaatttaagttaatgttaagtaatcatttctcattccaaagacaatgcaaaaaacttcagcactgcttgagagttgtatttcagccacagatattttctccattggaaagctattttcattttagaaaaatgggttgtttgaagatgaaagtcttttatcttttttcacaatttattttggttatatgttcgtacattcttattaaatatttcatacactttattgcaactactttgttatttctacatcttagataaatgctgaaaaggaaaacgatttcattgttcatctaattaaataaattaaaagagcggtttgtgtagaaattggagagaactatgttttatatgaatcacaacagtgctcgttgtggactgtaattaaatgctttgccctctggaacttgatttttgtgtatctgagatttattaacagtgctaactgctaaggatactgtttatcttgttctgggcattggagtttcagtttttaaaaaattcttgaaaatgtattctgtgaaactactcatacctctcttcctgcgaattttctcctaagaactaggtttggggtagaaatgaattgacattattttctcatttgctttgtatggtatgaaggatttgtaaagctttgctcaaagttgtgtgcatttgtaaacactatcatgatattttcaattttatgtgtaaattttattgtctgtttttggtgactctgacattaatggaagagaatattttccattagatttaattttttttcctctcccttctgattttttttttattggtgttcatttttcttttgatttaaaggattagagaaatctacaaatgtatgtcataaataagcaaatttgtaaacttttctgaactttagtgaaacatttagttcacaagcataatttggaggtgtgttctgtgtttacacagtagtttggatgtacaattattattagtggctttttaaaaaatgaaacagtgttaagtgaaatgtagttcctagctttgtactccaagttgtcaaagcatcaacaatgaaaattcgattaggaaactttatttaaaatttcaggtagtaatattcagtgtagttaaggccagtcttaacccactggatgaaaatctaggactgtatggaagtaagcaaacattacatttttaggtggaaatagtcagccttgcataaaaacaaggatgcgtgaaagccttaaattccagctcccttttactggagtctgtgkttgtgtacaggtatgggccaagtgtaaaatctcatcaattttaagaacactcgggaaatgagtaaagaaaatgtaaaattgctgctagtcaaatcttttggaaagaatttctggaagtggtcactttaaaaattattttccacccttgcaaaattgccacatttaaattgttttactggcagttctatagtagtccagactttagaaaccaaacacaacaaaatggcttgttgccartatggccacaacattgccagcaaatactgccttggcatcactcagcagaggtttttgtttataaagatgaagtcttgaatactgttcaataaacttgtcaaaaaataaaacaggctgatgcttttaatgctttaactgcacaaaagtactttactgagctataatattatcttgtcagggtttttgttttgttttgtttttaaacctgaaaatattttgtgcctttggagaggtagatttggtaatcttggagaggtaaaaattgttgcttatccttgcctgctaatgctgaagtgtcaagagaagaggatacttggaacagcagggaggaaacttgattcaagtccatagtatccaccttttcagaattttatgtgtatgatgtgttggcaaacaaagcccttaaatgttgaaaactttttatcttgaaagagtttagcttgtattagaatttggatacccagtgtgttttagagggggctagacatataattccaggtagtagctgagccattattaaataatcgggatttgactaagcaatggacaaatcactgagtgaaatcagctgcctacagatatccaaaatggcttttaccatctgaaaggggtggactgtgtgataatatgtctccttttcttgttcaggagagatcagttatgtaattcattgttacctgctttccagtgttttacagcaagaaatagtttatcaactatgtgcatcatcactaatctcccaaaagtagagcttttacagggtatggtagaatcaaacttatggctttccttttttattaaaaatggctttatttcagtcttatctttttagtatagaatctgatcattttgacttgtgaaatgttctggaaagagtgtactctggtagtagcacaattctctgatgttacagtgacttttctgggaaaacccctgtctattcaacaacataagcaagttcatctcctgctcaggtaaatggtaatttttttttttttttgagatggagtctgtatctgttgcccaggctggagtgcagtggtgcgatctcggctcactgcaacctccacctcctgggttcaagcgattctcctgcctcagcctctcagtagctgagactataggtgcgtgccgccaagcccagctaatttttttttttttttttttcatttttagtagagacggggttttgccatgttggccagcatagtccccacctcctgatctcatgatccgcccacctcggcctcccaaagtgctgggattacaggcgtgagccaccgtgcccagctggtaaatggtaattctttaccatgctgttcttgggtttattcttggtgctttggctgctttgtgttagagtctcaaaagcatcctagagtatgactccttttctggatcaacgttaactagcagtgagtagccacggtggcttgctactctacatactgctctatcactggagtccagaaggaggaaaaagccacctgacataaacatttcagacccagggacagaaggacagcactctgaaagtctaagggcaggaaagagtgctgggaaaaatcacaaccaaatcccttgaattctgtcaatagccccacggacctccttccagtgaaaatgtttaagatgtgcttgcttcagcagcacatattaaaaacgaattaaacagagaagattagcatggcccctctacaaggatgacacgcaatttgtgaagcgctctttttttttttttttttttttgagacaaagtctcacgcttgtcccccaggctggagtgcgatggcgtgatctcagctcactgcaacctccgcctcccgggttcaagcgattctcctgcctcagcctcccgagtagctgggattatgggcatctgccaccatgcccagctaattttttttgtatttttagtagagatggggtttcaccatgttggccaggctggtctcgaactcctgacctcaggtgatccacccacctcagcctcccaaagtgctgggattacaggcatgagccaccatgcccggccctatttttttttaattaaaatgttaaaggttagggcatagagactcagcaaacgtcatatagagaagtggtaaatggcacagctgagcattggaattggctccccagttgttccagacatctggatattgatcttagtaacttactagttycaagtcattttgcttaattaatggcttgccatttcatgataggagatgactatttcgttgtggggcaatgcccagcaagagaacataattcagtatgaacagtcaaaggtgttgagtgtatttaactcattttaggaatgagctgtactgtattcaaatgggctacttgatggttcattmcctccattctgctgctgttcatttcctccctttgcttgcttatatagtaaacctgctcgtaaccaggacttaaaactcttagactgaagccccttcactgctgtctctagcctcagcctcctaatgggtgggagtagttcattcatagcttttgattggtggataagacttgtcaggctgggtgtggtgggtcacacctgtaatcccagcactttgggaggccgaggtgggaggatcgcttgagcccaggaattgagactagcgtgagtaacatagcaagaccctgtctcaaaaaaaaaaaaaaaaagccttgtcacttagagtttgtgcttcatatcaaatgataacaaccacattgtgctacaccacaagtcacacagtgggaaggatttaagagggttaaatagtttttttgtttcttttttttttttttttttttttttttgagatggtcttgctctgctgcccaggctggagtgcagtggtacagtcagctcactgtaacctcgatgtcctgggctcaagcaatcctgcttcagcctcctaagtagctatttttttttttttttaatttttttgtagagatgaggtaattgctggggtaggggtgatggtggagtggaggggtagtttcactatgtggctcaggccggtcttgaactccggggctcaagtgatgctcccgccttggcctctcaaagtgctgggattacaggtgtgagccactatgcctggcctcagtttcttaaaaggttttaaatcacaccaactggtaccagtgcctctgattgccttgatttttctgtgatcccacttggaagtttgttaatgccacactccactatactccacacattagattgcagtgggggctggagagtggcccagcctttatacataactcccttctgtggtttggcctgtgggaccagtagggtccctgtgctgtaactctgactgaagtgatggacattaatgcaactactaattactgatgtagatgagctgctttacttctatgaccattgaattgacagattggaattggaagcacctgtcaccttcaagcttttaagacaacttcacatgaatgtacagcttagccatagctgtatctcatactaacagatttttgcagtggtgtgcacccagcacttatactttggtggaaaagcaaaataaggttcctgttcttcaacagttgagggttttaagtcacaactaagtgcttggttgtgcttatactaggtacattcctataccacgggaaccaggtagtggctttcctggccatttgctaagttatggttagacaggaacaagtgtaaactagtctttgtcrtagtgtagtttcctgttgttgaaatattcctttgctttctcggcttccctaacatgtaaattctgaagacccatcttaaactctccccagtgtcccaaatgaatttattccagtgaagggtaaggggcttgcattatgaacaataggtaggtttcttttccaagagctctggtctgcttttgttcatttactcatctcattttgtgctgtaggagatatacactccttttgtgcacactgtagatgcacaggtatttggtgatgcctcagtcctggagatcatcaggaaggcggtatagtactgttgtctcagacaccccacaggtgatagacattaaaagaatgtagatttcagccgggagggatgggggcagaattgactaccctatagatgtcctttgaaaattttgatacagatcacattttttagaggtgagttctaccttatttgcactatgcatgcttgctacttaaaatttattcctttgatcaactcctgtaaatgtggagtccaggatttcctaccttccttccccagcagtcagacaaatagggagaattatattccatgtttgtgcaaggctaacattagcatagatcatgaggggagaccatgtgagtctcactgctgttgtagtggcagggtagatttcagattggggtgaattacaaaatgtgaactgttgctaaaatggttggatatagaaataacattctcagaatcggttcgtggttccatcagttatgtgacttaggacagattatttccctctggcctcagtgtttcttttacagtatgggattaaattagataagcttgtgtccagttttaagcttctgtgattgtatgaacctagccattcggtttctggaaatctgtactgagtttggaccttaaactaaagtgaccaggaatggagctccaaattttgatctgggtactgctctcctggtttccctagtgtggtagtgattctacactgcagcttgagaaattcaaaggggaagagtcttcatctctccttttgggggctgtccctgtcctgctagttatatcctggagcaggtagaccagaggcattcctcctggatccactcctccttggtccaattaaccaagaaggagttaatgatactgcagaaggacccaaaggtgcacttccctgtttgtgagcacctacagggacagttgacactgggtacttactctgtgccgggcaggggatactttctatgactgtcctcatgtaatcctcacaaataacactgtaaagttaacattatcatccctactttacaggtggggtaatccaggcagagaaaaataattaatagtaaggggaaaacaaagatgttttaatcatggatgcttgtatgactcctcaggtagaaaccctccctcaactatccccagcccctccctgacttttagggaaagtgggaggccactggcagcagtcttctgtcatggattctgagctgctggggaaggagccttttcagtttgccaactccaactatagtgtggagggcccttacctattggtagggcttcttggcctccacggtcaagcttatgattgcagagggggacctgaacttactttgttgtttttttgttttcgcaacagagtctcactctgttgcttaggctgcagtgcagtggcgtgatctcagctccgcctcctgggttcaagcaattctcctgcctcagcctgccaagtagctgggattacaggtgtgcaccaccacacctggctaatttttgtatttttagtagagacagggtttcaccatgttggccaggctggtctcgaactcctgacctcaggtgatccagcytcccaaagtgctgggattacaggtgtgagccactgcaccctgcctgaacttattttgaagtactcacgtgaagactttgtgttggtgtgttcagagtctctgggcagagaaaaacacccactccgctacagtcctatcctgcttttgagagcctgtttgcaggttctagcaggggagcactcgtatatccttgaccaaagaccagtcctcctctctcagggatggtcgtcttcaatcgagcatgcagcttcgggacagatgcatgtggagcggtgagggaggaaggggacacccacctagtcagccagatcagccaaatcaaccctggtgatcaatggggtgacagatgtcacagccagatggccctatcctgcttttgaagaccatgtagtcctcctcagtttgcttctttccttctccatatccagttttgtcgtcaagttaggttctttttgaagagttagttgtacagtggtcagatttgttcaacttttggataagcctttggggatgttggggttagattagtggctttggttttttgtttttgaccttcacccagtacagtaaagtggaaaaccttgtggccatcttctttttcatattttcccaccttttagtttttgtgtgcacatgttaagctttgtagtgttgccaaatactttgtgtcagcctgactccttagtagtatatggatctaaaccaaatttattgaaaatttcagtttatgagtaccattcagtagcccttagtcatatgtatgaataaggaatgtgtagttttatagaaaggattttcatttttggttcagtttgtgacctgtgaggaatatccttagagctgctgatgtaaatttggagaatcctcgagttagaaaagtagggataagaaaacttgtctaccttctccatgtcctttgatggggccaaaaaggaaaaagaagagtggtggtggttggtgtagtttgtcttttcagtcttacgggaaacartgttccatgggtggtcctttgtaagcctatggaggattttctgattggctttcaagacttgatcctgcatctgtgagctgatccagcatgccaaggtaggcaataggagtgtgagcatgacattggtttattaaaggagtggccctgccacccagaccttcagccctctatgccaccttcttgcagcctctgtacaacttctggtcattacctggggtggataaggaattgggaattgcaggctggtgcctttctgggttaggactttggaagtggaagagggaagtgttaaggactgacaaatgaatttcagctcatttggcactgaattagatcccactggacccaggagaaatctgttcttggttatgaataggaaaattagaacctcccaaggcaagggaagggtggccatagaaaatgaagggcaagttactcccttgtagcagagaatgggattccctatcgacagtagtatgctggtaaactggctggcagggtgaaggaagccatgactttttgcagttgcccaatttctacagttttaaacttaccaaggccacctgcttcaacgatttcctgatatgtaacagttggctcttgcaagccatacaagcttgcgccagcacactgctgcagacttgcctcaagtatttgaattcccattatgtgctcaggtatatgctgtgtggcaggagatgctgaaacagtgtttattctgaagagctttgtcatttaattgacaggcaagaagctggagaaacatcgacagaatacagtcgtgtggcatgaattgaatatagtggtccagagtgagaagttgagtgctggaaagatcatgaaaaggggagcatatataagctaggcttgaaggataacgataatagctaacacgtggtcatagcagttccagcctctgtactaagcatcatgcatacattatttatattaatcttcagaaatagatactatcccccagtttacacctgaggaacctgaagtttagtgagattaagtatttgcccaagttatatagatatgacatcaatttagtgttgtagtatgtcattattgtggctaggaaggaataaggccagtatttggagcctggtcacttcactgcagaacccacactcttgcccactgcatcagattgcaacaatataaaaaggggggcttttcaaagagaggaaaaaagtctaacaacagtccaaggtttgagattaggtaggaatcagaatatttgagttctagtcttcatttcacttaaccatatatgtggccttagccaaaccacatcttccctctatgccttggattgagggacttgaattagatggccactcagttcttttttatttctgacattttgwgaattttaagttataaaaatgggaatgagtatgcctttcttaagggacactgagagaatgtgccctgctagggcacattgaggttggcagagggagtaaacagaagaaaacaaactataaagggtractcctaagtggtagaaagcagaggcagaaaaatgttggagctatagactcagctgttccattcgcaacacccgactagycccaaatggaagggtcagggggtggggacctaacagagaagataaattggtgtttggtgttgggtgttcctagaaagcctacttctctcagtgtctcagtagcaggtcagagctagatttgggtcatttctgaggatccttgagtatcactcctttcctagcattcataaatttaacagatatcartagagcacctgctgtgttccaggcgttggcacagaagcaagactaatctggtccctctgcttgttgaagttacagtccaagaggagaaatacataataagcaagttacacattttgataggattataagaattggggttttgttggattagagtcagggaatgtctgtgacttcaacataacagataggaggggactgagagtggaaatggtaaaaccagttagactgttagagacatcgagccaagatgtgctcggtgatgaaagagtgcacaaatatcacaaaaataaatgacaaattttttttattgactcaaatgtgatatttaatwtggttctggaagattttggtcctaaaaaggaggttgaaagtccatggcgttaattataatggcagtatatgaaaaatacatgagtctggtttaaagtaggtagttgttcaagagatgtaggacagaagagtgacatgaacagttttaatcacagatttctaagcagagataggcttagaggtagatttcaaaggagattaaacatgttttggaagagattaataatcccgtggtttatagatcatttaaaggaaatgttgctcaaaggatagaaaactacagatggaaaagatttgtttataaagagttgattccaatgagaaagaaaaggagacaaatctgtgaacaaaactgcttgcacaggaagctctgacctcagaatggaagccaggccaccttaggggctcacatcagtgagagttcagccccttatcctactgaggcacacatgagcccacaacagtatggctggggtttgattctgggttcaaaaaactgaaaaaggatttagtccaggaaaagtggtgtaatggtaatgattaggaaggaatagtccaccagaaattgaggcctacacaggaagatgataatagtagcccactacacgtgtttggcccagaccaagggcatctcttttggggacatttgagaagtcgtggagtgagaagacagcagctccagttgtkgcctgtaatcttaccaccccaaataatcactgctaatgcttttgtcattcacaacaacctcttaccagggggaggacctgtagttctccaattaaaaatttccctagctgggtgcggtggctcatgcctgtaatcccagcactttgggaggccaaggcgggcrgatcacctcaggtcaggagttcaataccagcctagccaacatggtgaaaccctgtctctacaaaaatatgaaaattagccgggcatgatggcaggtgcctgtaatcccagctactctggaggctgtagtgggagaatcgctggaacccaggaggyggaggttactatgagccgagatggtgccattgcactccagcctgggcaacagagtgagactctgtctaaaaaaaaaataatagtttccccaacattttattatgaaaattttcaacatgtagcaaagttgaaaaaaattatacccatatatccgccatttcagatcctacaacttaaaatcttgttttatcacatttcttcaacaactccttttattttttggtggatttcaaaaaagtttcagtcatcggtacacttgtaaacatttcaacatgccttaactttagtgcaacatttgtttatgggttgttgggttttgttttttttttttgtaaaattttacaatcagatgtgtacactcagtgttcctttagatggaagtggcaaatgcacacactcctgtgacccatattcttagaatgctaagaacgtttccctttccactgggagctctctgcctctgctcagttaataccttcccttcccctgggggagaagggaggacaaccagtgttctgaatatttacatcacagattcgttttgcctgttctgaaacttcataaatggaatctgtttactttattcttcatttttattcatgttacagatactaatagatttttttgttgctgaatagttttctataaacatcacaattggttctcatattgatgaatacctgggctgtttcaagtttttggctattgtgaataaagctgctgtgaacattcttatacaaatctttgtggacataatgtttccatttcttttggctaaaaatgtaggagtggaatcgctcttgggctaggtgtttgttaggttttttgataagctgccagactgttttccaaagtggtacatttaatgctttcactaacaatatatgagagttccatatccttgccagcatttggtggtggtggtctttttaattatacttttagccattgtggtgggtatgtaacagtatctcattgtggttttatttttcatttccctgataattaacgctgtggatcactttgcttatttctgattcacatattttcctttatgaagtgcctgatmaaatcttttgcccattttaattgactatcatttaatattgagttgtaggagtcctgcatttaaatttcaaagttgaactatacaagatcaggataggggagatttattgttacacatcagttcaaggcctgaagtgtgacttgagcaaaagcacattcaccatttgttcagcaaatggttattagtaccagctatatactaagtactaatactagtgatacagagataatatccagccctagttcaaggaccccatagtttacagggtagacagacaaaagtaaaaattatggtgtggcttcaatgttaagtcagtcactaaatacttactgatgagtatctactgtaggatagatagatactgctgtgggtcctggagctagccagagttcctactctagtatagcttattttctgtagtgtataaggagggagacagagtgcaaaagccctgaggtggtaaataaggttggtgttaggtatatgtggatcagaaaggccaacctggctggaggatagttgcgtggctagatgattagttaggcaagggtaaggtcttgcagggccttgaagaccatggtaagaactttgggttttatcttaagtgttttggaaaggcattccagagttttcagtggaaaaatgacatgatcaggtttctgtttggctaataaacccagaaatgtgtgtgtatggtcgcagaaacactaatgaggaaacatcgcagtcatccagagcagagacaagaaaatccttggggaaaacaggcaagggttcataaaggaataatgtcatattagaaccatggatgacaggacatttgctaggcaggaaagtcaggcatgtgtgttagatgaaccagaaataactttggatgactagttcggtgggtgggtgagtgagcggcaggaggtagagctgatggcaaactgggaagagctttgaaggttgatctagggatgcagggttaccagattgcaaaactaccaaattctatgtaggtatgtcctttggagttgtgcagcaaggtagctttgctagggagtttggctccgaacctaaaggcagctatacggggcttttacttggaatagagactggaagctggcatctgggatgaccaggtggagcagtgctaggacagaaaccaagcaggacgcaagagactaataaggcctgaagttaggtaggggttgttgaactggaagtggaggctttgggcttagaatgaacagtcaagaagatttgaggtgtggatttggggggaaagctgatgaggcctttttatttattttgcttgttttgtttttgttttttatttcatataaggccttttaaaaaatacaaaacagtataaaatattgaaacaatacagaaktatggagttcacaaaattcttatcttccactcctttgagctacctaaaacatttgatgcatcttctatttttctgtgtgtgtatttatttatgtttgtattcaaatctgttataaagatacacctacaattgaagtttaaaatggaagtttacaattgaagtaaaaaatggtcatactcttcctattattattattattatttgagatggagtcttgtgtacagtgccatgatctcggctcactgcaacctccaactcccaggttcaagtgattctcctggctcccgagtagctgggactacaggtgtgcaccaccacacccagctgatatttgtatttttggtagagactgggtttcaccacgttggccaygctggtcttgaactgacctcaagtgatccgcctgcctcggcgtcccaaaacgctgggattacaacagtgagccactgcgcccggcctatttttgattttttcataggataccaatataatatagttctggcttgttttttagccactattcagcattccgttgttcagatgtatcatatttagttgatagacctttaagctgccttagatttttcactattcccagcattagtgaaatgagcattcttttttatttgtctctgtactgtgtaaacactgcctgggagagcatgtgaggtgacatgcatggagttcagattgtgacttgggggaagctgtgatcctgatcccttgagggagcatgtattctgctctgggtctgtccttggggaacccccaagggagtgatcaggatggtcagaagtctgcaggccacattctaggggcaacagccaaaagaactgcggctgtttctccagatttcagctgggactgttcacagcttccaggtatcagatgagttctcatagggagatagggtaaggccttcccatggagccctaggctggggaagaactaccaggtagaagtaagaattccacagagttaggtcagtttgggtaggatttgtatggacctagactttctgatgattggattgtaagactgggttttctatcactgggactgttcatgcaggggccagggtgctgtggaggggcagtatgtgaagcaagttgaactctgaagcattccaactttgataacagcattccagatggaaactatgagggaccaagatgaggtgctgtgggctgcgagggaggagcgattgactgaggatcagtataggggagggctgacgctggaggcatctcagggtatagctttgggaaacatggaatgctgagtgaagctcagtgaaagatctgacctcgtgtgcactgctggtggagtggtcttcaggtatatgggccaagggggacacagggataacaagaggtctgagggtgattgttatggtggctgcaggaggacggaattacccaggtgttgtcgtggtgaaccatgcaagaaaataatgttcccagcagagggaaggggtgaatcagagaagcttggtgctgcctgattacaagggcgagacatcagttagtttggagctggctgggcagggagctggggctggagatgaactttcagatttcattctgcaaatatgtattgtctaggtgcttgggatagagcaataaacagaacagctaaatattcctttctcacagaatttatattctagtgggggaaacagtatatacatgtatataatgttagacattgagaaaaagcaaaaaaggggtatgcaatgccaggggcagtggggttgaaattttagaggggctaaaagggagagcctttatatatatatgtatatataaaacagggaagattattttgagtaaagacttgtggggaaagggagcagtgagccatgtggatataatgcagagaaagaacacattccaggtactgcaaagtgtttggggtagaaacaaacttggctggctgggtgtggtggcacacactatcatgccaggactttgggaggctgaggtgggtggattgcttgatccgaggagttgcccagcagcctgggcaacatagtgagaccctgtctctacaaaaaaaaaaaaaaaaaaatagctgggtgtggtgatgcacacctgtagtcccagctacttgggaggctgaggtgggagggatcgcttgaacccaaggggcagaggttgtggtgagctgagatctcaccactgcacttcagcctgggtgacagtgagactctgtctcacgaaagaaggaacaaacaaacttggcttatttgaggagtgacaaagtggctgaaatggagtgagcaagagagacactccgagatcaggttaaagaaatctggaccttccaggaccttataggccatggtatagtttggactttttttcttttcttttctttttggaaatggagtctagctttgttgcccaggctggagtacggtggcgcgatctcggcttacttcaacctccacccgccaggttcaagcgattctcctgcctcagcctcccaaagtgctaggattacaggcgcccaccaccataccagctaattttttttatttttagtagagacagggtttcaccatgttggtcaggctggtctcgaactcctgacctcaagtgagccaccatatctggccaagtttggagtttttctaagctcagtaggaaatgggaagtactagagggttcaggcagaggcgtgatatgacctcacttttttttttttttttttgtgacagagtcaacctcggtcccccaggctggagtgcagtggcgccatctcggctcactgcaagctctgcctcccggattcacgccattctcctgcctcagcctcccgagtagctgggactacaggcgcccgccaccacacctggctaattttttgtatttttagtagagacagggtctcaccatgttagccaggatggtctcgatctcctgacctcgtgatccacccaccttggcctcccaaggtgctgggattacaggcttgagccaccgtccccggccttttttttttttttttttttgagacggaatcttgctcttgttgcccaggctggagtacagtggcacagtctcggctcactgcaacctccacctcctgggttcaagcaattctcctgcctcagcctcctgagtagccaggattataggcacacgccaacatgcctggctaatttttgtatttttttttttagtagagacggggtttcaccatgttggccaggctggtctcaaactcctgacctcaagtgatctgcccaccttggcctcccaaagtgccaggattacaggcatgagccactgtgtccggcctcacttatgttttaataggatcgccctgattgctgtatttagaatagcctgttggggtggacatgggggaacggaggtggagacagcatagaataagggagaccagttgaagaggctaatgctgtaagccaggtgacaaacagtgatggcttagattgggcagcagcagtggaaatagtgaggagttgaacattagcagtagaggtgaggagaattagtagggggatcataactccaccacaagagttagatccccagggttagtgagaaattattggaagaagataatttgtggaggatattatctggatcatagttatatttggggttatgttaggatcagaacttggattagggtctggcctggggccagtaagggggtcagaaagatttattggtctttgcaaagaccaagattagagtctgggtttggacagccctattgggattaagacaaattttagggtgaggatagtttggggtcacagttgtagatggaggctagtaccccttttcaatatcttcagaccagggttggttgtatctgccatcttctgtgccagtgagctyacctaggggtggaggggtttggaggctatgaggccttctcttccttgggtgtcacgggggtggacgtatgctcagccctgcctgggtgatgcctgctggccttcccaagctgggacctgtagtcggggaaggggagagaaggctccctggtgcttgacccagctccttttccctcagatggcccactgcgtgaccttggttcagctgtccatttcctgtgaccatctcattgacaaggacatcggctccaagtctgacccactctgcrtccttttacaggatgtgggagggggcagctgggctgaggtgaggcggattatggaggttaaggttgtggagggaggctaggattgtgttttggggtggaggctgtgactgtgatgcttactggcctctgcccacagcttggccggactgaacgggtgcggaactgctcaagccctgagttctccaagactctacagcttgagtaccgctttgagacagtccagaagctacgctttggaatctatgacatagacaacaagacgccagagctgagggatgatgacttcctagggggtgctgagtgttccctaggacaggtatgtagggctggggattaggatccttcagatgcaggtctgtgagacaacctagcctgcctggaggtagggggcaagcaggacctaaccctgcctgttatcctgaaactcccttccctgcttttccccagattgtgtccagccaggtactgactctccccttgatgctgaagcctggaaaacctgctgggcgggggaccatcacggtaaggaacccagcaagggttgaggagggasttaacatcaatgaattcatgaggtgatgtagtctcccctacctaggtctcagctcaggaattaaaggacaatcgtgtagtaaccatggaggtagaggccagaaacctagataagaaggtgtgtctggaagtaggccctggtaatccaagagttaaggggccaaggatggtgtatgggggatgggggtgtggacagagggatggcatartggktgkttgttcctgagtcttgtaactggggtctcgcattggcaggacttcctgggaaaatcagatccatttctggagttcttccgccagggtgatgggaaatggcacctggtgtacagatctgaggtatgagacccctgggattgggtgggctggggtaggagataatctcctggggcctgtgactagcaaggtttggaactcagaaagagactgcaggtgggtagagaagtrtggcagctcctcagggggccatgccagagctcactggaggccttggcctcyaccttcaggtcatcaagaacaacctgaaccctacatggaagcgtttctcagtccccgttcagcatttctgtggtgggaaccccagcacacccatccaggtgaggagcttgccccctaagtggactgmgctrgagaagagaacctggggagggacttattctcatctgccacctggcttgtttatgtccacacacacctttccctcaggtgcratgctccgattatgayagtgacgggtcacatgatctcatcggtaccttccacaccagcttggcccagctgcaggcagtcccggtgagtgctggtcttgccaggggtgtggaaatgggcctagatagctgaagcttgtkggagagaggaaggagaaggcagctcgagtccttgactgatgctctgagaatttcctaccctaatttttctgtcctcaccaggctgagtttgaatgcatccaccctgagaagcagcagaaaaagaaaagctacaagaactctggaactatcygtgtcaagatttgtcgggtgagacaaaagcccatgtaaccaaggctctgattcctgagctccatgacaccaactgctatcaccccaggcatgaccctggtttcatttgcaggtagaaacagagtactcctttctggactatgtgatgggaggctgtcagatcaacttcactgtaagttactttaccaagggcaagagaacaggtctggggctcagggtggcctttagctgccttcctcacctcctcccaggtgggcgtggacttcactggctccaatggagacccctcctcacctgactccctacactacctgagtccaacaggggtcaatgagtacctgatggcactgtggagtgtgggcagcgtggttcaggactatgactcgtgagtacctgcttctctgggctmtacccgctccctgcagatgcttcagcctctgagcttacagtcccctcactgccttttgcccaatacactgtcctcccacagagacaagctgttccctgcatttggatttggggcccaggttccccstgactggcaggtgagctccctctctttctgccactcytgttttcagtttcagggtcctgattttgggggatgtggtaaatttacttgctacttggcactcagctttaagaggagatgcagggttggattcctgcaggcacgtagacagcaagtgctcaggactccatagctcctataggaatcttggcacacgccagtgtcctttttcattcttagcagaggtcatggggaaagaacctcattttcattcttgtctccaggtctcgcatgaatttgccttgaatttcaaccccagtaacccctactgtgcaggtaagtttccccatccaccctgaggcaggtctgtccacacaaagaggggcaagcctgcatgagtaaaagggagagtgggggcagatacctgccttcattgtccagagggtggattttatttaattttagtttaatttattttttgagaaagagtcttgctctgtcacccaggctggagtgcggtggcgcaatcttagctcacttgcaacctctgcctactgggttcgagcaattcttctgcctcagcctcccaagtagctgggactacagtcgcttgccaccgtgcctggctaatttttgtatgtttagtagagacggggttttgccatgttggccagggtggtctcgaattcctgacctcaggtgattgacctgccttggcctcccaaagtgctgggattacaggtattgagccacagcgcctgacccagagggtggattttagagctaggcctctggaatcaaatcgtcatgccaggccaggagtggtggctcacgcccgtaatcctagcactcagttgcgaggccaaggtgggtggatcgcttgagcccaggaatttgagactagcttgggaaacatggcaaaaccccatctctactaaaattacaaaaattagccgagcatgatggcaggcgcctgtagttctrgctactcaggaggctgaggtgggaggatcacctgagcccaggaggttgaggttgtggtgagccatgatcatgatcatgccactatastccagcctgggtgatagagtgagaacctatctcaaaaaaaaaaaaaaatgatgccacatgacttggggcaggttgcttaatctctgtgtgctttggtttcataagactaaacataggaaattgagtactcaaggagaggatacaagtaaagcagtaagcctggtacttactaagtgttctccgaaaaatggtatctgttatattatcgttattatctttgcctagaagctaacaggtacttayytgagcatcagtggaagccttgtttgcctccttgcagggtgcattttgccagagtccaccaagcccttttgttkagggccaaaccttttgactccccagtacccccaagggggcacaagctgaagtggaaaatctgacctgacctgatctgatctgggttttaaaattttaattttgtatttcaacataagttcagacttagagaaaagttgcaagaatagtcataggagctcagtcccttggaactcaggggtcagggcctgagttcacaggggctcttcacctttatcccaattaccctaacataacattttaccacatttgttttctcttttctcatacatgtatacagtgtgtatgtgtgtgtatatgtgtgtgtgtgtgtacacatgtatacatatacacacacattcacacatttcaagggaaaaaagattaaaaatatgtgtttatgtatgtacacacatgtatacgtgtgttggagaatgctgtagtgaatagccctgcctcaggtttgcttctatggccctaccagctttgtacccatcattatccacctggctttttacctctgagtacttcagtatctcctaaaatcaaagactctttcttacattatcacagaccaatcctcaaaatcaggaaatgaacatctatgctattatccagcctatagcatttattcagatgttgccaattgtcctaatgtcttttacagcaaaagaaaatctcagatcacacattgcgttcagttagcacatatctttttatatggaagacttcttgcctttcatgacattcacatttcatgatataaacagtataggccagatattttctagaatgtccctcagtttgggtttacctgataaatcctcaggattagattcaggttgtacatttttggcaggaataccaccaaagtgatgctgtatattctcagtgcatcatattcagaggaacatgatgttgatttgtcctattaccagtcatgttgactttggtcacttagttaaggtaagatctaccaggtttctccactrtacaagtactattttctcctttctatttagtaagtatattctgggaagagactatacaaatacycatcacacacacatcaacattcccctctagtttttttttttttaatttattttttattttttattttttgagatggagtcttgctctgtcacccaggctggaatgcggtggcgcgatcttggctcactgcaagctccacctcctgggttcacgccattctcctgcctcagcctcccgagtagctgggactacaggcgcccaccaccacgcccggctaattttttttttgtatttttagtagagacggggtttcactgtgttagctrggatggtctcaatctcctgaccttgtgatccgcccgcctcagcctcccaaagtgctgggattacaggcctgagccactgcgcccggccttagtttttttattttttaagtgacgggggtctcactatgttgcctaagctggccttgaacccctgggctcaagcagtcctcccacctcagcctcgtgagtagctgggactacaggcacatgccactgtgcctggctatactctctagttttaacatccattgatgatccttgcctgaatcagtcatttctgtgattgtcaaatgattgtgtaattcttccttttacatttattaggagctttcccttctccctcagtaattaatccatagtacggatccttattgtatcaaatggatcattattaaataggttataatctgatgctcaaactctcctggatttgtccaggagaatccctctcatctgggtgctaattcaagctgtgatttagggcaagtcccctcctctctttgaaccttagtttcctcatgtgtaggagacagttaagtaccctggtttacaagggtgaatgaatgaaatgcacccaggttccgagatctcctgggctgggatggggtgatttcaggactggtgtagtcctgagaggtccaggattttacggtatttcttgctctcctctgcaggcatccagggcattgtggatgcctaccgccaagccctgccccaagttcgcctctatggccctaccaactttgcacccatcatcaaccatgtggccaggtttgcagcccaggctgcacatcaggggactgcctcggtgagagtcgtgggtggcagtggcagtggtggcaatcaagggcttccttgagggttatggaacaaaggacttttttttttttttttttttttgagatggactcttgctctgtcacccaggctggagtgcagtgacgcgatctcagctcactgcaacctgcacctcctgggttcaagtgattctcctgcctcagccttcctagtagcttggattacaggcgtgtgccaccatgcccagctaatttttatatttttagtagagacgggctttcaccatgttggctggggtggtcacaaactcctgacctcaagtgatccgcctgccttagcctcccaaagtgctgggattacaggtgtgagccatcgcacccggcctgtaacaagggacttcttatgagtgtggggatgtgtggctggggtgtttgcaggggtttaggaggaggatctgcttcaggacatgaatgggcttgtccccagcartacttcatgctgttgctgctgactgatggtgctgtgacggatgtggaagccacacgtgaggctgtggtgcgtgcctcgaacctgcccatgtcagtgatcattgtgggtgtgggtggtgctgactttgaggccatggagcagctggacgctgatggtggacccctgcatacacgttctgggcaggctgctgcccgcgacattgtgcagtttgtaccctaccgccggttccagaatgtgagtaggtgcaaatttgatctgggagtttaccctttcacctttccctgatgtgagtagggttgaggcccaagggatgctcaccttttcctctaagcctgggatatggttgggttcttgrgcatgaaatacagactttgggcagctgttctgggccaccactgacttttcccttttcttggcaggcccctcgggaggcattggcacagaccgtgctcgcagaagtgcccacacaactggtctcatacttcagggcccagggttgggccccgctcaagccacttccaccctcagccaaggatcctgcacaggcccyccaggcctaggttcccttggaggctgtggcaagtcctcaatcctgtgtcccagwggtccctctgggccacaacccaacccttctcactctcctcagtgctagcactttgtattttttgatacttttatacttgtttctgcttttgctgctcttgatcccacmtttgctcctgacaaccctcattcaataaagaccagtgaagaccaatgctttgccaccactctcttgtgtgtttttaggtaggaggctgctatgagcaatgtttacatcccctctccacaccttagtttgtttacttaggggttgttacgtgaaggatgtctctggtgtaaagccccactcaaagttgagtatttctgggcagatatctattcattctagagacactgactcactgtttttgaaaatacagccaggggtgggtatcatgtacctgtagtcctcagcttgggaggctgaggtgggaggactgcttgagctcaggagttccagagcaggtctgggcaacatagcaagaccccattacacacacaagaaaaggaaatacaaagtttgaaagtaagctaaacacccagccttcgccttccctccctcagggcagagctgggctgggaatacaaagatggaaagtgtcagacttcataaaaagcagcaaaaggagaaggatggatgagttttaaggtggagcaaaggctatgttagacttcctggaggggagggagtagtggtaattttggtcctaaagacaagtgaaaatcctgaatttttttaacagctaattttttcttaatagagaatacatgtattcattgtagaaaaattctggctgggcgtggtggctcatgcctgtaatcccagcactttgggaggctgaagagggcagatcatttgaggtcaggagttcaagaccagcctggccaacatgatgaaaccccatctctactaaaaatacagaaattagcttggtgtggtggtgggtgcctatgattccaactactcaggaggctgaggcaggagaatcgcttgaacccaggaagcggaggatgcagagagctggtattgcaccactgcaccccagcctgagctacagagcgagactctgtctcagaaaagaaaaaaattttaagtgcagaaaaaatatcactcaaactcccatgtcctgataaaacatattgggcacataactttttgtctacacatactgttttagcatgtgttaaaatttgttttttctaattttaaaatacgtgcttgttagtatgaagttatttcaaatataaatattgtacaaataggccaggtgcagtggctcacacctgtaatcccagcactttgggaggccgaggcaggcggatcacaaggtcaggagattgagaccatcctggctaacagggtgaaaccccgtctctactaaaaaatgtaaaaaattagccaggcgtggtggcgggcgcctgtggtcccagctactggggaggctgaggcaggagaatggcgggaacccaggaggcggagctttcagtgagctgagatggcgccactgcactcctgcctgggtgacaaagcgagactccctctcaaaaaaaaaaaacaaaaacacattgtacaaatagtggagcaggtaagggcccctgtttttcctagatctgaaaaatagatttttatcaatgggctatttatacgtactacttggacctttttatttaatacattttggtgtcttacctatcagaacctattgcttcattcctttttttttttttttttttttttgagacgtagtcgctctgtattgcccaggctggagtgcaatggcgtgatctcagctcactgcaacttctgccttctgggttcaagcgattctcctgcttcacctcccaagtaactgggactacaggcacgcaccaccatgcctggctaatttttgtatttttagtagagatggggtttcaccatgttggctggtcttgaactcgagacctcaggtgatctgcccaccttggcctcccaaagtgctgggattacaggcataagccactgcacctggccatcatttttttttttttttttgtaggagtgtaccttatttagctcatctcttatttatggagatttgagtcttagtttctttcaatgctgtaatgaacatccttgtacatatatgtctgtgcacttaactggaatgtttctgaagaaacatttgttctgaagaaacatttattcctaaaagtggaaatgctatatcaaaggttatattttaaattttaatagatattgcaaattattcttcataacaaaaattatggtcaaagttacaccttttgttaatctgacaggtaaaaaaagaagcaaaaaatcatttttagtttgaatttattttattttttattttatttttatttttttgatggagtctcactctgttgcccaggctggagtgcagtggcaccatctcagctcactgcaacctccgcctcccaggttcaagtgattctcctgcctcagcctcctgagtagctgggattgcaggcatgcgccagcacgcccggctgatttttgtatttttagtagagacggggtttcaccatattggtcaggctggtctcaaactcctgacctcgtgatctgctcacctcggcctcccaaagtgctggaattacaggcgtgagccaccacacccagctcgaatttatttaaatatgaaggatcggtatcttatatggttatttgtaaattatagttcttctcaatagcctattcatagtctgcatgtatgtgttatagcttttattttgttaaggttattagccccttcatctcatacatgttgaaaatatttcttcccaggttgtctttttatttatagtgtcctttggcatatagaattcttttaatatggacatattatttatgccagtttaacttgctttttaaaaagttatccatatatcatttattattattaccatttagatagagtcttgctctgttgcccaggctagagtgcagtggtgcgatctcagctcactgcaacctctgcctcccaggttcaagcgattctcctgcctcagcctccctagtagctgggattacaggcgcgcaccagtatgcccagctaatttttgttttgttttgttttgttttgttttttgagatggagtctagctctgtcgcccaggctggagtgcagtggcgcgatctgggctcactgcaagctccacctcccgggttcaagcaattctcctgcctcagcctcctgagtagctgggactacaggtgcctgccaccacgcccggctaatttttttgtatttttttagtagagatggggtttcacaatgttggccagactggtctcaaactctcaacctcaggtgatccgcccacctcggcctcccaaagtgctgggattacaggcgtgagccaccatgcctggcctatatatcattactttcagtggcttcagacattctcttatattaccatttctattggctgcttattttttataacagtttatctacttggttactaagtttccaatttataaacaacactgttaaatttccttataaatattacctttgaatacatctatgtattctatggatacattcttagaaatggaattgctgtgagtaaagagtacaaaaagttgtaaggcttttggttcctgttgtgaaactgccctccagaaaagctgcattagttcataattctaaacttaggctttgataaataaaaataggccttgagagcactcagtggggtctttttcatcttcaaattataaaaaaatcccccagattatttatttatttatttattttatttgagatggagtctcactctgtcgccagactggagtgcagtggcacgatcttggcccactgcaacctctgcctcccgattcaagtgatttcctgcctcagtctcccaagtaactgggactacaggcacatgccacaacgcccagctaatttttgtatccatgttggccaggatggtcttgatctcctgacctcatgatccaccctcctcagcctcccaaagtgctgggactacaggcatgagacaccataccaggccgaatttcacttcttaaaagtataaacactattaatagtctgtatattcttctaaagcatgagcacattgggaaggtgttaatgcctacatcttatttttttgtaggagcgtacccgtctcttattcatggagatttgaatcccagtttttttcaaacaatgctataatgaacatctttgtacatgtatctttgtgcacttaacaggaatgtttctgaagaatttgttcctaaaagtggaagtgctagatcaaagggtatatttaaaattttaccagatactgcacattgccctccaagatggtgcatgttgtgcgtgttgctttgctcatgctggtcctcctttcctacccctaggtagaactcattaatcctttgttgccttctcctccatcttttttccctgcaattccactttcgacccttagagtgaagaattcttggatctgtaaatgcattgtcctgtttcctggagtctcttctttcccctgtcaggctccttgagggcagggactggtgaacactaaatcatctatgctgtgcctcacacagagttgggaactcaggtctcagtaagacaacctatgtaggggctaccaggcctgcatcagctctgtgactcagaagcttcctagaggttatcaagtctccttagcttttgagtgtgtgcctgcagaaggtgggtagctacccctccaccggtacctagcaggagttggggactttcccactggggctgggaattgagcacaaaggtgggttcaggctgcctgcagctctgcagttagaggactggctctggaggaaggtgggcctgggtactgctctgtcactgcctttcactagctgtgtgacattgaacaagtttcctgacctgagcagcttccctttctggttgtgagaatgaagttaggtaatgtgtgtaatgtccacagcactgtttcttgtacgtggtaggcactccataaacaggagctgctattacgatcttgatcaagacttctccaagaaaagagggtgcattgggaagtcagcccctccatacttagatgcaacggcagccagagctctcccaacagagcccccgaaagcactgatccagtatccttcagcagaactcaattctactccaaaaatcagcatgtttaatggggcccctgtgcactgccctctgccccctctgaggttcgcacaccgtgggcacggactcgatacaagcacgtgaaacgggggtggccccagttgcttagaatctggatcttcaccttgggaaaggcagctggggggtcattctggggagacaaatggatcatgccaagggctgccctcctcctggatcattcatccctcactgccccactcccttggcaccttcaccctagagacaaacacacctgcaggtggaaagtctgaatctccgatttctcaacatcgaaggtgaatttccccaaggaaacttcagtttcatcataaacctggaggccctggtgggtgaagaatgaaaggaggaactatgagggggacaggtggggcggggggggcggggagaagaaaactttgctgaggatcttctatgtattcaatagctatatgcatgttctcatgtattttttgatggtcgtacactgtaattcagaatgtgggctctaagaaaccaggttttatttatttatttattttgagacggagtgttgctctgtcacccaggctggagtgcagtggtgagatcttggctcactgcaagctccacctcccgggaagaaaccaggttttaaatttaatcctgccaactgttagttgtattaccttggaaaaataacttcccctctctgagcattactttcttcatctttaaagggggagataacagtacatcataggttgttatgtgggtgcaaagcaggcacggtggctcatgcctgtaatcctagcatttcagaaggccgaggaaggcggatcacttgaggtcaggagtttgagaccatcctggccaacatggtgaaaccccatctctactaaaaatacaaaaattagccgagcatggtggcgcacgcctgtaattccagctactcgggaggatgaggcacaagaatcgcttgaatcctagaggctgaggttgcaggtgagctgagatggca

SEQ ID NO: 98063 - DNA, 14650 bp, Homo sapiens
atccacctgcctcagcctccaaaagtgctggtattacaggcatgagccagcgcatgcgcagcctaggtgctacttcaagtctcattttatagatgaggaagccaagaggtgaactgactttcccaagatggcaggcgcacgcctgtaatcccagctactcaggaggctgaggcaggagaatcgcttgaacctgggaggtggaggttgcagtgagccgagattgcaccactgcacatcagcctcggcgacagagcgagactccatagaaaaaaaaaaaaaagtgaaagtacatttcaaagaatttctagaaatgaaaaatagtcatttaagtttaaaaaccagtagaagggctaaacaaccaattaggcacagttaaagagagaaatattggccgggtgcagtggctcacacctgtaatcccagcactttgggaagccaaggcaggtggatcacctgaagtcaggagtttgagaccagcctggccaacatggtgaaaccccatctctactaaaaatacaaaaattagccaggcatggtgatgaacgtctgtaataccagctacttggtaggctaaggcaggagaactgcttgaacctggaaggtggttgcagtgagctgagatggggccactgtactccagcctgggcaacagagtgagaactccgtctcaaaaaaaaaaaaaaaagagagagagagagagaaatattgaacagaaagatggagctgaaaaacattacccataatgtaatatagagaaataaaatcatagatgtaaaagagagattcagatacttgaaggatagaaagaaaaacaatccaacatttgcctaataggagtttcctaataggaggaaatactgagaataagggagaggcaatatttgaaagaaatggctgagaattacccagaattgatgaaaggcaagagttctcatatttaggaagcctgaatgtactgtaacaggataaatgaacatatattcatacctaaacaccagaacagcaaaagcaaagaaatgctaagatctggaaaaaatgggtagtggggatatgaatgtcatgtaattgattctagtcttattcaatgtattattcactagagtatgcttggaatgatgaatgtgttctgagactagatagtgatgatggttgcacattaaaaaaatggataaaatgcaatgagaacacatggacacagggaggggaacaacacacactggggcctgcctggtgggcaggccagtgggagggagcgcatcaggatagctaatgcaggcagggcttaatgcctacgtgatgggttgataggtgcagcaaaccaccatggcacacatttacctacgtaacaaacctgcacatgtatctcggaactttctttttttttttttttttctgagatggagtctgtcaccaggctggagtgcagtgcctcgatttcagctcactgcaacttccgcctcctgggttcaagcgattctcctgcctcagcctcctgagtagctgggattacaggcacgcgccactatgcccaactaatttttgtatttttagtagagatggggtttcaccatgttggccaggatggtctcaatcccttgaccttgtgatccccctcccctgtcttggcctcccaaagtgttgtgattacaggcgtgagccactgctcctggcctgtatcctggaacttaaaataaaattttatatatattatataaaataaaaatatatatatatatacacacacacacacacacacacacacacacatatatatatatatatttttttttttttttttttgagacagagtctcattccattgcctaggctggagtacagtggtgcgatctcaggtcactgcaacctctgcctcctgggttcaagcaattctcctgcctcagcctcccaagtagctgggattacaggcacacaccgccacgcctggctaatttttgtattttagtagagacagggtttcaccatattgcccaagctggtcttgaactcctgagctcaggcaatccgcctgcctcagcctcccaaagtgctaggattacaggcataagccaccacacccggccaaaatatttttaaaatggttaaaatggtaaattttatgagtttacaaaaattttaaaaattataccagttggccaggcacagtggctcatacctgtaatcccagcactttgggaggccaaggcaggcagatgacaaggtcaagagattgagatcatcctggtcaacatggtgaaaccctgtctctactaaaaatacaaaaattagctgcgcgtgctggctcggacctgtagtcccagctactcgggaggctgaggcaggagcatctcttgaacccgggaagcagaggttgcagtgagctgagatcatgccactgcactctagcctggcaaaagagcaaggctccatctcaaaaaagaaaaaaaattatagcagttgatgtaaatgaaatagcaataaaacttgctatacatcttttcctaaatgattttttttctttgagacaaggtctcactctgtcactcaggctggagtgcagtggtgcaatcacatatcaccgaagccttgacttcctgggctcaagtattccctacctcagtctcctcctgagtagctgggaccacaatggccaatttttatattttttatagagatagggtctccctacgttgcccaggctggtagataatttttaaaaccttttcattttgaaaaaaccataggcacacaagaaattgtaaaaatagtacagaaaattcccatgtacccatcatccattttcccattttattctttatttttgctttattttttttttttagagacagagtcttgctctgtcacgcaggctggagtgcagtgctgctatcataactcactgcagcctttaactcctggactcaagtgatcctcccacctgaacctcccaagtagctaggaataaaggcgcacaccaccaagcccagctaatttttgtgtgtgtgtgtgtgtgtgtgtgtgtgtgtgtgtgtgtgtgtgtgtagagtcttgctgtgttgcccaggctggtctcaaactcctggcttcaagcttcaaaccccaccttggcctcccaaagtgctgggattacaggcacgagccactgtgcctggccttcattttctcttaatggtagtgtcttaccatataatacatatagtaatttttctttttctttttttgagacagagtttcactctttttgcccagctaaaatcacattcagtggtgcgatctcggctcaccgcaacctccgcctcccgggttcaagcaattttcctgcctcagcctcccgagtagctggaattacaggcatgcgccaccatgcttggctaattttgtatttttaatagagacagggtttctccatgttggtcaggctggtctcgaactcctgacctcaggtgatctgcccaccttgcctcccaaaatgctgggattacaggcgtgggccaccgcgcccagcccatatggtactttttcaaaacctggaacttgacgttggtatgatataattaactagcctacacaccttactcagatatttgggtgaattgatttaaaagctatacaatatccagtgcagctttccactagttaagatgaagaattttactgttcttatcccattgaataaaatgttttgattttttttaaaaaccaaaatgttctgtttttttcttaaactttaaaaacaactcaaacattttcatttttttactatctttacaagactacaattgaattaagggggtggcagtggagatgaagaagatgacttagaaatagaaacgaattaaaaaatggatttgaggccagactcagtggcttatgcctgtaatctcagcactttgaaaggccgaggagggtggatcacttgagctgagttcgagacagggctggcacagtaaaccccatctctacttaaaaaaaaaaatcagcaaggctcggtggctcacgcctgtaattccagcactttgggaggccgaggtgggcggattgcttgagaccaggagatggagaccagcctagccaacacagtgaaaccccgtttctaccaaaaaaatacaaaaatgagccaggtgtggtgttgtgcgcctgtagtcccagctacctgggaggctaaggcatgagaatcacttgaacctgggaggtagaggttgcagtgagccaagattgtgccactgcactccagcctgggcgacagagtgagactctgtttcaaaaataaattaaataaataaataagcctagcgtggtggcacacttctgtagtcccagcatcttggcaagctgaggtgaaaggattgcttgaaccttggaggcagaggctacagtgggctaagattgtgccactgcactcctgcctgggtgacagagtgagactttgtcctaaaaaaaaaaaaaaaaagaatttgggtatcataggagtaggaggaattaataacacatgagttctggtttcaataactgggtacgtggtggaaccatttgttgagatagagaagttttgaagctgggtgcagtggctcacgcctgtaatcccagtactttgggaggccgaggtgggcagattacctgaggtcaggagtttgagatcagcctggccaacatggtggaatcccgtttgtaccaaaaatacaaaaaattagccgggcttggtggcacgcacctgtaatcccagctattcgggaggcagaggcaggagaattgcttgaaccccggaggaggcagaagttgcagtgagctgagattgcgccactgcactccagcctgggtgacagagcaagactctgtctcaaacaaaacaaaagagacagagaagttttgggaagggttggtttacagggaaaatcctgggttcagtctcaggcttattcaggtgagatgtctctgagccatctaagtggcaattcagtaggctgttggatatggggtctagagactacaagagaggattgagttgatgtcacacaactccagagagggcatcacacacaagtatatttaaagttccaggctggggcggggtgcagtggctcatgcctgtaatcccaacactttgggaggccaaggcgggcggatcacctgaggtcagaagttcgagatcagtctgaccaacatggggaaaccccgtctctactaaaaatacaaaaaaattagccaggcgtggtggcgggcacctgtaatcccagctacttgggaaaccgaggcaagagaatcacttaaacccgggaggtagagggtgcagtgagccgagatcgtgcctctgcactccagctggggcgacaagagtgaaactccgtctcaaaataataataataataataataataataataataataataataataataatttaaaaataaagttcccggctgggcatggtggttcacgcctgtaattccagcactttgggaggctgaggtgggcggatcacttgaggtcaggagtttgagaccagcctggccaatatggcgaaaccctgtctccactaaaaatataaaaattagccaggcgtggtggcgcatgcctgtagtcccagctacttgggaggctgaggcatgagaatcgcttgaaccaggcaggcggaagttgcagtgagccaagatcatgccactgcactccagcctggacaacagagcaaaaactccatctcaaaaaaaaaaaaaaaaagttccctctcaacccctgtttatttatcccataaatatttattaaatgattctaagtcttagagctgcagaggtgaagaagagagactaggtcagcccctgtcctcatgaatcttacatccagtggaggtcatttcggtgtcagagaaagggtagggtggtggcttttttcaggcaggctaaaggagggaggtcacaatgtgtactttgtgatgagatctatgatataactgggatgacagcaaggcccccactgaggtattccttcccctctcaggactagccacatgctgtctctctgccctggcctcttccaccccatgcccagtcagagaccgttttgagggtgagcaaatggatagtgaggcaggagaggaggggttggaaggaggtggaaggtggtgggatggggagttgtggaggccgacaggacagagggaagctggtgctgtctgtggcctcagcccctcatccttacaggtagagaagccagtctacggcccaccacgggagccaccgcctgggccagacatgaagcgctggcagatttttgtcctgtgggtcttttgggtgctcatcctctggctgatgaccccctatctggatctgacacctgaatcagcaccccaggaaaaacgaatgtacttggtaccacagcattgcgactgcccttggttcagttccgggaagtgtggctgcccttctgagaccctcaactgctcctcctgccaccacacagccgacgaatggaactggcttgatgcgtgctccaggaagactatggggtacctgatgaggacaagagagtctatgacctctgacactgtgctctggtggttggtcagtggtcaacactgggcccggccatatcccccatgctttccgggcctcacccatctcccactttccgcccaaatccctgcccttggccctgtcttcacagcctctggatggagatctcacccacccagctctgttttctctcccctgggcccagcccccaatctccctcttgctgtttccagggcatgaactcagggagcgagcttgggaaattgtggaggaagctgtttaaagggattcccaggctctcggtgagccattttgatttctattgtgggacttgtgtgctgttggggcgcccacagatcccgcagggctccagccttggcaacgacatcgaccaataccccgtggttttcaggtgggtgctggggagagggcgggagyaggaaggccaggcctgccccacagttccatcagtttctgctccccttcccaagatgaagcrggccccaagtccagggctttgagatggacgtggggaaccaaaccacacacaatgcttcatctatcccaggaatgccagcgaccagggctcctggatgcagctggagatgctactgcggaagctctctgacctggtrtggacttcagatgctctaagtgatraggtgatggaggtgtccccagacattctctgtgtgggggtgaggggaggtcactgcagggagtaacagcaggggctctgggaagaccttctattggcttactggggacacttgcaggactttcccaggtcttgtggcccaaactcccccacctccaattctttctcagattttggaagatggtctggttccctagtggagtggaagatagcaaagacacggtgagggggaataggaaaaggggtaggatgtggctgtgggttgctgtgggaagggccccaggtcagttccctcccccttcctccccaggtgcaaccaggacaactggctgtcttaccagggtcagggtcatccctggggcccaaggctttgttctgtgtcttgcacaactgtgccccggcaggaaagattcttgtatcttcttctcttaaaattcctgctcctcaatgccttcagcatggagtctaaagttttctgcctggctttcaagactctacatgtaggccaagcrtggtggctcatgcctgtatcccaacactttgggaggctgaggcgggtggatcatgaggtcaggagttcgagaccagcctggccaatatggtcaaactccatctctactaaaaatacaaaaaatagccaggcatggtggtagcctcatctctactaaaaatgcaaaaaatagccaggcatgcctgtagtcccagctactcgggaggctgaggtagaagaatcgcttgaacccgggaggcagaggttgcagttagccgagattgcgccactgcactccagcctggtgacagagcgagactccatctcagaaaaaaaaaaagactatacatgttctgactcctccccttgcctcctgtctcccaggctcccataatgggctcttagaattccccagacacatgagctgcctcatgccttctctcgcaccattccgtttgcctggaatgcccttctcttacgtcctgggggttcccctctcttcctccaataccatgaggaaaagygagttgacattctcttttttgggatcctcagtgactctaggagagtgtccagagtctgtttcctggaggtgagctccagtctcctcccagctcccagggacaacctgtcatcctagatgctgagtgaagggaggcaggggtgaggacaggagtctgcctgctgacgcacatgtccctctcttatccactaggtcaccctctttggatttggatcagaatagcaaggaaagtgtttctatcactggaaggaggataatcagaccaagggctccaaggaaatactgcccacgtctagtgcaggagcagaaatcgaagtcatccatcagctagcgtgtggacaagctcactattcacacaagctcagcctagctgagtccatacaaatcctatttctgggtgggtaaagggcaggaggaaattgtaagatcagtctggtactgaataaaatcctggcctgattgtcttacctgtaaccacagtgtctgggagggatgggccagaggtgccttccagatctcaggggcaatatttgagttgatttctttgcctagtgccctggatcatgtaggaggtataagtttagattcaatttcatgccaagtgcaaacccagactttgagttgttgggggaggctctttacccacttcgataaaagaagtaaacctccttgtttcacccatgccggagggtgagggttgttttttgttttttgtttttttgcccagcttttcacagaaggtttagcattttgaggttcccagtttttttaggtgcctcagttccaattcgtttttttttttttttttttttttgagacaagagtttgctgtgttgcccaggctggaatggagtggcacaatcatggcttattgcagcctcgacctcctgggctcaagtgatcctcccacctaagccccctgagtagctgggactataaatgcatgtcaccacacccagttaattttaatttttgtttttgtagaaagggggtcttgccatgttggccaggatggccttgaactcctaggctcaagcaatcctactgccttggcctcccaaagtgctgggattacaggtgtgagtcactgtgcctagcacttaccgtgtcacttctgcagcattccattggtcagatcaagtcataaagtgatccaagatccaagaagtggggaaatgaactgctcttcctaatggaaagagctgaagagaatctgccataatgagactaccacagtgtcaagggcccagttgtgttggcagcagtggtggcattcctggtgggccattcctggggtagtctttggccatgttttgcatctcatgatagactgagcctggttctctagcttttgcatcatcctgtaaactactaaatatttagccggcgaattgtttttctctgaagtttaccagtctgttgaccaagaccaagaatccaactgctacagttaacaaagaataaaaaatcagacttttggctgggcacagtggctcagacccagcatgttgcgaggctgaggcaggaggactgcttgtgcctggaaaatttctgcataattcaccccttaatttgcatgtagttaaaagtgggtataaataggattgcagagctgctgctgagctgctaactctgggcacactgcctatggggtagccctgtccacaagaagcagtgtacctctgctgctgctgtgcaatgctgcttcaatacagtttgctaacaccactggatcgcatcagggcaaagccaagaaccctctcaggctaagccccaattttggggattgcctgccctgcatcagaggcatcactccagtctctacctccaacttcacatggcatactcccctgtgtcttctgtttccaaatttccctcatctttttttttgagatggagtcttgctcttgtcacccaggctggagtgcagtggcatgatctcagctcactgcaacctctgcctcccaggttcaagcaattctcctgcctcagcctctcgagtagctgggattacaggtgcccgccactacgcctggctaattttttgtattttagtagagactgggtttcgccatgttggccaggctggtctcaaactcctggcctcaagtgacctgcctgccttggcctcccaaaatgctgggattacaggcatgggtcatcacgcccggccaatttccctcatcttataaacacactagtcattggattagggcccattctcatccagcatgatctcattttaatttcattgtatctgcaaaggccctacttccaaataaggtcacatttataagtatcaggggtgagaacataaagattttttttttttaaagtaacacaattctacctcctgcaagcagaataatggcgtttctagacatgcaaacttagaatgttttatctcctacacaccctttcttagaaagttaccacgaacaaaaggccgggcacagtggatcatgcctataatcccagcactttgggaggccaaggtgggtggatcacctgaggtcaggagttcgagaccagcctgactgatatgatgaaaccccgtctctactaaaaatacaaaaattagccaggcatggtggtgcacgcctgtaatcccagctactcaggaggctgagacaggagaattgcttgaacccgggaggcagaggttgcagtgagccgagatcatgccattgcactccagcctgggcaacaagagcaaaattctgtctcaaaaaaaaaaaaaaaattatcatgaacaaaaaaaggtagtcttagttcatttacaaactctataggaaatatttatctagttacaataatgtaaacactaatagtagattgttgacttttagaattaaattagcctgtatttctgtaccatccaatatgatggatgagcacttgaaatgcggcaaatgcaagtgaggaaggaatttttaaatttattttaattaatctaaatttcaaaacaattcagttcttagaaaacttttcactatgcttattgtaacttgggtatgtaaatcttttttgactgtaaaattttatgaaatttataaatcatgtatttctgacaaaacgctttgaatttagatacactataagtgtaagatatacactggattggccgggcgcagtggctcaaacctgtaatcccagcactttgggaggcagaggcaggcagatcacttgagctcaggagtttgagaccagcctggccaacatggtgaaaccccgtctctgctaaaagtaaaaaaaaaattagccgggcacagtggtgtgcacctgcagtcccagctacttgggagactgaagcaagagaaccatttgaacccaggaggcgggggttgcagtgagccaagatctgggcaacagagcaagattccatctcaaaaaaacaaacaaacaaaaaacacaaaaaaacagttcttaaaaagaaaaagtcgacccctgagaggtgttaagggctaaaggtatcaaatattctctttcatcagtatagtaaattctcttcagaagattccaggtggcccttcttgaactcacgggctcaagtgatcctcctgccttggcctcccaaagctctgagattacaggtgtgagccatcgccaaggtggcccttctgtttccctctttgcctcctgctcacccaccccagcctggatacaacctctccctctgtgccctcctgtcccctggacccttgactaccacacctccctggtcatctgggcactgggctgaatgccaaggtgaaggaggggccttggtggagtaggtcacaacgtggcctctgtgatgagtccctgatatcactgggctggcacagaagaccccattaggaatcagtttcctcagggaggccacagaacacaaaaagtgtcctctctccctttctttctgcctctaggccaggctttggcagttccagtagtgatcagtaggtggccagggaggcaggagcgaggttttgggaggaggtgtaatgtcaagggttgggagagggatggaagccattaagatgggggatgctggggacttctgtggccccagcctcttcttcccggtgccaggtgtcggggccaatctactgtctgccaggggcaccatcatcagggccagagatcatgattcgatacaggagtttgggcctggtggctgcctatgtcctttcattgtggctgatcacctccttcctacaccagcactccagccagaaggacctccgtaatatggccaagatacacccaggaatctgccaccatcccagcaacttttccagaaaatgcaactgctcatctgaggtccacacatgctctgcctgcctccacgtgcctggcgagtctgactggtttgacagacgcttcgacagtaccgttgaacccctacagaggccacaagatcccacgtccaatgatgctctgatattgtggctggtcagtgcgcaaacttggtctttgtccagtccctgacccaaccccaggtcctagccatctctccatcaaggccccaggctctaaccttcttccacaggtaggtggaacctgggtcaagcccctaaattcttccctcctatgctcctagggactcgagagggtcaagtcagagaaggaggttgagaataagcagcagcagctgattaaagcacctcccctgtgcccactgggccatgtggtgtccaactgccgggtctgtgcagtggtgggaaactcaaggtctctatggagctctggccttggcttcaggattaatcaacatgaagtggtcctcaggtgggtgcagggtaggaggtggagacgaagaccaagccgaagccttttcctcctctaaatgaccatcctaacttccttttcaggatgaaccaggcccctgtctgaggctttgaggcagatgtggggaacaggaccaccatgcgcgttatgtaccctgggattgccagccctcaggaccccggtacccaactgctgctgcttccgttgaattcatctggtctggagtggttcataagtgtactgcataaacagacaagcatgtggaagcaaaaaaaaccctgggtatgtcagggagtgaggtcactgtagggagtgacagaggtaactccaaagagaccctggctggatactggggcacccccaaggcttacttaaggctgaagtctgcttgtcaaatgactctgaaatcctcccaaacctcaatttctttttagatttcagacggttcaggttcctggtggaaccgaagacagcaaagataaggtgagggtcccaggaaggaaaggggaaagtggtaggacaacatgatagtgggtagccatgggacaggcttcaggtcagtccctttctccatcttcctaggtgctggtgatcagcctctacttcctcaggtatatccaggaaagttggctggagaaccatggtcagtatccgtccttggagtttgtggctctgttgtatgccttgcatacctgtgaccaggtaagatatctcctgcaactcacggactttcactcctctgccactcaaaatttctgtcttcttggctgggcatgggggcttacacctgtaatccctgcactttgggaggctgaggcgggctgatcacctgaggtcaggagttcgagaccagcctgaccaacatggagaaacgccgtctctactaaaaatacaaaattagccaggcgtggtggcgcatgcctgtaatcctagctacttgggaggctgaggcaagaaaatcgcttgaacctgggaggcggaggttgcggtgagccaagatcatgccactgtactccagcctgggcaacaagagcaaaactccatctcaaaaaaaaaaaaaaaatctgtcttcctaaggacttcccgttaaatctaaaactttctgcctagctttcaacaccctacatgatctgacccctctcctctctccctctcctctctcccagattcccgcactggacttcttggggttctccaaacataccagctgcctcacgccttctcacaccttgctccctctgcctggaatgcccttcccttgtctcccaggggaatcctctcttctctcaatatataatgaagaacaactagttggtgctctcttttctgggctctggggtcactatgagtatttagagtctgtcttccttgaagaaggtgaactccattctcctcccagctccaagaggaagcctggcacactagtggttgagtgagtggtgctgaaggcatgataggtgttccatgggggcagggcaggatccagcccgttacaccaccaccatcttttgtcttatccaatctctcaggtatccttgtttggttttggggaagacaattgcaaaaggtggtcccattactgggatgacaaatattggtttgagaacaccatgcaaaatttcccagcagaataccagatcatcttgaaactgcagtgtgagaggaagattgctgtctacggctgagatgtttccagtggagtc

SEQ ID NO: 98064 - DNA, 50673 bp, Homo sapiens
ggaatggacacatgggctattatgagtgccccttaatttttttcattgccgtaactatgatgagttcaaaacattttacttttttgaccaaagatgaaactctgacagaaagcatcagttatttccctatctagttcacatcggatctaacgaaattatcttgagtttgaggacaggatttttgacagtgatcccaagcaaagttaatgtggtatcaacctcaagtaagtggccagggatgtacccttgaaagatttcttcttttttttttgagacagtctcccactgtcgcccgagctggagtgcaatggcgcaatctcggctcactgcaacctccaactcccgggttcaagtgattctcctgcctcagcctcccgagaagctgggatgacaggcgcccgccaccacaccctgctaattttttgtatttttagtagagacgggatttcatcatgttggtcaggctggtctcaaactcctgacctcaggtgatctgcccaccttggcctcccaaagtgctgggattacaggtttgagccaccacgcccggcctagatttcttcttaaaaactaatcattctgccaggcacggcgactcacacctgtaatcccagcactttaggaggccaaggagggctgatcacttgaggccaggagtttgagaccagctgggtcgacatggcaaaaccccatatgcactaacaatacaaaaattacctgggcccacttggtcgaaatcccagctactcaggaggctgagacatgagaattgcttgaatccaggaggtggaggttgctgtgagctgagatcttgccactgcactgcagcgtgggcaacagagtgagactatttcaaaaaaacaaaaaaccaagctgggtgtggtggctcacgcctgtaataccagcactttgggaggccaaagtgggcggatcacctgaggtcaggagttcaagatcagcctggtcaacatggtgaaaccccgtctctactaaaaatacaaatattagccgggagtggtggcgcatacctatggtcccgctgctttgggaggctaaggcaggagaatcacttgaacctgggagaaggagactgaagtaagctgagatcaagccactgcactccactccagcttgggtggattgagtgagtatccgtctcaaaaaaaacaagcaacaggccgggcatgttggctcatgcctgtaatcccagcactttcggaggccaaggtgggtggatcacctgagatcaggaattcaaaaacagcctggccaacatggtgaaaccccatctctacaaaaaaattagccaggcatggtggcaggtgcccgtaatcccagctacttaggaggctgaggcaggagaatcgcttgaacccaggaggcggaggttgcagtgagccaaggttgcgctacagcactccagcctgggcaacagagcgagactccatctcaaaaaaaaaaaaaaaaaacctaatgattcacttcgggaagctaagccaagagtttgagcctgcagtaaaccatgtaaaccataactaagtctctgcactccaagcagcctgggagatggtgcaagactgtctcaaaaaacatgattcacaaatttaagttaaaacctttggatatgtcactagaatacccttgacattgtgccaatagacaggcaagtatttaaaacaattcaatcagtcagtagattgatgagataatcaagtgcagaaggaacctgggtggggagatacaatttcatctgcctaaatcaggcaaaggtcacatgagtgttaaaattaattacatctatatgaaatgggcttaagtttcccattgtcctagtgatatggggaaaaaaaaagggtcaggcatgctggctcacgcctgtaatcccagcacttaaggaggcatagaggagaggatcccttgagccaggagttggggaccagcctggacaacatggcaaaaacccaactctacaaaaaatactaaaattacctgggcctggtggcatgtgcttgtagtcccagctacttgggaggctgagatgggaggatctcttgagctcaggaggtcaaggctgcagtaagctgtgattttgccgctgtactctagcatgggtgacaaagtgacactgtttcaagaaagaaaaaggccgggcgaggtggctcacgcctataatcccagcactttgggaggccgaggcaggcaattcccttgaggtcaggagttcgagaccagcctgggtaacatgatgaaaccccatctctaccaaaaatacaaaaaattagccgggtgtggtggcatgctcctgtaatcccagctacttgggaggctgacgcaggagaattgcttgaacctgggaggcggaggttgcagtgagctgagattgtgccattgcactccaacttgggcgacagagcgagactccatctcgaaaaaaaaaaaaaatatatatatatacatatatatacacacatgcacacacacacacacacacatatatatatatagagagagagagagagcgtgagccaagaacgcgccattgcactccagcctgggcaacaagagtgaaactctgtctcaaaaaaaaaaaaaaagaaaagaaatgttaaatgcttgaggtgatggattaccccaattactctgatttgattattacacataatatgcctttatcaaaacatcacatttgaagcccaaatctctacaaaaaaaaattttttttttgagaaagagtttcgctcttgttgcccaggctggagtgcaatggcgtgatctcggctcactgcaacctccgcctctcaggttcaagtgattctcctgccccagcctcccaaatagatgggattacaggcatgcgccaccacgcctggctaattttgtatttttagtagagacggggtttctttatgttggtcagcctggttgcaaaccctcaatctcaggtgatccacctatctcggcctcccaaagtgctgggattataggagtaagtcatcacacccagcccaaaaaatttttaaaaaattaagctgggcatggtgatgtgcacttgtttttctagctaattgggaggctgagctgggaggattgcttgagcccaggaatgcaaggttacagtaatctatgatgttgccactgcacttcagcctgtgggacagtgtgagaccctgtctcaattaaaaaacgaaacaattctacttgctgtagattgttggggacaaaaaacaaaacaaaaccaaaccacatgtatctgataaacatatacatttaaaatgtacccttaataattaaaaaattaaaaatccacattggtaaaatacatttagttttcagccaaattctctaagtatattcattacctttttggctctatttcaagctctattcctccatcttttgaaagcaaaatgatgaaatgggaattaatttacatagaaagttcatgaaccagagttagtgaagttttgtaaagtgaatgagaagcatcttatgttcgtgatattttcttttgtgttaagagacagggtcttgctctgcagcccaggctggggtgaagtggcacgtgattctagctgactgcagtcttgaagtcctgggcccaagctatcctcccatctcagcctcctgagtagttggaactacagacatgcatcaccacgtctggctaattttaaattttttgtagagacagggtcttgctatattgtccaggctggtctcaaactcctggactcaagcaatcctcctgccttggcctctcaaagtgctgggataacaggccatgagccgccatgcctggggatattttcttttaaacataaaaaatacttgtttcagaaacttgatttttccaaacggcttttcttgatgatctgctaagttgccatattgcctctgatggtccttgagcagaaaactatttaagggaccttaaatcatcaagcgacttagagcttaaatccttcctcttcccaaacaagaagtctagcggttaaggtcaaattctgtcatgtcatgttcctaaacaaacaagaaaaaccaagtgccatcttcatgctttcattttgcactagtcataatactggaattaccgaggggcaggaagagatagcaaaggttagcttgctttatttctgacatattatgcttcaatttcctgtgacagttttcttttctttctttttctttcttttttttttgagatggagtctcgatctctgtcacccaggctggagtgcaatggcatgatctcagctcactgcaacctctgcctcccaggttcaagtgattctcctgcctcagcctcccgagtagctgggaattgcaggcgcctgccacctagttttttttttatttttagtagagacagggtttcgccatgttggtcaggtcttgaactcctgacctcaggcggtccacccgcgtcggcctcccaaagtgctgggattagatgcatgagccactgcgcccagcctccagagcgagactgtctcagaaataaaataaaaagaggatctgaattttcagaaaaaggattaagggagtattctaactacaaaataactgttattaataatcctctaagataaatcctaacctgtgtgtaaagttaacctgagaggcaaaaccacttaacatctatatttgctctaaataattttgtttagcagaaacagaagttagctgttttgaagatcaaatatttaccaggcgttttacagacattatatcatttaatcttcactatagcccttctgagccttcattcattaatttactgagggtccacttgggcagacatgccctgctaacctctaaaaattcagtactgagcattacctgccttcctcagtctcaagtagcttagactagctactaagtacgtcctcttttaaatcaggaaatgaaagatcccctctgagaggttaatttgcttgtccaaggtcacacagtgttgcagcagctagttacactaatcaaggcgtctcatttccaatcttttctgccctcaatcattagactgttaagattagagggtaagatttttgctttgaagacttctttccagttttttttcccagcatctaggaggaaacctcacacagtactgaccaaagaacaaatggctaattcatactctaattacctggcatctagaagacttcaggggagaggagccaggtcccagggggaagggggcctttttttttttgttgggggggtgtcttattttttcaccaaatcgtccagtaatattcaggaaggggaacatttttgaaggaacggtagcaaccctgacacaagagctgattaaattcggggcacaaaactgatcccatgccaagggaagcaagagtttattttttccaccttttttttgcttttctccactatttccaaggttgtttcaaagctcgacagtggaggccgcgccattggctccaaatgacagggaaatctatttttattatctccccctctccccctacccctaaagatctcttcttctggccttctgatacacttttccacttcctctccaccctcagcggataatctgaatatggccgttttatcctatcgccataaggactaggttgccttatggcgaccttgacagccatctgtgtgggaggccggagcgggggcgatcggctgtgccggaggaatcttcagatggccgtgaggaggcgccacgagggggaggtgaccgctgagctccactcagcgaagagctctctgaaagattgacaggcagcctaccaactgtctttgccctagagacccgctctgtctcgcgagatttgggtgcttacgcggagggggagtgaaaggcgcctcactgaatgggggatgggaatatctgtggcgcaatcattgcgcgagattgggctacggtcgccggagccatacttaggtctcgcgatacttcggccgctcagatttggagcttggggcagcttctcgcgagagcccgtgctgagggctctgtgaggccccgtgtgtttgtgtgtgtgtatgtgtgctggtgaatgtgagtacagggaagcagcggccgccatttcagggagcttgtcgacgctgtcgcaggggtggatcctgagctgccgaagccgccgtcctgctctcccgcgtgggcttctctaattccattgttttttttagattctctcgggcctagccgtccttggaacccgatattcgggctgggcggttccgcggcctgggcctaggggcttaacagtagcaacagaagcggcggcggcrgcagcagcagcagcagcagcagcaatctcttcccgaacacgagcaccacaggcgcccgaaggccggaacaggtacgggkcgttgcggacccgcgtattatctcagctttctcgaggtttggctccattttgggctgaggggcgcttttggaggtctttagcgaccggggtggggggtggttttcgagaaatcggccctgtttcagtgaccgcgcccttattttccagtcgggtatagtctggattcttggggcggtagggacccccgagaggccgcggtagaatggtgacmtgtctccttcgaggcctgggccggccgcgacctcccaacatggcgccagttgaacgctgccttggctcataacccctcccaatggagggagtttcyctttgcccctaaaatggcagcgcgggtttttgcccggaaagaggcgctctcgttcgggtctcccagtttctgtttttggagttgacagcagagttttaaatattggatattgaagtcttcattttcgtgtgtttcgtgtaagaggcgttttggatttacttacgtaagccaaacctggttaaagtgcrtgtcactttagtcattaattgtagggcttttggaggtttttcttaagttttcgagtgtgtcggctgagaagaaaaattcagtcgatttgaaaaacgtttaccaggccgggcgcggtggctcacgcctgtaatcccagcagtttgggaggcagaggcaggcggatcacttgaggttaggagttcgagaccaacctcatcaacatggtgaaaccccgtctctaccaaaaatacaaaaattagccgggcgtggtggcaggcgcctgtgatcccagctattcgggaggtgaggtggtaggatcgctggaacctgggaggcggagcttgcagtgagccgagatcgcgctactgcacttcagcctgggcaactagagcgaaactccgtctcaaaaaaaaaaaaaaaaaaaaaaagaaaaatgtttactcacggaatcgtcttgttcttttcctaggcgtttagagaaaatgttagacgatataggcaacaagagtgaaacttgtttcacattgtaagaraaatgtttactcaagaaattgtcttgttctcttcctaggcgtttagagaaaatggcagacgatattgatattgaagcaatgcttgaggctccttacaagaaggtgagaaaaaacatgtcggtgaggtttatatatttcttaatttagcattattcacgaaactactgctgaaatgtaaactaacctccccggagccctcttgatttatcttaycagagatgcattacgtgtaacttacaaaagtaaatatatgctattgatgtaataatattgtgcagtagtttcacttcagcgtgatgaataaatgcccatctatctctctttgtagacttgcctaacgatatctcacctctactcccatgaattcacctttgattccagtgtgaactgtcaatcataaggtagtaattgagtgacttatcgctgtaccgtggtcccctaggtaaaatgactcaactaagaattaccacctccagtttggtatagcaaaaaggtgaatgtagtggtttgggaaaaagcaggggtccaagaataacaaagcatgaccagtctgtggcaagttaaatcttctaayagtcttataagaagaaatgggtgagattttaaaatttatgtatctatgtaagactggtgatagtaaatcttaaaacagtccagtggcaatctgctgctcagttaataattactaaaattcttggatccctgaatagaaattaaaaaaaaaaaatacaagaggcagtagagtcaatacaagcttaatacaagcttagagtaaatacaagcttagagtcacttgatgactgttttactgttctccatattgtttttatttttaattaggccctaccatagtatttcacactaaaaacaaaggaattatattggctaatatagtctttgactcatttcggtatctcagtaaaagtaaactgtcttttcattgtttcaccagttggtggtgaaaatagcagtatgcatgcattatcactggtgtcacaaactgtaagctttgtaagttagcactttactcctatagctgatgtaatcaaactttaaaataaacatttcactaaaccttttaaaaataatacatttgttttggattgtatagcacgaccatgtggtaccaatttggatgaattcttgatagatttaaatagtgtatgtaattttgtaatgcttagactcttgaagagctactttctgttttaatgttaagattcttgtgtcttagttttttttaacatggatgtaattccatgtaaacaggtatggaagtaggaaatgtttaggctggacttggtggattattaattgactttcttgggttcttgggagtcaacattactaaagcagtgtgaatccctgtttgcttcagggcgagatgtgtgacagaggtggcatcaagctcttacagtcccaaccctccaacggaaatgggcgaagatctcaggaatggcatcggtcacaggaaatcgatagtggctggctgctagcatggccacttggggcttaggcagaaatagagccatggtactgaccaaagggaccatagcacatggaataaaactcaaaacaggacttcatgttttatggaaattatatttaaccacttcaacattgtaaatctggataacttttaatatctaaactatataagaaagtaaaatttaacatgttaatatggawaatttttttatttttgtatcttgatgacttaaatgtaagcaacaaagtggttaaacacatacccatctaaatttttttatagccttccatgttaaactataagtaaataattagttttaaaattgttttgtattttcttattcctgttccctttaccctttgacaacttgaaatgttaccacttcgtcctcatgatgttcttctatcaaccctgcttaggatgagaacaagttgagcagtgccaacggccatgaagaacgtagcaaaaagtgagttttaagaaggggcttgggggagggtggtgagcttttttgtggttttagaccttaagttgtgttcctgtggctaaagtatacaaaattctcttctgaagcttttctttgctgcttttagaaaattggttctttgccttttgagacaaactcttggaggaactgtggatttttttgcttagatttcagaatatagtttcagataccttcccctccaagtccatcatgacaatctggtgacaagttctgtattagaggttgtcttgttttaaatttgttaactttggtttgatatttggttatcttactgataaaactgttatatatccattgatcttaaaaggtagaaagagttaaattaggtgataactaggccatggaaagtattgtttgccctaaagtgccgaaggagtcaaagctgtgaattatttctgcaacttgctgctcagaggcccttttggaagtgatggaacaggtacttaagtacttctaaaggtggctttcattatcttaggccttttaaactctagacttaacagggtggggattttggaaattatgaatatatctgtacactttatttgggtaagatgagtgactcaatagaactctgctatagactagtacagaaaacagtgtacgaaaagtcttaggtaacagatatgatgagatccactttttttttttcttttcttgtgagwcggagtcttgctctgtagcccaggctggagcgcagtggcgcagtctgggctcactgcaacctccgcctcctgggttcaagtgattctttgatttttttttttttctttgacatggagtctggcagtgtcgcccaggctggggtgcagtggttctatcacggctcactgcaaccactgcctcccagattcaagtgattcccctgcctcagcctccgattagctgggactacaggcgcgcgccatcacgcctggctaattttttttttatttttagtagagagggagtttcaccgtgttagccagaatggtctccatctcctgacctctcatgatcctcctgctgtggcctcccaaagtgttgggattacaggtgtgagccaccgcgcctggcctttttttttttttttttttttttgacacggagtcttgctctgttgcccaggctggagtgcagtggtgtgatctctgctcactgcaagctccgcctcctgggttcatgctattctcctgcctcagcctcccaggtagcagggactacaggcgcctgccaccatgcctggctaattttttgtaattttagtagagacagggtttcattgtgttagccagaattgaccttgtgatccgcctgccttggcctccaaaagtgctgggattacaggtgtgagccaccgtgcccagcctctgtctttattttttctttgagacagagtttcgtttttgtcacccaggctggagcgccatgacacgatctcagctcacagcaacctctgcctcctgggttcaggcagttctcctgcctcagcctcccgagtagctgggattacaggttcctgccaccacgcctggctaatttttttttttttttttttttgagatggagtttcagtctgttgcccaggctggagtgcagtggcgcagtcttggctcactgcaacctctgccacccgggcttaagcgattcttccgcctcagcctcccgagcagctgggattacaggtgcctgccaccgcacctggctaatttttgtacttttggtagagatggggattcaccatcctggccaggctggtcttcaactcctgacctcgtgatccacctgccttggcctcccaaagtgctgggattacaggcgtgagccatcatgcccagccaatttttgtgtttttagtagagacagggtttcacgatgttggccaggatggtctccatctcttgacctcatgatccgcccgccttggcttcccaaagtgctgggattacaggcgtgagacatggacccaactgagactccgtcttaaaaaaaaagtctgggcttggcgtggtggctcacacctgtaatcccagcactttgggaggctcaggcgggtggatcacaaggtcaggagatcgagaccatcctggccaacatggtgaaaccccgtctctactaaaaatacaaaaattagctgggcgtggtggtgcacgcctgtagtcccagctactctcgggaggctgaggcaggagaatcgcttgaacctgggaggcagaggttgtartgagctgagattatgccattgtactccagcctggagacagagcgagactccgtctcaaacaaacataaaaatctgtcatacttacgaccttatgttaatgaaaaacgagagaaaaatagccatttatttgatttctttttggctcttttcctcctaagatccctaaatgcttcatagtaagtatgtcagtcwttctcactacaactgtgttaggtaggttgataaaatttcataaaacagatgagaaaatatataatgttattcagggcttgttaagccactattttttttttttgtagttcccctaaaataatgtggtaatggattaaaaatgatataatttgtagaaaatgtgctccttttttctggtataagcttggatgggagtcatttatagttcctcaccaatcacaagaaattgtggggatcagkttgggtttagtcttgatgtgggatctgatgcaaccaaccagaggtatggtttatgtcatctggttttagactttctgccacagtaatggtttcctaatgtttttgttttgcaattctytaatcaaaagaaaacccaggaaggtgtatccatataaattgacataaattatccaattaggtgtcaggccgagtggctaaagatttcgcttcaagtgccagaaggataagaacgtacacttttgggtacagaccttcgttactgtaccattgtctcatgtcgctttttgccactaaggtcatctccggtgtctacttgtttttatcctgtgtataagctgattaaggctacaagcttttacaaggaagctgagcatcaagttctccatgtgtgatattcggtggcctttgtctaatgtrgagaaccacaggactaaatagragaatggacaattttctttaaccatgagattgtctaagggaagatcctttcaaaacactttggtaatcttaaaatactttccagtcagacttctcgtcaattataggtgataaataaatgattcccttgttcaatcaggactcttgattttctgaaggaactttatgtttcaaattaattttaaagttacctggaagaaaatttttgtatttaggaatagatrtaaaacatacagaacactctgctttaaacctttagtactaaattaaatttcttaaccaaaggaaagtgccgtgttgcatttttcattctaaaacttcattgtcttaaaagccacattgagctatagtttgttaggtagtagaaaaatggcatgttctgagaaacagttgactgagtataaatttttttaattgtataattctgattcttaacatacacttcatagtatcctagaatagtaaaaggaacaaagttattgtgacacagactggttgtcaacctattttctgaagagctgtaaacctgagtttttgcatatgtcaaggtatgcatcctaagtgcttgagcttgccctcatgggaatattatttgttaaagtaaccagttttgcaaagtctaaatcagcgtccattccgttaagctctttagagaattactcaataaaagataacattaaaatgacacagttgaaatatattggctactgtggtgtggattatctataaattttggaataaatgacttttctattttttttcttattttccagaatactttgcattaaaaatttagatcttcttacatggaagaggtcaaatccagttatagcaaaacacctttactgcagaggccatataaccaaaaagtccaaaggcccagcccagtggaccatttacttcagtgatgttcagtacaaaatttcactgccattaaagactttggaaagtcccttttaagttgtaacaggatttgactattagtgtggatttcgataacccttctttagttaatgtaataaatgctctttgaagctggaaatatactggtttcttgcacccttgtagttttctctgggcttttatgcaaaagattgtattttctgaatgtcttagtatgttgctgtctttttacctgcctggggttgccttcagatgtgggtgaggacttgtttacaaaaagtcctagaagaccttaagttaaaattagctctccaattttcaagtgttttcttttggcagaataagttttgggtcctatgagaggtaaataggttggttgcctctcttgctatagcccatctagagcagaacaaaaactttgtttttgagggggatggagttactttttaccttgtyccctaattgaatatatttaggacttttggttttagaaatctcagagttctatagttggaatagtgtcacagrgatagtgttaggtttcttaggcaacaaaattggagtgttacctattgcccatctgggcatggctttgatgagttctatataaataatgagtgtagcctaattttctgtcatgtgctacctagcatatacatttctgacagtcaggtggattatcttgaaattttagacaaactttctgcctccttggaaagctctacatctccttgtgattggagtgtgggtttcaagattccagaaggtgggtgtcttcattttctattttcaatgcactctaaagatgacctgcttacaggttctctgaggcagacctcagttgctcttgtgatatgtaactttgctttgataaggaataaacaattacatatccagataatgatacagaattgtcaaaatgtttaatcattaagccactacaaatagacattttcgtggaataaactgattttgaaaygtctttcaatttatattgaaatatctgaaggcacctctaaaatttgggtgatgacacagaggtatagattataagatttaattatgaatgggtggtatacygtgaagactacggaagtgagcagaaagatatgtttggcttttttggtttttagttagagattttaaaaaggtctgtgaaggtcaagttgatcattggttttgattgcatcccacaggtttctataaactggcttaaaaatggcatactccattttctggtgtattcattgtaactttaggaagtatttgaaatggtcacattaaagtctaggaatgtcaaattgtattttaatgcgttagttctttttctttttctttttttttggagacagtcttgctctgttgctcaggctggagtacagtggcatgatttcggctcactccaacctctgcctcccaggttcaagcgattctcctgcctcagcctccacagtagctggaactacaggcctgtgccaccacgacccactacttcttgcattttttagtagagatgggttttcaccgtgtcgactaggctggtcttgaactcctgacctcaggtgacctgccttcctcagcctcccaaagtgctgagattacaggtgtgagccaccgcacttggagttgggtttttttttttttttgagatggagttttgctctttttgcccaggctggagtgcaatggcatggtctcagcttgctgcaacctccacctcccgggttcaagcagttctcttgcttcagcctcccaagtagctgtgattaccggcatgcaccatcaggcctggctaatttttgtatttttggtagagaggggatttcaccgtgttggccgggctggtctcaaactcctgacctcaagtgatctgcctgcctcggcctcccaaagggttgggattacaggcgtgagccactgcactggcctgcattagttcttattgtcctttgtcattacggttttgcccatgaaaaccaaaatgttgatgtctatgtgaccctttgaacgtgttaaatatttccatatgtaaatgggggcaaaattgacttaatggtaaattactatatttgatgaaaatttttataaatgaaccagtactagtacttgaatgtgaaaatattctattgtaagtttgttttattaatttattttgtggattacagtaatgcttttgttggcctgttgtatgacaaactatttaaaggttcacattttgatttgtatttgccaacaagcccttttgcttgttaaagctatagctaactctcaggagataattgcagttctactcttagaggatggtgtctttcaaataatgtcttgtctgctgattttcagtaatgttaatataaggcaaaagggatattgtttactatacgtagcaatttttttagacagagtcttactctgtcgcccaggctggagtaccagtggcgggatcttggctcactgcaacctccgcttcccgggtttgagcaattctcctgccttagcctcccgagtagctgggactacaggcgcacggtactatgcccggctaatttttgtatttttattagggacggggtttcactacattggccagactggtcttgaactcctgaccttgtgatctgcctgcctcggcctaccaaagtgctgagattacaggattttttttttttttaagtatgattatgtaccattgtatcatagtaaaactagccaaagaaatttatgaaaggatgaaaaaatgattctggccataaaaggtagtatattttggtgggttcttaagccagcatgataatggcgagtttttttcttctcaggaggaaaaaaagcaagagcagaagtcgtagtcatgaacgaaagagaagcaaaagtaaggaacggaagcgaagtagagacagagaaaggaaaaagagcaaaagccgtgaaagaaagcgaagtagaagcaaagagaggcgacggagccgctcaagaagtcgagatcgaagatttagaggccgctacagaagtccttagtatgtaactatagttatgattttggtttgagggttattctctgggtattcagatggcagtttaacttgagtgatttgaattgtgaawttttattttkttaatgattggttaaaaagtattgaattaaggatattggcattgaatactagtaaagtgaaaatacagtgcatagacaaataagtaaaaatttgcttttactaggcatactgactattttctgttaaactatcagagtttctaaattgtatgccagtcaacgcaaactggatgaaagcactagagtgcttgaaaaagatgacattgtagtgcccaaatacctaagaaagcttaacaagtgtctgggctgttacagtatttgctaaatacatatttacttaaaattgtaaagttctgatgaatactaagttacacatgtataattagttaacagtaaataaaaagtctttgtcmccgtggctgttttcagctgaaatgtcaggccagttgtgaatttgttgtgtatgctcattgataaagatccytttttgggctcatctgtatttaaggtttgttaataataataaaaggtattccaaactaaaagtgttttgaagattagatcactagaaatttggatgtggatatttaaagttggaaacaaatatattatggttattaaataactatattaaccacctacaattctaaggattgcatctagcaatctttaatgctttatgaggttaattcctcttaataaacacagwgctgtaaactctgggatatattaaaaataacccttctaacttctaagatttgaatggttaaggatggaattcaaagacaaacagacccgaatcacttgggcaagatacttaatcccctaagctaagcatttgttttctaaccttttaaggagataataagtttcagataagctattaatgagtaatgaatgagaagaaaatgtaaagtgctcagaggacttaatggattcatgaaatgttttggcattacatgaattccgattctggctcttttatctttaaaataaaaagaattaaactccktgatgctggtttcctccaagctgcttatttcattaactttttaatagctgaaaatgggaccacaatgctattttaatttcgaatgctgtacaacattaggaacttctctgcttttgtcccatttatcaagattctgagcatttttaaaatgggattatgttaaatctttttaccaggatgaactaaataaggggaaaggaattagcttaattcctttgagtgatggatactttgtttgctgggatcatggcttaactttaataaaaaattacttagttcttaatgttgggtttgaggctgtaactcagaatattttataattaaaggggaaagaaaatagcttataactaattacttgagaactgtaatacatccagtaaatgattctcagtcatcagcattagtctgaattgcaaagggtcaagttaatataaagtgttttatttggaaatacttgcatgttgtaggtaggcatggtgttcatgaaaactaattcaaatgtgtggatcacaggccactatgtatttatttatttcgctgttcttctggaataagttagcaggatgagcactaatggacaactggctagtccctttaagttagcctggtctttaaaaagtcacaaaaactgttactacagaataattacctttatgatctttgtgaaaacactctgttagtcctgacaagtcctcacaaaatttttctagagaattggtaaattaccttcacatgttcacgatggaatatttttgcaacaaacaactgaagtatgtagtgtgttaagtggtgtcatgctgtcttaagagttactggtgaatggggaaatacctaagttgcatgactaaagaattcactttagtttttaaaagaagtctttcaaaaagaagatgtatatgaaaattgtatatgtacatgtacacacatagattcccaagagaggatctgcaaagatacacaccaaattgttaaccatagttactgctggtgtgagggaagttcagagggatttattttttatatatgtgtgtgtgtgtgtttttttttttaattctcaagactgtatatatatatgtagcttacaaagatatctaaagtctgaaaatgggtgtgtgcattttcagaatctaaaaattttgaggctgtaacctttggtcttggcacctctcagtggtccaggatggataaatacaagggcagcttgcctgggaataaagttaagagacaagtatttttgtttcctcttcataactgaggtggaaaagcagtagcctaaacaatgttagtcttgctggagagcgcatgaatgcgatcttagcaagaccctaaacctrtaactagtgtaattttgtgtttcctttttagctccggaccaaaatttaacagtgccatccgaggaaagattgggttgcctcatagcatcaaattaaggtttttaaacatacttctgaattgtttaarttgtttttcaaggaactaacatgctgtacttgtttggataacttctgaaactttttaactttgcagcagacgacgttcccgaagcaaaagtccattcagaaaagacaagagccctgtgaggtagtttacttctttaaagcctttagctcttaaaaagcttttgcagcttatggtactgttaaatttgatgatatttagtaatttggaccatattaaatcttgcttttgctttcttttgcacttccagtactttaaggtcaagtgaatttctactgagttttcagtagttttcactttaatttcatataattaaagcaacagttatawatttatttatttatttatttattttgagacggagtctcactcagtcacccaggatggagtgcagtagtgcagtcttggcttactgcaacctccgcctcctgggttcaagcagttcttctacctcagccctccaagtagctgggattacaggcatgcaccaccatgcctcgctatttttttattttagtagcgatgggatttcaccatgttggctagcctagtgttgagctccggacctcagatggtccacccaccttggcctctcaaagtggtaggattgcaggtgtgagccaacacacccggccacaaaagttatttatttatgagatggagtctcgctctgtcacccaggctggagtgcagtggtgggatctcggctcactgcaacctctgcctcctgggttcaagtgattctcctgcctcagcctcccgagtagctgggagtacaggcatgtgccacaatgcccggcaaatttttgtattttaagtagagacggggtttcaccatgttggtcaggctggtcttgaactcctgagctcatgatctgccctcctcagcctcccaaagtgctgggattacaggcaggagccaccactcccagtctaaagttattttaatgtaatcttattttcctattttaattaaaataaactttttgcatttattatttttaatggacatgtaatgattatgtatatgggtaatacagttacgttttgatacatgtatacagtgtaatgatcaaatcgggtaattagcttattcgtgttaaatgtttctttgtgttggcaacgtagcagttayatcaaactttacacttaactttggaattaataaataatgagttatttgaaatagcctcgtggagaagtagttgtaacagtaagttttactatttggctgtcctgaggaaaactatttcatctcagaagtcttagtgatttgaattgttactcctaggttcttcaatgaagtttccatggattattttactcttaaaaataagaattgtaggccaggcccggtggctcacgcgggtaatcccagcactttgggagactgaggtgggtggatccacraggtcaagagatcgagaccagcctggctaacatggtgaaaccctgcctctactaaaactacaaaaattaggccaggcgtggtggtggctcacgcctgtaatcccagcactctggaaggccgaggcaggcggatcacctgaggtcagaagttmaagaccagcctggccatggtgaaaccctgtctgtactaaaaaatacaaaaaattagctgggcgtggtggtgtgcacctgtcatcccagctactcgggaggctgaggcaggagaatcgcttgaacccaagaggcggaggttgcagtgagccgagatcgcgccattgcactccagcctgggcaacaagagcgaaactctgtctcaaaaaaaaaaaaaaaatacaaaaattagctgggcatggtggtgtgcacctgtagtcccagctacttgggatgctgaggcaagagaatcacttgaacccaggaggcaagggttgcagtaagctgagattgcgccactgctctccagcctggtgacagagcaagactgtctacaaaaaaaaagggaactgtatttgttcagtctacgatttcggttcaaggaatattttgtcaggtggtagcattgtgggtgtttttttttttttttgagacccccggctagaaagcatttgcttttttatttttattttttattttttgaggtagggtttctctttgtcacccaggctatagtgcagtgacgcaatcatgtctcactgcagtttctaatggccggtcataagcaatcccacccaggttagcctcccgagtagctgggactataggtgcagccaccatgccctgctaatttttctattttttttttgtagagacaaggttttgccatgttgctcagttggtctgaaaatccagggccaagcaatctgcacgctactcccggccttaaaagcttttgtgcctggcgtggtggctcatgcctgtaacaataaggtcaggatatcgagaccagcctgaccaacatggtgaaaccccatctctactaataaagtacaaaaattagccggatgtagtggcgcgtgcgtgtaatcccagttactcgggaagagaggcaggagaattgcttgaacccgtgagatggaggttgtgatgagccaagatcacaccactgcactccagcctgggtgacagctagactgcgtttccaaaaagaaaaaaaagcttttgtgacaaatcttacaggtggagcgaccaccccaacccccgtacatcctgagagtgtccaaaaaatggraaagatcgtgtttaggcttacatcttaaaggatgacttacaaccttaattgatattttgtaacagagatgatgttaatagacactgtatctaaatttgtaaagtagaatttgtagaatcatttggggtttcacttcaagtttgccatttgtgattgtcaaacttaatttgactttacaattacatggttttgttgtaaagaatcatccattacactgattttggatcagtctggcatttgtgattggtctggtgatatgttttatgactatgattaaactgtcaggcttctggttgacccttgttttagaaaaattaccctttttgggccaggcgtggtggctgacgcctacaatccgagtacttttggaggccgaggcgggtggatcacgagatcaggagatcaagaccatcctggctaacacagtggaatcccatgtctactaaaaatacagaaaattagccaggcatggtggcacacacctgtagtcccagctactcgggaggctgaggcagaagaattgcttgaaccctggaggyggaggttgcagtgagccgagattgcgccactgcactccagcctgagtgacagtgagactccatctcaaaaacaaaaaaagaaaagaaaaattactttttttgagatggtaaggccagtagacttctgtgctaatgccatgtaagatgtgattacaagaaacagtaaaccttagtttttagaaggaattgagttacattgaatagttttatgcgcattttttgtcaatagatcttactgaaaatgggcttgggttggccgggtgcggtgcctcatgcctgtaatcccagcactttgggaggccgaggcgggcacatcacctgagatcaaaagttggagaccagcctggccaacatggtgaaaccacatctctacttaaaatacaaaaattagctgggtgtggtggcaggcgcctgtagtcccagctactcaggaggctgaggcagcagaattgcttgaactcagggaggcggaggttgtggtgagccaagatggcgccgttgcactccaagcctgggggacaagaacaagacttcctctggaaaaaaaaaaaaaaaaaaaagaaaatgggtttgggaattatgacaaaccagtttcacagcttactctgtttactgaacatgtttgagaattattttaggccaggcgtagtggctcacacctgttatcccaccactttgggaggccaaggcaggcggatcatctgaggtcaggagttcgagaccagcctagttaacatggtgaaatgccgtagctatgggggagtttagggcaaaaggattgcttgagatcagtagttcaagaccaacttgtgcagcatagcaagacctggtttctaaagatgraaatattgttgtggagttgggaaaggagtgagggtacagtatataytgctcaggtgacaggtacactaaaatctcagaattcaccattaaagaactcatctatgtaaccaaaacccacctgtacctgaaaacctgttgaactatatgaagaaataaaaaagataaaaattattttaaaatctgttatgaaattaattttatatgttttactcctattagagaacctattgataatttaactcctgaggaaagagatgcaaggacagtcttctgtatgcagctggcggcaagaattcgaccaagggatttggaagagtttttctctacagtaggaaaggtaatcttaacctgtttagggaggtcaagtaggtagaaattgcaaragaaaacatgtaaacatcaaatacttcatttgatttagtagcagtatttgtttgtggtaatgtttccattttgcctcttrtagtattggagttgataaatgttactacaaatttgttcaaagataaagataggatataggaattgtcctacagatttacttttttaattaaatttttaaaaataccttcatccttcaacartgtctcttgaaataattctacatgtgttacaatggatgtttgcacaaacaactgygttttctttctaggttcgagatgtgaggatgatttctgacagaaattcaagacgttccaaaggaattgcttatgtggagttcgtcgatgttagctcagtgcctctagcaataggattaactggccaacgagttttaggcgtgccaatcatagtacaggcatcacaggtaatttttttgttggttaagagtttgattattggtggtgttgaaagcctcctgttgcatggtatagtgctgttgtgttctgtgactgctgctcattacgttgagtcggatgttttcaggactttttttttttttttaactttgcrtttattaacattgatayagttttctcaagactgtcgtcctgtygtttctccttgtgtttgaaatgtaatgattttgccttttttttgttttgtttttgagatggagtctctctcaccaggctggagtgcaatggcatgatcgctgctcactgcaacctccacctcctgggttcaagcgattctcctgcctcagcctcctgagtagctgggattacaggagcctgccaccacgttcggctactttttgtgtttttagtagagatggggtttcatcatgttggccaggctagtattgaactcctgacctcaggtgatccacctgccccagccttccaaagtgctgagattacagttgtgagccaccacacctggccttgtttttgagatagggtctcacttctgttgccagggctggagtgcagtgagataatcacagctcactgtagccttgacctgctgggctcaagcagtcttttctccccagtctcctgagtagctaggtctacaggtgcgtgccaccactcccagctaatttttaaatttttttaagaaacagggtcttgccatgttgctcaggctggtttcaaactgtcatgctcaagtgatcctctggcctgggcctcctgaagtgttaggatcacttgagccgcacagcgctttgacagcatttaatattttagtattttggctgggcgcgatggctcatgcctgtaatcccagcactttgggaggttgaggcgggcggatcacctgaggtcaggagttcgagaccagcctggccaacatggtgaaaccttgtctctactaaaatgcaaaaattagctgggcatggtgtcaggcacttgtaatcccagctactcaggaggccgaggcaggagaattgcttaaacccaggaggcagaggttgcagtgaggcaagatcacgccattgcactgcagcctgggcgacaagaaccaagactgtgtctcaaaaagaaaaaagagttactcaaattatttcctatgttggaagacaaacttagtggctgggtgtgcattggcgggacccagggctgagaagtagcatattaagtgaggttttaaattcatgcagcaacctgttgtagagcagtactatccaatgtactctagtttgttacaagagaagcctgtgttagaatgcaaatggacaacttttctttttttttttttttgaggcgatcttggttatggagggatgacagctgactcaaaatgtttgcttggtgatacagttttatgttatggcatatacaccttattttatcacaaacaactacgttcggttataccaatctcaagagtattttagtgaatgttggttgtgtctaacaattccaggaagcatttttctctgtatttagtatttgtggtatcagaatgcatcttaagattgttgtcaagaatgtaggttcatgattcattttaggtgtgaaatgtagcctgcttactttttttttttttyttctcttgagacggagtctcgctctgtcgcccaggctgtagtgcagtggggcgatcttggctcactgcaagctccgtctcctgggttcacgccattctcctgcctgagtctctcaagtagctgagactacaggtgcctgccaccacgcccggctaatttttttgtatttttagtagagacggggtttcactgtgttaaccaggatggtcttgatctcctgacctcgtgatccgtccgcctcggcctcccaaagtgctaggattacaggcgtgagacactgcacccggccagcctgcttactttatatgtgactggcatgtgctctgaaaacattctaaaataagcagggtatgatgtggggtgtgctgtagtccctggcagtctctagtggatgagaaggaaggatgatcacttaagtttaggagttcaagaccagcttgggcaacatagtgtgagactgtctcaaaaaaaaaaaaaaaaaagcctctaaataaactttttatttttatttttttttttatttttattttttttgagactgagtctcactctgtcacccaggctggagtgcagtggtgtgatctcgtctcactgcaagctctgcctcctgggttcatgccattctcctgcctcagcctcctgagtagctgggactacaggtgcccaccaccgcacccggctaattttttctatatttggtagagatggtgtttcactgtgttagccagtatggtcttgatctcttgaygtcgtgatctggctgctttagcctactaaagtgctgggattacaggtgtgagccatcgtgcccagccaaaaactgtactcttgaagctgtaactccctaatttcctgcaggcccttggtaaaatgttatctacctcctctttctgaattttgcatattctagatgcctcctattaagttgatatgtagtatctgacttacgtagggtagtatttttatcactctaaactttaacattagttgttatgcaaatggaaggtgtatgtctttaaactgctgtgtgttatctctgtgtgacgtgtattttgtcttctaggcagaaaaaaacagagctgcagcaatggcaaacaatttacaaaagggaagtgctggacctatgaggctttatgtgggctcattacacttcaacataactgaagatatgcttcgtgggatctttgagccttttggaagagtaagtccaggttcttcartgaatcttcagtaggttgttgatctgagtataactacataatttctgtatgtcttgctttgttatctttctgtgagttaatattaagaggataagggctggttttataaaaatttctgtgacaacatagattaaaataggtcacttgatagattcttaaaagaatgttactgttattcataatgccatgtgaaatgcataatgggtattagagttaataaaaagtccacattggctgggcatggtggctcatgcctgtaatcccagctacttggggtgctgaggcaggaggatgacattagcccaggatttcaaggttgcagtgagccatgattatgccacttcactccaccttgggtaacagtgtgatcctgtgtcaaaagaaggaaaattgttaaatcatacgaagactattattttttagtaggattttttttaaaagattgtttttaaaagaaagttgaatatcttaagattcttttctgttggccgggtgcggtggctcacacctgtaaccccagcattttgggagggaggccgaggtgggcagattatgagatcaagaccatcctggccaacatggtaaaaccacgtctctgttaaaaatacaaaaattagctgggcgtgwtggtgcgtctctgtgttcccagctactcgggaggccgaggcagcagaatttctcccttgaatataggaggcagaggttgcagtgagctgrgatggcaccactgcactccagcctggcctggcgagacccttacctttaaaaagacattactctgtctccctggttatgtgctcagttccaggccttggtagcctgattagatttgccctttttctgtctgttgaaatcttcagtgggtgaatgcccctctggcaaggctgttctgcctaacagtatgtgacccacttctgatccactctggtactttctccattgactttttgagacagagtcttattctgctgcccaggctggagtgcagtggcacaatctcgcctcgctgcaaactcctcctctctgtgttcaagcgattctcttgctttagcctyccgagtagttgggtttacaggtgcctgccatcatgctcgactaatttttttttttttttttagagacagggctttaccatgttggccaagttggtctcatactcctgacctcaggtgatctgcttcggcctcctaaagtgctgggattacaggtgtgagccactggacctggcctccattgacttttctatcagtaacatggatcttaggtggaggttgacatgccattatgtgctatatggagaaatgaagttcagagcagttggggccacatgagctgttacatggcaaagtgaggaaccaacttgatctgcttcacaggcgccacgaggccttgtgtctggcattgtggtcttgagctcaattcagagcagcttggcttttgttctagaggactttgtgctatctacctaaaccaagagtgtccaactagttctgtgttgaggagagaaagttgccaagactgtcctgtcactgtgaggaatgaaccttttccactcaataattttagcaaaaggcataaatttaaaaggagctagatagaacaaataaaatttaacttttaaaaatatattcactggccaggtgcagtggctcacacctgtaatcccatctctttgtttgggaggccgaggcaagtggatcgcttgaggtcaggagtttgagaccagcttggccaacgtggtaaaaccttgtctctactaaaaatagaaaaattaggtgggtgtggtggcgcatccctctaatcccagctacttaagaggctgaggcaggagagtcacttgaacccgggtggcagagattgcagtgagccgagatcacscctggataacagagccagagtgtctccgaaagaaaagaaaaagaataatcatggatatttgagaaatctgtgtaccatataaaaattaacatcaggaaacagttgatatttaaattatttttattactctagagtctgatttgtcaaactatttcttaaattttgagatgggagtttcactccttgcgcctaggctggagtgcagtggtgcagtctcggctcactgcaacctccgcctcccaggttcaattgattctcctgcctcagcctcctgagtagctgggattacaggctctgaccacaacgcccagctaatttttggtgtgttggtcaggttggtctcgaactcttgacctcaggtgatctacccrcctcggtgtcccaaagtgttgtcattacaggcgtgagccactgcgcccagacccattttaggttttcagtgccatatggtcttgttgcaagtactcaactctcttccaaacagctgtaagctattaagaaattgagtatgggccaggcacagtggctcatgcctgtgatccctgcacttttgggggccgagtcgggtggatcacttgaggtgaggagttcgagaccagtctggccagcatggtgaaacctcttctctactaaaaatataaaaattagccggtcttgggtggcatatgcctgtagttccagcttactctggaggctcagacaggagaaagatttataaaacaagtcaagctggagttggttcatggggtatatgtagtttgcttacctttgccccagaacaattagtatgyattaagtgcccaactccagtaaacataatgtagcagctttaataagaagccctttttaaaggtttattttattattttttttggagtctgagtcctgcrctgtcacccaggctggagtgcgatagctcactgcaacctctgcctcccaggttcaagcarttcttctacagcttccctagcagctgggattataggtgcatgccgccatgcctggctttttttttttttttttttttttgagatggagtatygctcttgttgcccaggctggagtgcaatggcatgatctcagctcaccataacccccatctcccaggttcaagcgattctcctgcctcagcctcccaagtagctgggattacaggcatgcggcaccacaccctgctaattttgtatttttagtagagacagggtttttctccatgttggtcaggctggtctcaaactccygacctctggtgattcsccctcctcggcctcccaaagtggtgggattacaggcatgagtcacggagcccaacctacttttttgtgttttagtagagacagggtttcaccgtggtgcccaggctggtctcgaactcctgagctcagatagtctgcccatgtcagctcacacctacaggtgggagccaccgagcccagcctaaatgtttatattgtttactttttgctagctaatgctcctagaatatcttatccctatcatagtcccacttcatccacgactactccttttctagaggcagcccttacccgttttttttttgttttgttttgttttttatatccttccatagactttctgtggcttagcaaatactagcaaataaactttgtttcttttttaaaattttggtaaaatatacttaacattaaaagttcgttccttgggctgggcgcagtggctcatgcctgtaatcccagcactttgggaggccgaggcgggtggatcacgaggtcaggagatcaagaccatcctggcaaactcggtgaaaccccgtctatactaaaaatacaaaaaatttagctgggcgtggtggtgggtgcctgtagtcccagctacttgggaggctgaggcaggagaatggtgtgaacccgggaggcagagctcgcagtgagccaagatcacaccactgcactccagcctgcgccacagagcgagactccgtctcaaaaaaaaaaaaagttcctttcttgtttgagacagagtctccctctgtgactgaggctggagtgcaacagcatgatgcaagctcactgtgtagcgtccacctccttaacatgcgatcctcctgcctcccaaagtgctcggattacagacctgagccaacccacctggctggatgctctgttttaatttttcatacctttttttaaatggacagctaaatcaggagattgtgttacagttcactgattgaacgtaaactcaatggtttttagttagtacaattcacagaattgtgcagttattgccaaattcattgtatattgccaaattcattccatttttacgattctgtctggtataattggaaattactgcttggtgtttttagcacaatgggaaggaaacgttgattttgtttctaccttctattggtaatttacgaaggatttctggttttcagtggtttagtattgatataaaaattaatcttaggttacaatcatagtttttttttctcccctctgctccccagtgcataatttctcgcttgggaagtttctagagtttgttttttttttttgtttttgttttgttttttgagaccaagtctcgctctgttgtccaggctggagtacagtggcgtgctctggggtcattgcaacctctgcctcccgggttcaagcaattcttctgcttcagcattccaagtagctgggcgtacaggcatgcgccaccaagcccagacaatttttgtatttttggtggagacctgatttcgtcatgttggccaggctggtcccaaactcctgacctcaggtgatccgcctccctcaacctcccaaaatgctgggattacaggcgccgaccaccacgcccagcctaatttttttcattttacatataaaattatagtttctagacttaaaaaagacttcttggtgatgaggttttgtgataagtcttctattttggaggatgaggagactggtagatttttaaaaccatgtctcagggaakaaagtagttttgtactctgcttttaagttatagtaattatgcttttcaattatagattgaaagtatccagctgatgatggacagtgaaactggtcgatccaagggatatggatttattacagtaagtaattaccataattatattacttagggtttttttttttttaaactacatttgctgtgttgctcagattagtctctagctcctggccttaaatgatgtcccaccttagccttccaaactgctgggattacaggactgagcctctgtgtccgatcaaaaaagtttttttcacaacaaagggtaatatgcccttgtaacaaaaggcaggcacagctcacacatgaatgtgaaaaccaaatcatcacacttaggtactcctaaaattttttgatccaagttgcatagtagaagtacaataatagttaataatggtggggaaggtggcatgtttaatattttcaagtgctttaaattagtttttgtggccgggcgcggtggcttatgcctgtaatcccagcactttgggaggccgaggcgggtggatcacctgagattaggagtttgagaccagcctggccaacatggcgaaaccccgtctctagtaaaaatacaaaaattagccaagcatggtggtgctcaactgtaatcccacctacttgtgaggctgaggcaggagaattgcttgaacccaggatatggagattgcagtgagccaagattgtgctattgcgctgcagtgctcyagcctgggcaacagagtaagactctgccttgaaaaaaaataaaactataaataaataaatataaaataatttaagaaaataggtttattaggttctgcaggccatgcaaacatgacactaacagctgctcagaktctgtggtggcctcaggaagctgttacttgtgcttcgcaaagcctttacttgttattgcttggaggagcaggtgtgtcacttggagagagggagaggaagagagaggaagacatcctgtgaagtaacagagcaaggaccctcgcctattagcagggggagtgcaccaagccattcatgagggatctgccttgtcatacctcttgccaagtcacactttccacagtggggatcacatttcaacctgaggtttagaggggacaaggatccaaattatattactgtgttcctattttcctttactatgtgctatatatacatataggggtcagccagctattcatataattgaatgttttatacgttcatctctgataaccttttgacacattcttaacagttaaataaatgaaggtctgttaacgattcttttttactaaagatcctttttttaatgtacatacctcacaaccaagaccagaattgtcttgtcaaaagtgtttttgggctgtgtgtggtggctcacgcctgtgatgccagcactttgggaggctgagagcggtagatcacctgaggtcaggagatcaagaccatcctggccaacatggtgcaaccttgtctctactaaaaatataaaaaattaaccgggcgtggtggcgggcgcctataatcctagcatctagggaggatgaggaagaattgcctaaacctaggaggcagaggttgcaatgagccgrgatggtgccactcatgtatatgaaactcatccatggtggaacttttttcagatgtgtgagctctgtaaccttttaaggtcctggaaacatagtatttttaaaagtacactgtatatctctatcaggaaattaaaattgttagcttatatctacatttcaataaaatgtaagcctgttgctatgttgatagcaaatctgtttaacttactggtcattaggctgttacgtacgtcaatgaactggtgaaaggagaaaatttatgaaacatagctcaccaattttatttttttattytagtaactttagtgtggatattttccaccttttctttttctccagataagccattgtgggtatatgtgtaaaccaaaattttatatatatgtaatttatatcaagttatgtatttatttgcttgtgtatgaagtatttatgttttatatatgaggattatattgactattttgtccctgggcacatttttgttagaaaagtactaaattctacctcaggtggtctgcctgcctcggcctctccaagtgttgagattacaggtgtgagccactgcacccagccagttttcacattttytaaccacaatccccatgttctcaaatataaagctgtcattacttgtaatatcttttatttaaactaccacatcaacaagcctaatttgcgttagctagcgtcgtcatcatgtatgttgtgtttgctacttacagcttgcagtttctaccttagtattcagaagtaattattgartatgctaaaaatataaatatatttttaagtatagtttgtattttaaaaattaaagcactgtctcctgtccttgcctcccctatcatgtagttttctgactcagaatgtgccaaaaaggctttggaacaacttaatggatttgaactagcaggaagaccaatgaaagttggtcatgttactgaacgtactgatgcttcgagtgctagttcatttttggacagtgatgaactggaaaggactggaattgatttgggaacaactggtcgtcttcagttaatggcaagacttgcagagggtaagtgtttcttgctattacgaatgatttactgtgggtattgtagtggaaaagaaaggtagccatgtaaactaagaaagggaaaaagattttatcttattttgtagttggcgttatccttggtcacactgcatattattttatagatgatgtgccttgtattaatgtatggaaatctatattatgtgttttgaatgccacagtataagttgcaagatttcttttcctttatgtartgtttatatgtcatacttaggaataaatttagttgcagctattataatgttacaagtttttctttttgtaatttcttattttttgatgcagggtctggctctgttgcccaatttggagtgcagttgtgcgatcctggctcaccgcaacctctgcctctttggctgaagccatcctcccaccctaatctctaaatagctgggactaacagttgcaaacaaccaccaccacgcctggctaatttctgtggtggtttttttttttttttttttttttttttttttgtgttggttggttggttggttgtttttaagagatggggtttctgccgggtgcggtagcttacaactgtaatcccagcagtttgggaggctgtggcgggtggatcacctaagttcaggagttcgagaccagcctgaccagcacggagaaaccctatctctgctaaaaataaaaaattagccggtcatggtggcgcatacctgtaatcccagctactcaggaggctgaggcaggagaatcacttgaacttgggagggggaggttgcagtgagccgagattgcgccattgcactccagcctgtgcaacaagagcctgtgcaacaagagcgatactccatctcaaaaaaaaaagagagtttcacaattgttgcccaggttggtctcgatctctgggatttaagtgaaccacctcccttggcctcccagagtgctagctaagttacaggcgtcaaccaccacactcggccctccttgcaatttattttagtgaagtgatcatgatattaatgacccaggaaacttcgtttctctgctctcaacatagtaggaactttaagactattcttttacaggtacaggtttgcagattccgccagcagcacagcaagctctacagatgagtggctctttggcatttggtgctgtggcaggtaggaattgaatcttttctaattttaaatcgttttttcatctaattcgaaaattttccaaatttttacatttaaaaggacttactgagaattcaattcatcaagtacttatagcctgttagtttgtagtcttctatttaaggaagtggagacatagggtagaattaaccatgcatcaaaatgagttgtcaggacagttttaaaccctgcaccccagtttttagtcgaaattcattgacataagtttattttcaaatatatcagttttattgaatactacaaggtgtatattgtttgatcgaaaaaatatttataatattagaatttagaaaatatcagaggcacttaaaaaagctttacttaaaactattgtagtagtaagagtgttgagacagttatttttctttatagtacataaaaatttaagatcatgaattgggaggtggagcttttggaggcaacaggaaaagaagggtgaattgacrtttttacaattatgtataaagggatttagttcataaaacactcattcccctgtgccccccaaccccccgcccccttttttttttttttttttttttttggataacagtagacttgctctgttgcccaggctggagtgcagtggtgcagtctcggctcactgcaacctgtgcctcctgggttcaagcagttctcgtgcctcagcctcccaagtagcagggatatttttagtagagatggggtttcaccatgttggccaggctagtcttaaacaccttacctcaagtgatctgcccaccttggcctctcaaagtgctgggcttacagatgtgagccactgcgttcggccctcatttcttaattacctgtaacttttacattgacccaaatctgggagataggataggatctaattttgaaatgtcaaagacgtgcttttagaacatcataagaagaaccttttgttattttgttggtgggggatggagtctcactctgtggctcaacctcttcctcctgggttcaaggaattctggtgcctcagcctcccacatagctgggatcacagacatttcccaccacacccagctaatttttgtatttttagtagagacctgcctgccttgacctcccaaaatcctgggttacaggcatgagccccctcacctggctggtccttygaccttatatatatatacgaagtgagactgtaactgagaagatakattttagaccctggtagtaccacatctgaaagtacgaagaggtcctgtggttgcttcatgattttcttctaaattgaaagctcaatattcaattaaagtagaagacgacttttgtttttacatttattttttcactgttttgccttcttagtggttgttcttaagtgtgtgagtacctttagaaaacctgcatttggtttcatttcctttctataaattgtatgacttattttgaaatttgacaagcagttactccctagaatttctgacagcgaagccagtttatacttacaagaatcagaaccagtaaggcatttgtgtatttaacagtcatttgatccctcctcaagttatctttattccattggattaacacataatttattttgagcttatagtgttagctattcgatcctttacagtgagtaattgtcgattgctacttgctctaattgatagtaaactcattacctagagtttattattacagtttgaaaggtttttttttaaccagaaaactgtttacctgtattgcttctcattgttcataatgttctttgacaactaagaaaatttttagttcatgttctaggtattccactaaagggtggtgaaagatttcttcctgccttcagggaattgatacagtgacaaaggggtcatttatagacaattttcttacaccctggatgctgtatcagatacgttgatttgctcttaatgtcttcagttaactgaagattatccactgttaaatatcakttctaccgttagcctttatttcttttattatggatgaatgtacctcttgggttctttctcatcgtgtagtatrtattaagattgtttgaatgtagccagctaaaatcctaaagctccatatggattcctgacaatagtgtccctaccctttatctatgtatctagttacattcccttttttagtgctggtggtggtagagatgattttaaagatcattctgttttattagccttgctataaatttcttctgcattaataacactcatgttttaggtgaatatctgtgtaactggatatttttctccagatggtggtcattaaaatattacatataacttgctgaaataaaattgttgagtgtttactgtgtttgaggtgcttgtcccctaagtcttttaaagctattgggtgaaactagggatgggtcatcactatatccacattattttattctgccagtttgataggccctttctaaaataggttagagtccttatctttatgaaaaccatgctttatttttcactttgtcacaaatgatatgacaaatcatttttgaaattatgattgggttggtagacaaaatagcatggatttctgatatctatacattttttcccattttaggaaaaaaaagacaaattctgttattatttaaagtttattgacactgttcacatggtcctatcttcaagttccttcagtatacaccagttacatttcttcagctccctgagatgccaattttgagcacctaggacccaggtattttatcccartataacttgggctgcagatccctgtacrtttttgcccatgttgcaagaaacccatatatgtggtaataaagtgttgcagttgaatcaaattttaatgaaaatcaggttactgaatcaaaattttgatgtcatatatttctataaaaagaacttcaagagagcattatagcactgtggcagacttactgttcagacttgctactgtttcactctgtagcagctttcagatggcgtccactgtagaaatctaacgattatatgagaaaatatattggtcacatccctcttatttttaatactgattagatgttttcattttcctaaacttcatagcttttaagaaaactccagagatttttatttctgccttgctaaatttttacactaggccaggaaatcaataatcaagttgccccattatgggctagatttgacaagttaaatctttgaaaagtccttaaaaaaataatatatgcatactgttggaatggtgtatttcccaatggtgatgttcttcctaaattgggaaatcatggaaactgttacagctttttgatgtgcagtatttacaattttataatatccttttaaagtgttaagtactatggccactaaaaatataaatacttgcatttcccaagtacttggaattgaattctcaagatcagggtttttcactcattttctgaccggtgtgcttccctttccccatttcccattattcccagctgtatagtagtgtagtgaaaatcacttgagatgtggaagagtagtctrgtctaggaagagagagggaaaagtaagtttcccaggataagagggggaaaaaaggccccaaagccttctcaatgaggaatggggaaggaggttttgctgccaggttttactaagtgcatttgaatgaaccctgctattgtagtcctcttttattaatgctttcctgacatttaccctgttagttgaggctcttcattgttcctgcactgagctgtagaattctcttttgttatagatttgcaaacaagactttcccagcagactgaaggtgagttgaagtgttcatattttttatttttgtctttgaaatagaattaaatgtagtaagacagttttctatatttattgtcatatttttataccagtaatttggaccaaattttgacacagtgacacatagtggtatattcatagtaatctgtctgtatttcagaagacctaacccaaattaatggacttaaaaaaaatcaaaataacaatttttttttttgctttagtttgcttaaaattttcaaccttgtttttgttttatgcctacctgtgtgttctaagtgttgataagttgcatatagaagtcaggaaatgaagtattctcttattaacgagtaggcaagtattttagaacctggaatctggaagttgtcttagtataaagttgtgaatcatgctataaaactcacctttttttgcttaagacatagtactcagtgatttatttaagccagtaccaagcaataagaggtttatacatacttaaattacatgcacatttcagagaaaccattcattaagtaggctatgatttcttgtttttagttatcactaaatctctgttgcttgacatgagcattttgctgttaatgtaagttctatatcttttgtaggagtatgcttaatgtttagggaaatgattatgagaaagatatgtcatgttccatcacagtcargaattaaattttttcacaaacaagatgcttctaatcagtgctgttttgttaagagatttttaaaagattttcctagatttactgtgttctgcattgatctagcttgaacgtgaatgtttgtatagtacgttttcttaatattttttagtattcatagtatataatcatactaaacttgagaaactggaagaatcaagtcttcctcagttctgtttagactttctagttttttttaaggatacttccatatcttctgtaagctacacagtgagcttcatttttgcacagttataatacactctcgaatctttaacttttttccagcagaatttgacatgttatattaaaattttgttttatttaaaataaaactttatgaaagaaaaaacttatatgttacagagaagctaaagcacctgtaatgctaccagaaagttatcatttatgatatatttcatgcacagccctaatttctcggtgtaatatttctgatactttaagtgatcgtttattttaattaccataatttctaatgcactgttttatccttagctttgtttgttattatgttttggaatgaaatttggtcagataatatgattacggtgagttctgtaacagctactggtaatatttttgtaaatcacgtgaaagcattggagcaactgwcttggaaaatgctctttaaacttcaaaccccagtatgttttggtagtagtggatattacacatatatgctgctcttttcagtgttcttttattgtgcgaaaacatttttaaaacatttgatttattaataggatttatttttaataggattgttaataggatttatttttctaggacattgtctttaaacacttggatgattttatatgtcttaattctttaataatttgtagatttaaaaaacttcgtgggcagaaagcgaagaaataggaaaggatatagatttatttggcatttcaaaggattttgttttattatcccctcttatttgggtataaactcaaatctattttatccttcatctgtttggattgatgtgtattgagattttgtctaattgaactgattttgataacacataaagtttaatttccctgttaaaataggactcccaaatttctgaatgtctgtttcaagtattaggttacctcagttttctggcacctaaaagctactgataacatacattagtagcaatattaaataagktaaaataactccagtgacatcctagttacatgcttggggtgggtttttggtttcgttttaaagtatttatgagggatactttcatgcattttccatgaaactaatttttctctttctttttttagcttcagctttagctgcagctgcctctgttcagccacttgcaacacaatgtttccaactctctaacatgtttaaccctcaaacgtaagtaatggactttattcttgatatttcctatcaaggcgtcaatagagttgttttatatatttctctwttttttttttttttttttttttaagatggagtttcgctcttgttgtctaggctggagtgcaatggcgcgatcttggcttactgcaacctccgcctcctgggttcaagcgattctcctgcctcagccttccgagtggctgggattacaggcatgcgccaccacacctggctaattttgtagttttagtagagatggggtttcaccatgttggtcaggctggtctcaaactcccgacctgaggtgatccgcccaccttagcctaccaaagtgctgggattacaggcatgagccaccgggcccggcctggtatttccgtatttcatttgaaactgcatagttttgatccttttaaaataatttttcggccaggtgcggaaactatgcctagctagtgattaggatgctaataactattagcattagaatgctagtaactatgcctagctagtgattagaatgctattttttaactcttctcattggttttataaatcatatttataatatagtacatccaatcaaaatgtagatttttgtttcgatttcaataagttacatttcayataatgacaattgtatgactgtttcatccaaagagtcttgaattcttttgttttcccagtaccaaatttactttagttttatctatgaaatggtgataaactttcgttgtaagtatcatttgatagcattgaagtatttaactttttttgttggagccagagtctcagtctaggttggagtatagtggcgccaccggctctatcttagctcactgcaacctccatctcccaggttcaagcagttctcatgcctttcgagtagctgggattacaagtgcacaccaccacgcccaactacttttgtgtttttagtagagacagggttttgccgtgttggccaggctggtctcgaactcctsaccttaagtgatctgctcgcttcagcatccgaaagtgctgggattacaggcgtgtgccatgatgcctggctgatttttgtatttttatagtagagctggggtttcgccatgttggccaggctggtcttgaactcctgacctcaagtgatgtgcccgcctcagcttcccaaagtgctgaaattacaggcatgagctgctgcgcctggcccatttaactatttaaaagtcactttcaagttatgcagagtcataaagtaggatgggatcaatattttctatcttattttgctttgattttccccagagccctatctgtatcttttaacttttttttttttttgagacggagtyacctaggctggcrtgcagggatttgatactggctcactgcaacctcagcctcctaggctcaagcgattctcctgcttcagcctcttgaatagctgggatttcaggcatctgccaccactcgtggctaaattttggattttcagtagagaccggatttctccatcatggccaggctggtctcaaactcctgatctctggtgatctgcccacttcggcctcccaaagtgctgggattacaggcatgagtcaccgcgcccggcctcattgaaaatttatttttcaataccagactgcagtgttctttggggcagagacgttctgtcaatgtgctttttttccaaagtattttttttaattcatagaatatttaaattttttgatacatttgtaaatatatagtttgttagtttcaatagtatttaagagtccttaatactttcttacagagaagaagaagttggatgggataccgagattaaggatgatgtgattgaagaatgtaataaacatggaggagytattcatatttatgttgacaaaaattcagctcaggtattttcatctttttttataaatgatgttaggttgttcgtctctaccttaatcttcgcacattatgtggtgcatgttatggttaaccgtcttccattatagtttttgtgtgtgtgtgcctgaaagtagctttaatatagtggctaaataaaccctccaaaataaaagaaaatcagtaacaatttkatcagggtatgagaggatttctagtaatgctcaaagcttgccatgaaatcttggcatcttgattcattcttaggctgcatacaaatcgtagagaaaagataaaacggcaaatttgagagtagaagtcattttttaataaaattctagtatacctattagccagtggaaccattatggtaaaccagtttgtggttatagagcactaagtttctacaggcaacttgaataaacataacttgggtccattttgcatacagcaacatctttaccttttttttcattttttctgtagggcaatgtgtatgtgaagtgcccatcaattgctgcagctattgctgctgtcaatgcattgcatggcaggtggtttgctggtgagtttgaatttattttttgactgattgttattaaggctctataatgaagatgctaaacccaacatgtctgtttcttttaataggtaaaatgataacagcagcatatgtacctcttccaacttaccacaacctgtttcctgattctatgacagcaacacagctactggttccaagtagacgatgaaggaagatatagtcccttatgtatatagctttttttytttcttgagaattcatcttgagttatcttttatttagataaaaataaagaggcaaggatctactgtcatttgtatgcaatttcctgttaccttgaaaaaataaaaatgttaacaggaatgcagtgtgctcattctccctaaatagtaaatcccactgtatacaaaactgttctcttgttctgccttttaaaatgttcatgtagaaaattaatgaactataggaatagctctaggagaacaaatgtgctttctgtaaaaaggcagaccagggatgtaatgtttttaatgtttcagaagcctaactttttacacagtggttacatttcacatttcactaatgttgatatttggctgatggttgagcagtttctgaaatacacatttagtgtatggaaatacaagacagctaaagggctgtttggttagcatctcatcttgcattctgatcaattggcaagaaagggagatttcaaaattatatttcttgatggtatcttttcaattaatgtatctgtaaaagtttctttgtaaatactatgtgttctggtgtgtcttaaaattccaaacaaaatgatccctgcatttcctgaagatgtttaaacgtgagagtctggtaggcaaagcagtctgagaaagaaataggaaatgcagaaataggttttgtctggttgcatataatctttgctctttttaagctctgtgagctctgaaatatatttttgggttacttcagtgtgtttgacaagacagcttgatatttctatcaaacaaatgactttcatattgcaacaatctttgtaagaaccactcaaataaaagtctcttaaaaaggccacaggagatcttcatttttcaaatgttttaaagttacagaaatttgagaacagaattagcttcttttagtctcaattcagtacttgcctcttgggaaaatgttccgagtctgcggaaacttgccctcacgttgtcccccatgaattcctttattctattagagtctagccctgtgtattttagaagaatgtatcaaaactgaggggtttaccaaaaagaaaaggaaacagcctggccttaaaacctgggcattcttggtctcctgcattgtctgggcatatttatgaagaaattttcaccatttacaatacatacttaacaaaatggcttaacttcaaactggtttccaaaattgatttatatattaatatattaaataaggtgcatatattactgtattaaggggttttgagctttcatactagttgggaagcaagctgtcaccatttatactcaattctcttcaactgtttatctcttggtaaatcttttgagtaggaaatgctgctcctagcttatcttcaaatactgagttccttacctcatttgttcaacttttttttttgttagcattgaagcacaagttttacaggcttattcagaatttcatatcagtcgttttgtttgacatttatcccaataattgttctagtgatttaatttgtatggaaactcccaaggttcaatttctttttctttttgagatggagtcttgctctttggcccaggctggagtgcagtgatgtgatctcagctccatctcccaggttcaagcaattctcccacctcagtctcctgaagagctgggacaggtgcgcaccaccgtgcccagctaatttttgtatttttagcagagacggtgttagcccggctggtctcacactgacctcaagtgatctgtccgccttggcctcccaaagtgccgggattacaggcatgagccaccgcgcccagcctcattgaaaatttacttttcaataccagactgcagagttctttggggcagagacactctgtcagtgtgctctttttccaaagtatctcctgctatcagtttttccccttgaaccaagtcttcctaacaaatttgttgtgtcattgctttctagggaactggaccagcaaatgtggcctttagtggttaatctcatctgtgccaaaatttagttgctaccagagtgaaatttggtgtgtaaataatgttcagaggaaatgtggttggagtgtagtaacttgaatagtgtcgtgcatagaaaacagctcattctgagtgaaactgtttatgtccaatcagttcctgagtcagcatcccactggttcgaaaatctgtaactaatctggtaatgtccttaatttcctcctgcctgtcagtgttccaaagtgttcatctagttttcttttatctttataataattactaccatctttgaaagttctgtttaagaaatgcttaatgggcaatgcgggttagtaactccagggtctgcgtggcctgggcaggtgagatggacaactgcctcattacagaagctttttatcatcaaactagtaagttttgtggagggcaagctatatagattgttgatgagtggttagaaaatcatctggaatttagccagttgagaagctacagaagtttctatttttttttacagtggatgaactgttttgctttttctgataaagccactaggtatatctaaataacaacctcgggctggacgtggtgccttatgcctgtatatgtgaacactgggaggcggaggcgggtggatcatgaggtcaagagtttgagaccagcctggccaacacagtgaaaccccgtctctactaagaatacaaattttttttgttttgagacagagtctcgctctgtcgcccaggctggagtgcaatggctcgatctcagctcactgcaacctccaccttctgggttcaagcgattctcctgcctcagcctcccgagtagctgggaatacaggcgcgtgtcaacacacccggcttaagtttttgtatttttagtagagacggggtgtcaccgtgttacccaagatggtctccatctcctgaccttgtgatccaccagcctttgcctcccaaagtgctgggattacaggcataagccaccgcgcccagcctaacaatacaaaatttagctaggcatggtggcacgtgcctgttatcacagctactcgggaggctgaggcaggagaaacgcttgaacacaggaggcagaagttgcggtaagccgagatcgtgccactgcactccaacctgggcgaccaaggaaacaaccaacctcaggatgaacattgctttggaaataatgcaatgtgtgaccttgaggaaatttcggcttataaatccattttttgaagtagtttttctcctttaaaatggtgaccgtagtaacaagcacagagttgtactgagtaattagttgaatagtatctatggaaaatactagacactcccaagttttccaattttggattaagagaggcaggccttgtgaaagagatactaaccctagtcattacgttagtccatctctttagtgcagaagatccttggcaaagctggataataggctgagagaagaatattcctttaagagagggacactgactactcaaagactttcttttattagtacatgggctgggattgatgggaagggacagatgtagttggcaaccatggttagcatcggatgcccatcccaatggccatgaatgtgccaaaggtgccgccactctgcatcatggttttcccaatgccgcccatcagctctcgaccccgcattccgatcctgaggaggaaaccaagatggagctatttggtaacaaaaatatcagaaagagtattaactgctcctttccaattttttgctaacactagtctagcaacccctacatctgattttccacttactggatattatatcttactacctggggtgggtaatgagaaggaaaaagatccatctgggtctccagggtatttttctggtggatgtcgtattaactgccttcagtttgtgggaggcagcagatgcagtgtaaaatacatagagaaaccagcttttttgactggtgttgcctgcagtttaagacccaataaagacatctgtcttttagtttcttggtgttaatgattttggagtaaggtgggggttcaagagtcagctctacaatttacacatagtgtcaagtgtaaaatgggcatctcaacattatttacaggattttgaaaactacagtatttagcacagtgcttaacatagagtaagtgctctgtaaatgataatttacaatctagggatatggcaataacagcctctaaatgtgaaaatgacctttagagtgtaaagtttaactgctttatctctgtatcctgtatccagaatagtaaaaccgctgaacgagtttctttccttatgcgcaattggaaaaaaaaataaaagcaacagtagtaactagttactgagcacttaatatgtgccagatgctgtgcaaagtgtgctgatcgaatttttacaactctataagttagatgctactgtcttcattctacacttaaggaaacccagtctccaacttgcctaaagtcaccgaaccagtaagaaaagggccagaaagcattttgactctaaagctcaaattcttaagcactgacgcttccaacctgactttacagattgaaggtggtttggaatgagtctggctcgcgaggggacagagagggaagtcgaaagaaggaggctgtgttcaggctccaggccgaatggggcagggccggaaggtctggttgtcctgcccagagatcaccgcccgcgcccctcacctgagacaggaaaaggtgccgaagagcgccccggccgccatgcccacggcgcaacccatcacgaagcccattttgacacggtcgaagcagcttggctgggactgtccgtagggacccacggccaccggcatctgcgggggataggaaagtgtgggcccaggcgctggcccaagagtcgggcggggacggaagcggtaggctgggaagtgggcccaagggctcaggggaagtaagggaaggaaaatcagtgggtagcccgactccaccaccctcttcgcgttccggccccgcgtcgcccggcgcctacctcacctcgctcgcgggctgggtcgctcagctctacgtctctcacggaaaacgacggggagggcgctcgcggcccgatgaatcgcttccggagcgccgggcagcacttccgggagcctggggcccaggactgcagcggcttcggaaggtgggctctgccagcgggaccatgctgctccgagccgcttggaggcgggcggcagtggcggtgacagcggctccagggccgaagcccgcggcgcccactcgggggctgcgcctgcgcggtacgctcgggtcccgctctccgggaggcgcggacctgtcccctccgcgcggcgacgcaactgaatattccggagccttcctgtccaccctgctgcccagaccctctgacccttctctcaaatgacacatccctcaaactttcttaggcgggtccccgaacggttgaccccggcgcaccacccctcgcaccctgcgcgacaggcccccagagccgtggaggcgcgtccttcagaccgctcctggccaagttacagatgctgctccgggctcccgtgcagaccgttaccttcggtcagaagggactgcacctactctggctccacgttccttctaaacgtctttgccctttagagccttccttcctacgataccatttgaatatcaactcaacaccccctccaggaaccctctctccctctcccttacctccttttacagcgtgtcaggtatctggtgttgttttctttccattgagattcgaccctagcatcccttacacttatctcacctccagccagatttttccttctgccctttggatgccatgcgttcatagttgccttcggtcttacttggctactccgttccattttttatcagttggagaccgtgctcctcagtctgcggttcccgcagatacagccgctgccccggaggtggggccagtgctgcgacctctctatatggatgtgcaagctacaactcctctggtaaggatgaagcttttcccaaggctgcttataggaagtaaatgatgggcgtgatcacgcaaagaaatggctgaatccctggagaagtgagagccgtgaaggtgtgctggaaaaagcactgagcgaggagtcgggaggcttaaattcgaggccactggcattggctttactactcactagcaattgaccttggtcagatcacttcagcgcaggctctatagtattagttaaaagcatgggctctggaatgagcagaacggccacttagtaactgtgtgaacttggacaagtattaaacgggttaaaagactaatgcaagttttcaccaatgtgtgaccaggggtgtttgcctaggccctgtcctgtcccagccccttatagatcacattacctggcaggaatggaaacaccagcagaaacagatgtcggaacaaggcagtgtttgtagactacctgaggggaggcagaacaatccgagttgggatgggttgtgagtgggagtgtattaggttgatatttggtgggtagttttgtgggaacaaaagaatgtttgaggcctcctctaggcagtgcctgaggggttgagagtgtcttaaggcagggtggccaggtctgaggggtggagtgggacctgaattgacgatgcgctcaaggaaaatgatctgttctgttgtgttcaggacccccgggtgcttgatgccatgctcccttacctaatcaactactatgggaacccacactcccggacacatgcttatggctgggagagtgaggcagccatggaacgtgctcgtcaggttagtacacaggagtctaggaggttctaaggtcaaagaggggcagtggcctgtgggaggcatttctttcttggtaggtgtg

SEQ ID NO: 98065 - DNA, 29354 bp, Homo sapiens
agttttctatggaacaacaggacttttgtattactctctaatttcccttactttgttactgtttttattttcattaaaattcataataagatcctcattagatgaagtaatcttgttaaaagcagtgttctactctgatctttttccttcttatgtaaaaaaaaaaaatgtgcttccctaccatacaagtgaatttcttctctaattagacatgaatagctttagagatcaaacacaggctgcttttgaaaaccagatctcttaggacacaggggcaatctcattactgaaaatatgtgtttctgggttgcacaagccattgaatttctttcccaattagcagcaaatggtttttcagaacaatgaggaagaagtttggtttgtactttgcaagtgttgtttttttcttggagttagactggaagtatcaactaccatcatctctgtcccttcttttcctctccctgagcaaaggaacacacatgactctgttttatagatagtcagagttccaggtaaattcttcatccaaatgctacttcctctgggccaggattggactccatggtagaaggaacacctatttaagactacctagttgtcagctactgtcagctgttatgatgttaggggagactgcaaaatcataaacacagcaatgagaagctgacaatgtccttgctctggggggaggaggggaaccattcatgagagaatctctccaagtgctgcccctagaagcagattaaccatgttttctctgggtctttggcaaaaaagaagtggtgtctgtggagaagggcttcttatcattaaataaccaactgcttggggttccagataataggttgaggttctagagttttaggacagtgcaggaggaaataaaacctgcctgtctaaacctaagtgtcagtcagagtcaagggaacacagaggtcatggacaggatgtttctctaagttgagacatactagtagtgcaggagtatggggagatatgaggagcatggcgaggctccaacaggaaggttgatgagagctttgacttggggtcactgccactcaggtccgagcctcaaagtctctccagtgtgtgtctggcaaatattcttctctggccttccaagagtccagctgtatgctgatggaacacgctcaaatactaatttccacaagatcagtacagtcaagaaaatccacaactgcccccacaattaccatgactcctcacaaggaattaatgtctacattatatgcaaattcgtgttagctctttttattaatttctgcccttaccatctcccaccaattttgtttcctttgggctttgaggaattcaaaaatgattactgggctaaaacttcctctgtctgttccctaagccacaatcacactacttctagtttgtaaaaacatactttatgggttgcaagaaattttatttcttcatctttactaaagttagttgatgctgatgataatgatgatatgatcactagcaacatcccccagttttatccacaaggatatggagactcaaatagatggagtaacttttcctggattatatgaacgctaggtcttcaaccctccttcccaacctcaccttgaagggataggataaggaggatcttcaagttcagaaaaatgttttaaatccttatctctgcccccacttccccaccccccgctgcccctgccaccccattcttctcccaaggaggaaattttcccaagggcgtgccagaggatgccaggatatttaccatttaagaaagtttggttatttcgccatttcacaggagactttaagttctagtcctaaggactgctggaactgagaaattctttctctttcttgtcttctatctccaatccttcttccccatctctataattattctgtcctctttaccctttgcctccatcctgtgaaacttaatcacgcaaattgcatcattcttgttatacccaactaaatcagggttgagaggctgggtggtggagttgggggagaaagcactccgagtacaaaaaataaataaataaataaaaattgctccaagaacgtaattctcagcaagactgactgctggaactgcctgctgtaacccgggagcagttttatttacagctgctgagataacttgctgcaactctaggacgaattttgcccactaatcagagcttgccagctccccaaacccttactagtgccaatgaactttcttgaagagcaatatgtaacatttctcttgttaataaaacctctaaacttctcttttcttcttcagacatactgaagaccacctggtctatgtgtgtatcccaaattgcaagtctttttccaaataaaacattaaatttagagattcagctctaaatttttattttgactttgacaatcctcatcctaatttggcttatgaccatcctagtggccactattcttctctttctcttcctcttcctcatccttatcttctgaaagcagaccctttggctggagtcttaggattctactacaaataatacatctttgagaagttctctatcggttatatgtatttttattttttattttttttgcactctgtcacccaggctggagtgcagtggtgtgatcttggctcactgcaacctcagcctcccaggctcaatcaattctcctgcctcagcctcatgagtagctgggcttacaggtgtgcaccaccatgcccagataatttttgtattttagtagagatggggttttgccatgttggccaagtgggtcttcaactcccgacctcaagtgattcacccacctttgcctcccaaagtgctaggattataggcgtgagccacctcgcctgacctgtttttaaatttcaaagtgcattaatgaatgcagttgtatctaaattaaagtggctcatgcaaaacttgatgaagaaccttaccattttctcacagtattcataatcatgtttggatatgtcactctctctgggctaaaaacaatgtttaaaaaaagctaaataatgctgccctccaggctgcttctactgctcttcacctagaagccagaaaaaggaacaaacagtgacctttggagctcattattattgtgaagaaactgtagatgaaagctttgtactttttctgagtgggtaaataatttatcttggaataaaaacttagacaaaaagagataagaggaatatacagttacaggcttcaaaaatagatatttctcacatcagtttagtggacaattatctaaatatattaaagattgtgtaacaatatggggatatatttatgatggattaaggagtggaaaagatgtaatgtaaaattatatgtatttgatgaaaacaatgtaaaaaatacaccacaggagaacatatgcatagttgatgagttatgtaaggatggcggtttctaatttagttgcagtgtcttcagagaacacggtttgcatgaaccctgttatttgttatttgtcgagaactgcactgcttctattcagtggtcaggttttataaatattctgtgtgcttagaaaaaacatgcatttactattgggcacagggtcctttctccatgtgactgttagatcaagcttgttaattgtgttcaaatctgtttttcttctttttttttttttttgagatggagtctcactctgtcaccaggctggagtgcaatggtgcgatctcagctcactgcaacctccgcctcccgggtttaggcgactctcctgcctcagcctcccgagtagctgggactacaggcacatgccaccatgcccagctaatttttgtatttttagtagagacgtggtttcaccatattggccaggatggtctcaatctcttgacctcgtgatctgcaccccctcagcctctcaaagtgctaggattacaggtgtgagccactgtgcccggcccaaatattttatagctataccaatctttagtctgatatagaacattatgatgatgtctgaaatcttcccttatgattgtggttttgtttttttttttctgtttaatttttgctttcccttttttgcagctgtgttatttaatttatacaagtttaaaacgatcatagtttcttgattaattgttcctttcattatcatgtattatctctctttatgcctagtaaatttttttggcttaagctatatttttccttgctaccaatacgggtgctcttcaacttacaatgcaaaaccaccataagttgatataataactcagttgtgagctgagaagcatactaaatacctgtcatttttgtgccatcataaagttgaaaaattaggtcaaactctcataagttgcagaccatctatgtgggtacaccaatgttttgttagtatttgcttgctataacttttccattttttgctttcaatctttctgcaattttatattttagatatgtctattataaacaagacatggctgagtcttccacatcataaatttagtccattttcttttgtttttattacagatctggaaattttttggtcttatattgtactccttatagtcatttttctatactttttctccttcccttgagttattgataatatgtttaagttattgatttgagatcttttttctttctcatatatgcataaaaaactacaaattttgccctaagcttttctttaactgcatcctataaatcttgatatgtggtattttcattttcattctgttccaaatatgtctgatataggacttgtatccagagtatataaataattcttataatttattaataagacaaccacttaaaaattgggcaaaaagatttgaatagaagatgtaagaatggctaatgggcacatgaaaagatgctcaatatcttagtcattaggaaattgaaaattaaagccataataagaccacttcatatccactaggatgaccataaacaaaaagataggcaataataaggctggcaaggttgtggagaaattgaaaccctcatacgttattggtggaaatgtgaagtagtacagccactttggaaaacagtctggcaacttctgaaatttaaatgtaaattgccatgcaacccagcagtttcactccttgatatatacgcaagacacatgaaaatatgtgtccacacagagacttgtacatcagtgctcatagcagcattattcatcattactgaaaaatggaaacaacccaaatattcatcatattcatgaaacattgaatggatgaagaacatgtggtatgttagcacagtggaatattattcagcagtgaaaagaaagaaaccattacatgctacacatgacaaacctcaaaaaagtatgtgaattgaaacaagctatacactaaagactatatattgtaggattccatttgtctgaaatgcccgtaaaaaacaaatctatagagacagaaagcagactgtggtttcctgaggttgggagtggaaatgggattgacagcaaatggcatgagggatctttaagggctgatggaaactggattatgataatgggcatgcaactctataaatgtcctaaaaatcattgaattgtatgcatgaaatgggtaaatttaatgatgttatacctcaataaagctgttctttttggaaaaaacagctagtgaactagagtagctctgcattttattaagaaattatttcttacatcctgtgcctagatggccaatattacactcaagaaactaatggacatagaaaaattgaatgtacctccaaacactcaagatgaatacagcagtcttcaatagtcaacgtcatggccattccagagagaaaaggtccaagttcagtgcctcgaaccttgttgccttccgtgaaaggaagcagttgaaatgagctttgcccctggtgacactcttccttgtcactaattaaccagctctataggaaggttgctccgccaacaccttgctctgcctggagagacatctggccaagttctggtgagcaggaaaaatgtctactcgttaccaccaagctgctagtgatagttacctggaacttctaaaagaggctaccaagcgagatctaaatctttcggatgaagacggcatgactcctactctcttggcagcctaccatgggaacttggaagccctagagataatctgcagtagagggtaagttcaacccgatggtttctgttggaaacagtgttcatggtaggtttttgcagacagcagcaagaggcagggacgtcaatacaaatactttatcctctttctagattgtctaaatgattggatttttagagaaagagagaaaactatgcctagagatgctctcttttctcactgaggactggcactataggagtggctcatcccttagccacaatcagaggagagaccctgaactacggcattatctgcatggggaagagggaagatattttaattctatgcctttaaaaatgcttttcatgaaatttaaatagttttctcttttcaaagaggccattgttttacttggttttaagttgccaaccttggttggaacaaatgacatggttttagttttttttttatctatgccatcaaaatctcacagtcttttattaactttcaatcccagtgcaagctcatgatttttttattttttatttttgacacagggtcttgctcttttgaatggagttgctggctctacaaggactctttagcctatcttaactctatcacttctttggctagtggatagatmcacacacacacacacacacacacacacacacacacacsccatctctttgcccagattttaatggaggagtaagctagttcctctgcttgttctgcctgttatcagagggctaggttgtgttggcaaccgtaacccaagaggggtaaagaaagagaaaaggacaaggtaaataaaggagccaagtgaatccaattgaatacccatttattcagtatttgttatgtgccagccacttatctcttaagataagagatattttgctagccactgggcacactgtgatcaacaagacagccacagtccctgtcatagtgagcagatttgagaggggaagacaagacatctatgatatttgtgtgtgtgtgtgtgtgcatgtttgctctgagacagggtctcactctgtcactcaggctggagtgcagtgtcaagatcatagctgactgcagccttgagccccaggctcaagtggtcctcccatctgagcctcccgagtagctgggacaagaggtgtgcaccaccatgcccagcaatttttgtactttttgtagtgatggggttttgccatgttgcccaggatggtcttcaacttatgagctcaagcgatctgacagcctcggtctcccaaagtgctgggattacagctgtgagccactgtgcctggctcatctatgatatttgttacaaaaagggaaatagagggcactaaataggcatctacctcaatctcaggggtgagggaaggcttccctaaggggaaagcatttaagctgggattaggaaaatgagaacaagttggctagacgaaagagtgttttccctaagatggaaaactgctctagttctgagaactagagaagctgagtatggctggatgtggttcaagtaggagtggggtcaggacaagtataagagataagaccagatcacaaagagccttgtcaactctggtaaggactttatcctaagggcccaggaagccatgtcttgggtagggaagctgccagagtagatttatgtttacaaaactcactcaggtagatggataacagtcggagagaatgtttggggactgttttagtggtcgagatgagttggactagggtagtgacattgggaatgggaagatatggttggatttgagtggcagtttggatgtagaatcaataatgattgactggatgtgggcagataaaggaaaaggagggttaaggtcccaggttttggatgttgacaccctttattaaaataggggacatttaggaagtgtcagaagaacccaggattgggagagttcctgagttgaagattgaatgagaaagtgagtgaagcagatcttccccatctctcttgtctgaataagactttcttttctcagacacatcgatccccatcagccagccttctccagtcatctcatctcttctcctactcagcctagggttccccagctttctccatctactgaaagtctacctcattccacaaactgcaagatgtcagttactttaaaatcaaagtattagcctattcttgcattgctataaggaaatgcctgggcctaggtaatttataaagaaaagaggtttcactggctcatagttctacgggctgtacaggaagtatagtagcttctgcttttggggagccttcaggaagcttccaatcatggcagaaggaaaaggcatctcacwtggcagaagcaagagcaagagagcaagsggggaggtgctagaaaccagatctaatgagagctcactatcatgaggacagtaccaaggggaatggtgctaaaccattcatgagaaattcgcccccacgatccagtcacctcccaccagtccctacctccaacattgcggattacaatttgatttgaggtttgttccccaccaaatctcacagatccaaactgtatcaaccagtgagtttgtcctcctagaagagggtttgsgggttctggggttcttctcagcagagagctcttgttccatttgaggacattttgaatagtaatgcttaggtgttctctctctttctctcctttgaaagcctgaaatattctcttacaataactcttctgctggtctttatttattttttatttttactagagacagggcctcgctttgttgcccaggctggtctcgaactcctgagctcaaataatcctcctgcctcagcctcccaaagtgttgagattacaggtgtgagccacagcactcagcctggttctgctagtctttaattacaaaagtaacatgagctgaacccagaaaattaaaccatacagacgcacacaaaacatgaagaaaaaatgtcctataatgccatgctactaagatgtatatagttctctctatatatactatagtgcatacaaatacattttaatattcttctataaatttcagggactttgtaggactctagtcaacaaatacatttcttagccaacccctcttttggacacatagtttgttttccctagtttgaatagggctatgatgactatccttgtacataaatctttgctgacattgtcttttgtgtttttttgagatggagtctctctgtcactcaggctggagtgcagtagcgtgatcttggctcactgcaacctccacctctygggtttgagcaattttcctgcctcagcctcctaagtagctgggtctacaggcgtgcactaccacgccgggctaatttttgtatttttagtagggacagggtttcaccatgttggccaggctggtctcgaactcctgacctcaggtgatttgcccacctcggcctcccaaagtgttgggattacaggtgtgagccaccgggcctggccacattttcttsagaataaattctccaaagtgaaatttctggatcaatttgcatttgtgttagtccatttgtactgctataacaaaataccttagattaggtaatttataaaaaccagaaatttatttcttacagctctggcagcagagacatccaagatcaaggcaccagcaggactggtgtctgatgacagccctgtctccgcttccaagatggtgccttgttgttgcatcctatggctgtgtcctcacatggaggaagggaaggaaggggcaaaaaaaaaaaaaaggcaaattccctgtgtcaagtccttttataagggtgctaaccccattcatgagggtagagtcttcatgactcaatcgtctcctaaaggccacactgcttaacgctgttacattgacgattaagtttcaacatgaattctggaggagacacattcaaaccatagcagcatatgtgcaatttaaatagttttgtgtgtgtgtaaatggacatgctgtccttcagaaagtgagtacccattttggccaacatgataggtccaaaatgatatattaggctgggcgtggtggctcactcctgtaatcccagcactttgggaagccaaggcgggcagatcacttgaggccaggagttcgaggccagcctggccaacatggtgaaaccccatctctactaaaaatacaaaattagcatggtgtggtggtgcacgcctataatcccagctactcaggaggctgaggcacaaattgctcctgaatcccttgaatccgggtggtggaggttgcagtgagccgagatcaggcaactgcactccagcctgggcaacagagtgagactctgtctcaaaaaacaaaacaaaacaaaacaaaatgatacaccagtgtggctttaatgttcttttctttggttgccgatgaggttgaaaattctttttatgcttaaaaagaattggccattggattgccacttttgtgaactgtgtatttataactttattccccatttatattggggttttcaaccatttctccttgattgataaaaacacttttgaaagttaacaatatcaactctttgtcatataggttacaactgttttacaatacacaatttatatttttgacaacagatttttaaatataaatgtaaacataaatatatatatatatacgtataagtctatcaatctttgttgtgtgattctaactttgaggtcatgcctcaatactgactgatcctttagtgctatttttagtttcatttgttattttaaatactttatataatttaagatctgaattatgatctaactctgcattctccaagtggctactcatttattccaacacaattagttgttatagtctatctctttctccactaagttgacatggtaacatcatttctttcaatgtaatataaatatccagtccccccaatttgcttatattaatatttattaaacactggctatgggtgcaaatattcttctaaccttgtttttcctagtccttccttctcaactcctttcttctcacgggatctagtacatctcagatttgtttcattgccctcaaaagcatctgggatctgctgtgttgagcaggcctgatgtaggctaaaaaaaagaacagaagtcttgtgaggtgcctttttgaccatagctaatcctgggaaccagtgtgaggtcaaatttccaattagatttaaggaagctgaaaagggaagaaaattaccatctcacatcagtcagaatggctattataacatcaaaaaataacagatgctggtgaggttgaggagaaaagcgaacacttatacactgttggtgggagtgtaaattagttcaaccattgtggaaagcagtgtgacaattgctccaagagctaaaagcagaactaccattcgagccagcaatctcattactgggtatatacccaaaggaatatgaatccttccacaataaagatacatgcctggatcatgcctgtaatcctagcactttgggaggccgaggcgggtgggtcatttgaggtcaggagttcaagaccagcctgatcaacatggtgaaacctcatctctactaaaagaaaaacacaaaaaattaactgggcgtggtggcacacacctgtaattccagctcctcaggaggctgagacacaaaaattgcttgaacccgcaaggagaaggttgcagtgagccaagatcacgccactgcactccagcctggggaacagcaagactccatctcaaaaaacaaacaaacaaacaaacacatgcatgtgagtgttcattgcagcactgtcacaatagcaaagacatggaatcagcctaaatgtccatcaatgacagattggataaaggaaatgtggtacatatacagcatggaatagtatgcagtcgaaaaagaatgagatcacatattttgtgggaacatgggtggagatggaggccattattcttagcgagctaacgcaggaacagaaaaccaaacaccacatattcttactgataagtgggagctaaatgatgagaacatgttggcttagtgcctgggtgacaaaattatctacaacaaacactcgtgatatgagtttacctatataacaaacctgcacatgtactcctgaacctaaaattaaaaaaaattgaaaattgaatttagaagctaatcaactattgaaatactgaagtccatttcagtctgatgatttaagagtttatctgtcattacctgatagacaacgaatcctatagcaaccatttatattaaaactctggctttgttagaaaactattttcctttgtttttaaaatttgaagatggaaaacaatcattacatgtattttcctgcactaggaagcataatggcccaattacaaaaaaaaattcattttacctttaaagtgtatgaaatttcttggttttattttttaaaatggaaactagactttttcccccagattcttttttttttgtgatggagtctcgcttctgtcgcccatcctggagtgcaatgatgggatcttggctcactgcaacctccgccacctaggttcgagtgattctcctgcctcagcctctggaatagctgagactacaggtgcctgccaccacaccccgctaatttttgtatttttagtagagacaaggtttcaccatgttggccaggctggtctgattcttaaagaaatacatacttattgtaatatttcacatcatattgaatagaattgataaagtaaaaattataccaattcctacagttatcaacatttgggtacatatccttccagactttttcctttgagtacatgcaaacacatgtacattctctccctttaaaagacaatcatataaactatactgaaaccttctaattatttaacaatatatcatggaccatttgcacttaaaagttgagatccacgccactattttattttttttttaataatttcaacttttttttttttgtgagagacagagtcttgttctgtcacctaggctggagtgcagtggcacaatcttggctcactgcatcctccacctcccaggtttgagtgattctcctgcctcagcttcccaagcagctggaactacaggtatgcgccaccatgcccagctaattttggtattttttagtagagacagggtttcactatatgttggccaggccggtctcgaactcctgacttcaggcgatccacctgccttggcctcccaaattgttgggattacaggtgtgagtcactgcaccacgccagtttcaacttttagatttagagggtacrtgtgcaggtttgctgcatgggtacactgcatggtgctggtgtttggggtatgactgatcccatcacccaggtagtgagcatggtaccaaatagtttttcaaccgttgccctcctctcatagtcccccgtgtctgttgttgctatctttacgtctgtgagtacccaatgtttagctctcactcataagtaagaatatgcggtagtgggttttccattcctgtgttaatttgctagggatgggataatgcatgccactatctttaatgacttcatggtattctgttttatggtgtttgtttgtttgtttttgagatggactctcgctctgtcatccaggctggagtgcagtggtgcgatctcagttcactgcaccctcagcctcccaggttcaagcaattctcctgcctgtctccagagtagctggggttacaggcacatgctaccacccccacttaatttttgtagttttagtagagatgaggtttcaccatgttggccgggctggtctcaaactcctggcctcaagtgatcaacccaccttggcctcccaaagtgctaggattataggcgtgagctactgtgcctggccagtttcattatttttattaattaacaaaaattatatatatttatggtgtacaacgtgatttttaaaaatatgtatacattgtggaattaagtcaagctaattgactatgtgttatcttctatactttttgtgatgagaacattaaaatctacttggtaggcaattttcaaatatacagtgtattgttattaactatagccattgagctgagcatgatggctcatgcctgtaatcccagctctttgggaggttgaggcaggaggattgcttgaggccaggagttcgagactagcctgggcaacatagcaagamcccatctctataaaaaataaataactaatttttaaaaaaactatagtcatcatgtgttacaatagatgtcttgtacttattcctcctgtctcactgaaattttgtatcctttgaccaactccccagtctgcctctgcctagttaccaccattctactttctgcttctaggagacttttcttttagacggagtctcactctgtcaccaggctggagtgaagtggcacgatcttggctcactgcaacctccgcctcccggattcaagcaattctcctgcctcagccctcccaagtagctgggactacaggcacgtgccaccacacccagctaatttttgtattttcagtagagatggggtttcaccatggtggccaggatggtttcaatctcttgacctcgtgatctgcccacctcagcctcccgaagtgctgggattacaggcatgagccactgcgcccagcctctaggagacttttttagattccacatttaagtgagatcatgtggtattcgtctttctgtgcctgtcttatttcacttaacatactgtcctccaggctcatccatgttgtcgaaaatgacaggatccgtttgtttcttaagactggatagtattccattgtgtggagccaccatgttttctttatccattcttccactgatggacacagattaatgccataatatatgtaatcagttgactattcatgttgcttaatttgaacccactctttttcctgttataagtaagtttgggaggaacattcctgctcattcatctttgcacaaagatcttatatttccttaggacaaattcctaaatgtagaattgtagattcaaaagagtgcctcattttaaaggctttttgtgtgtattgtgccaggaaatttgaaccactttctgcttcttccagcagtatttctttccccatactcctgccaaaaccaagtattactattctttttaatcgttgcctatctgattggcaaaaggcagagtattgtttcaatttgcatttctttgactattagtgagtccaaatatttctttttatgcagaaaaacgtttttgaaagaatagttgagaacttcacaaaaaatcaacttcaggaggaaaaattggaatgtaacagatgctcagggtaatttaagcaaattgcctacttagtgacagtagtgctaagccagctttaaaaactattgcccaaatgcactgatctaccaaaaatcaagggaaaaatgggttattttaaaatctcttcagtgagtttctcttttggggaaaagggaaatagaaaaaaacaacactagactgagcttagcccacgaaaaccgtagagcatcaatgttgaactcagattatcaaacgacaggactagttttccacccaggcagttgtatgcaatggttctatcaagaaatgtgaacaatgacaagtatggaatttaaaaggactccatgcaacttgtctgtagaaaatatttccatttaaattgtacatcaatttggaaatgtgtctgtaagtagaagttttgcaagttttttgttttgttttgttttgtttttgagacggagtcttgctctgttgcctgggctggagtgcagtggtgtgatctcagctcactgcaagctccgcctcctgggttcacgccattctcctgcctcagcctcccgagtagctgggactacaggtacacaccaccatgcctggctaattttttttgtatttttagtagagacggggtttcaccatgttagccaggatggtcttgatcttctgacctcgtgatccacccaccttggcctcccaaagtgctgggattacagacataagccactgtgcccagccaaagttttgcaagttttaatagcttaaagccactaggaaaacccatgaattgtcttactgacagtttcatctgtaaatctggaattttgcatttgaaattttctcaaaagaaggcccacctttggggtcatctcaggtgtactgttcttccttctgtcttgaaagcatcatttaagattcagtgaaatgggtgcagctgtaaaaaaaaaaaaaaaaaaaaatgagatcatgtcctttgcagggacatggatgaagctggaagccatcattctcagcaaactaacacaggaacagaaaaccaaacactgcatgttctcactcataaatgggagttgaacaatgagaagacatggacacagggaggggaacatcacacaccggggcctgttggggggtcgggggcaagaggagggagagcattaggacaaatacctactgcatgaagggcttaaaacctagatgacaggttgacaggtgcagcaaaccaccatggcacatgtatacctaggtaacagacctgtatgttctgcacatgtatcccagaacttaaagcaaaataaaaattcagtgaaatgagaaaattccaccagtctatagtcttaagcatatacatttaacccggacaccttagtgcccttctgcatcccccctgcagctcactcctcccaataattttgttttcaacttatccaatccaaggataacttcaggcaaatttaatcagtatgtttctctttctgttgatagtaacgtcttgggtgttttacaatccctctttgatgtctaggatacttaaggagtcttttgcatctagtgtttatttaaaataaaaagtgaaaccacatgtttaggggggagacacagcggtcccttaagatgcgggtctgtgccaaggttgaagggtctcctttcatcccaaacaattaartcaggctgactgaccagagccttctggaaagtggcttcccagcaaaactgtgttacttaatatttgctttccttagatttgatttcattttctttccttttccrctctttccccttacccccaactccacacactctggtcacgctgatctatactcctggttccccaaataggccttgtaatatcagccatctgtgcctctgctcacactgttctctctgctcagaaggaggttaccagttgccagcttatgggctggagctggtccacaaatgtgttttatttggactttactatatttttcttttaaatttgagccaacacttaaaaatcacagaatttcscttgaaattctggatttgtggcttcgtttgaaaaatgggagctctggcaatattgtttccgctttgattcaaggtagctgagctgtggtcctttctaggtggagtatgcatttaactgtgactttgttgaaagagcaaacttggccccattcagtcacttacatgacttgctggacttctttgagttgggttggagacttctgccgggacatgtgggtgacacaaaggagaaagagacacaggctttgccctctggggcatattatccaattaaggagacaaggcataaatatttgtcagattaaaactggaagtgattgattgattgattttttttttatttttttgagacagagtctcactttgtcacccaggctggagtgcggcggcgcaatctcggctcactgcaatctccacctcccaggttctcctgcctcagtctcctgagtagctgggactacrggcgcgcaccaccatgcctggctaatttttgtacttttagtagagatggggtttcaccatgttgaataggctggtctcaaactcctggcctccagtgatccaccagcctcggcctcccaaartgctgggattataggcatgagccacctcacctggcctataagtgatttttaaaaacccacaagcattattgtgctgtaggaatttactagttgaatacaaggaaaaataaatacatgaaattaaggattatgagtttgggggcaagggcaaggataataagtaatgtttattcaatatttactatgtgccaagcagttttccaatgctttatgtagattaatttatttaattcacataactctatgaataggtaatagtattatcttcaatttacagatgagtgttagaaatgtttgtcttttggtgttgcaaagaaatagtatttgaacataaatttaatttttttagtaaggctatttttatttttcgtagaaagggtatatttgttagtagttttgttatgagagtatattgaacaaaggagacagggttatttataacttgatgtgtttaatgttgtgtttggtttttattggctggaatgggactttacattttgtatttgtcttgattggttagtaacttagaactttttaaaagaggcaaaggcagaggagaacaaaggaaggagaaagtaatttgtggaatgttgagaaaggtaaaaacacttttaaataaggaagaggaacaggctatgacttaatgtttgtttggactactataagtatgttagggtaaatatttaagctaaattgtgggagttaagagtataaagtatattgatttttttattatggctagtagatatttaagaatgttagtacaggtttttgaataaattttgtttttaagagaagttattatttatttttaattagatggggaggaaagtttttgaagaggaaactttattttactttttacatgaagaaaccaagtcctagaaaaattaaacttgaggccatgtagctggtaaaatggaaaagcccagttgtgttaatctaggatgtattgtattggagatgatttgactgggagaccagcctgatccaaatcatgctgcctgttacccttgggcaaatcaattaagctctctgagtcttattttattcctgcagtaatgattcttgcctgccttctctaagagggagattgtgatggttgaaggcaaagaatgtgaaagtgcttctttgtaactaacacacaccaaagagccagggattcccgtggagtaactgcaaatctgatttatcaaattataggaccctggtcggatcacactaaccagtgaagttcttttcaatctgtagtgagcctacgaatcacctgcggatcttgctaaagtgtagattctgattcaataggtctgggtgagagtcttctgtactttttttggtttgcttttttttttttttggagagagtctcactctgtcacccaggctggagtgcagtggtgtgatctcggctcactgcaacctccgcctccggggtttaagcaattctctgcctcagcctcctgagaaactgggattacagacatgtgccaccacgcccggctaatttttgtatttttagtagagacagggtttcacaatgttgaccaggctgatcttgaactcctgaccttgtgatccacccacctcgacctcccaaagtgctgggattacaggcatgagagtcttctgaacttctaacaaactcacaggtgatgcatctgcttctggtctggagacccaacgttgagcagccaggaactagtagaatggtcgtggcgcactaacaggtcatttgcaagggtgcagatcttctcttctgcttctgtctgccctctacttctcgggaatgttaagaggacttctcagactcactgtcctctttccatggggccaggctggccagagtttagtgagatcctgattttggagtctagcctagggcaaaggaaggaccccttagtatctgtattatcagagttctcagcattggcgcatggctctggccatcattaaaaatagttactcgactttttatctgttcctgtttgtaactcaagtccttgtaggagaggagggtttgctgccttgggcaggattccagtaggttttcattcattccacaaatactggagcacctactatgtccctgttctgtgccaggcattaggtttatggccttaataccatctaatagtatccccaattccaccttaaactcttgtagaatgacacacttatatgaacctgcagtcatggaagtaagttgaggaataaatagagatgtaatgcccttttaatgaataatgtttgtaacagacactgtttgctacctctccaacatccttttctttcttctttcctgctgatggggactgagtttggttcagttatttatttccccacatgtggctcaattcgggagggtagcagtagcatgctggaaccagcttgtcagagttatttccaaattttagaaagtttgacagctaaatatagccattctttcttactttttatttttatttwwaaaaaaaatttaatggaggcaggtcttgttatgkttcccaggctggtcttgaatgcctggcctcaagcaaatctcccacctcagcctcccagtgctgggattacaggcacgagccactgagcctagcctttttttttttttttttaaggcagggtcttgctgtgttgcccaggctgtagacagtggtgcaatcataggttactgtaagcctgagcttctgagaacatagccattcttaaaaataaaattacaggctgggcgtggtggctcacaactgtaatcccagcactttgggaggctgaggcgggtggatcacctgaggtcaggagtttgagaccagcctgaccaacacggtgaaactccatctctactaaaaatacaaaaattagctgggtgcagtggtgggtgcctgcagtcccagctactcgggaggctgaggcaggagaatcgcttgaacctgggaggtggaggttgcagtcaagccgagattgcaccactgcactccagcctggacgacagagcaagacttcatctcaaaaaaaattatataaacttataatttaacaaattatattaaaaagataacacgaaagtctcactttctacttattttaatacatttcactcttacctgtctcttaagatrattcatgtccattatatctacatgggggaaatagttgataatggtacgctactgtgtatctcttccaaactctgtccagtgatgttacattggtagcttgaaatttgccatggtggatgtatttacaccacagaaattggcacatgctacaaattaggattttgatgttattattttcttgataagccattgaacaatcctatccctagtttcagggcaaaatctaattgatctaagttaaacacaatagtatgtttcccatctcttaggcgtgtaacctagtgctggccaatgagacaagaaagttgtttggctggagaatttcttagtaagtttttctcacttctaaaaaggagacacagccaggcacggtggcttacacctgtaatcccaacaatttgggacgccaaggcaagcagatggcttgaggccaggagtttgcgaccagcctgggcaacatggtgaaaccctgtctctacaaaaaattagctaggtgtcatggtgcatgcctgtagtctcagctactcaggaggctgagcagggagaatcacctgagcctgggaggtcaaggctgccaatgagctgtgatcacaccattccactccagcctgggagatagagtgagaacctgtctcaaaacaaaacaaaggaaacaaacaaaaaggagacacacggtagagatgggctctgtttctggccatgtggttttaagatgggatggttctaagacagttggacttgcagccagtatcttataacaatgtcaagtcaggatgaacatgtttgtattaacgtgccttttgttctttatttttgttttgatttttttgggcctgcgttcagagaaaaaaagtccaacatgtattttttttctctctctctcttctagaggggaccctgataggtgtgacatctggggaaacactcctctacattttgcagcctccaatggccatgcccactgcgtctcattcctggtcaactttggtgccaacatctttgccctggataatgacttacagactccactggatgctgctgccagcagggagcagaatgaatgtgttgctctcctggacaaggctgccactgcacagaacatcatgaaccccaagaaggtcaccaggctgaaggagcaggctcagaagaatgccaggaggcagatcaaagagtgtgagaggctccaggagaagcaccaaaataagatggcccacacctacagcaaggaggaatccgggactctctcttcttccaagggtaccttctccagatcatccccttcaaatgcttctgctcctggcacattcgggtcactatctaagggcattaaagacactttcaagatcaagttcaagaagaacaaagatacagcagaacaggtggggaaggaaggcagaagtgggcagaggaacgtgatggaagtgttcagagaggaagaggaagactcgttctcaggggacttcaaagagaagctccagttgtcagcagaggaggacggcagtgtgcaccatgaatccattctcaatcgtccaggtctaggaagtattgtttttagaaggaacaggatatcgagtcctgaagacatctcagatagcaagagagagtttggttttaaactgcccagtgaattgcttcaaagacaaggagcatcagaggctgatgagggtgcagctgatgaagagggagaggaaaacggcctcaaagatgatctgccgtgggatgacgatgaagtggagtgggaggaagatgtggtcgatgccacgcccctggaagtgttcttgctgtctcagcacctggaagaattcctgcctatcttcaagagagagcagattgatctagaagctctgctgctctgctctgatgaggaccttcagagcatacaaatgcagctgggtcccaggaagaaagttctgaatgctatcaacaggaggaagcaggtgcttcaacagcctgggcagctggtcgacaccagcctgtgatggagagttttggcctggagcattggggtgatgctgtggcccgctggcagcactccaggcggcaccccctctttacccaatgccagaccactgggaatggattctagggcatcggaaatgcctacctgagagagagacccaaactttactctgggaggtaggctatgcccatccaaataaatctccatgagaaacttgaggagacttcataacaagaatctggcatttctcttcagttatcttatatgtacatataattgtttttgtggttgttttgttttgttttgttttgttttttggagatgaaggtctcagtctcttacccaggctagggtgcagtggtgtgatcatagttcactgtattctcaacctcctgggctcaaatgatctcctcccacctcagcctcccaagtagctgagactacaggttcacaccccccacacctggcttattttgtatgttttagtagaggtggggtcttgccacattgcccaggctggtctcaaactcctggcctcaagcaatcctcccacctcagcctcctaaagcactgggattacaggtgtgaaccaccgtacccagcctatctttttgatacttttgaataaagaaagggtcatatgcatgacaggaaaatgaaagaaacttcctttacttttctatctctggatttaaaattataatctcatcacattatcctgctgcttgctttccgatctgtgtaacctgggaattccaattctttttctctccttagatctatgactttgcctagtggtagagactagagttctttcctggcctgcggcttgatgcccaacttaaatgcatctaaccctttaacaaatgtgtacatgtttacaagtaatggaaatgcgtctataatactcctgcctgagaatagagacagagtggtggtggggagagtgaagaaagagatagaatacaggtggtacctgttgtggactgaattgcgtcaaattcatatgttggagctctaacccctaatgtgactgtaattggaaataagacctttaaagaagtgattaaggttaaatgaagtcataagaatgcaaccctaatcctgtaggactggtgtcctttttttcccttttttttttttttttgagatggagccttgctctgtcactcatgctggagtgcagtggcgtgatctcagctcactgcaacccccgcctcccaggttcgagcacttttcatgcctcagcctcctgagtagctgggattacaggcgtgcaccacaacgcctggctaagtttttgtatttttagtagaggcggggtttcaccatgttggccaggctggtctcaaactcctgacctcaggtgatccacctgcctcggcctcccagagtgctgggattacaggcatgagccactgcacctggcctaggactggtgtcctaagaagaggaagagacacttaggtggaaggcacacagagaggccacgtgaggacacagtgagaaggtggccgtctgcaagccgaggagggggcctcaggagaaaccaaccctgcaatcaccttgatcttgggctttcagcccccaaaggtgtgagaaaataaacttcggttgataaactgctgttgttgaagccatccagtctgtggcattttgttatggcagtcctagcagaataatactgtcctaagtaagagggttggggaggagaccaagaaaaatacagaaaaaaagtctgtccaactgcaattgatgagttttgtaagggtaaacacctagtgaaacttaaggggaaaaaaaactaagttctttggagggaagatttgattgtcaaaggaaatttcacattttcatgcttattatgtacacatggtttatttactgttgtctgtcaccattgccgcatatctgaatatgtgtaggttccacgatagaaactgacaacacttggctcatgcctgtaatcccagcactttgggaggcccaggcaggcagatcacctgaggtcaggagttcaagaccagcctggccaacatggcggaaacccgtctctactaaaaatacaaaaattagccaggtgtggtggcgtgtgcctgtaatcccagctacttgggaggctgaggcaagagaattgcttgaacccaaaaggtggaggttgcagtgagttgagattgcaccactgcactctagcccaggcggtaagagagactccatctcaaaaaaaaaaaaaaaaaaaaagaaaaaagaaactgacaacactgctgctgacattttttcaatggcaatcccaaattcaaactgaaaccccactgaatagctaagcttcattagatctctacaggctgacttacatcaagtggaatttactgttgattctgggtataatacagaaacagctgtttatcttcagcttgctttctgatgcacatctgtttgggttacttcaagaggcatcatggaggattcaagtttagggaggatacagatgctcaaatctgatgaacaattggcttattcttcctcaatgaatatattcagaaagcttgttagccattgaataaacacgttgcattaggggatgattgtttacaaataccttatcttgtggaataaactgaagttgtgctttccttcattaacgtgcacagaagcagttggcaaatagaaagtgctcaaaaaagtttgtagtctgtgcctgccactattatatttcatcatcatagatgccagaatcccctcttcacctattgcccggaatctgcctaatgagatatttgctccaccccctgctgtaactacatcatagcaagagagccatcactcaggttggtagaaatgaacttgaacattgactctcatccctttttaggagatatttgccactaggggtctcatcaggtacctctatgctcttcttaggggttcttttcttttatgattgacagaattaataggtgagcgttctccaaagttctcagcatcaaggatatagtctcttcgtcacagagtattgttatataataaaaaaaggtttataccatgttataagatgttatcaatgttctaagaattccagatctttcgaactaaataccaactacaggggctaagagaagatgccagagcaatacaaaggccttgataagagacaaagacaagaggattatgagccaggatgagcttcaagtactcactgatctcagacctccatctcttaaactagatgcttagagtagctcaatccaatatctggtcacccctaccacctcctggcccctcttttccccctctatgtagcttgacataaaagtcaacaagagggaaaagcagctgggagcatttcaccgaagaggagagtttgagaagttatagtgtggtaaatgtgtattgtgcttatatttcaggccattgtgtagtacaggtcagttatatgctcagaattcctaagtccaagttaccagcccagaccattgctttgggcaccaaatacttaagcccaaatctaatctgacatctcctctcacatgtctcacaagtaccccatactcagtgtgtccaggactgaacccattttcttccaggttgtcagttctcaacttggatgattttgccctctgtctcctagaggacatgtggcaatatctagagacattttttgattgccatgataggggaacagtggtgcaactgacatccagtgggtagaaacaatgggtgctaaacatcctagaatgtacaggacagcccaccaccacaatgaattatcgagacccaaatagtgatcgtgctcagtttcagctgcattaaaacatgcagctctaaatcttcatttttcataaatggaaaatttaacccaatacttcttttcatcacccaattggtcaccaggccctttcaacttttcaatatgtctcagagctaaatcctctttgatgtttgcaagatgacctattggttcctgcccccaaccatcactcactggattgctgtaagtatccttatctgtctttaattcattctccacaaggctggttgagtcacgtaatctttttaatatgtaagtctcttgtcactttctactttactgttgctttttttttttttttttttttaagacgcagttttgctcttgttgcccaggctggagtgcaatagcacgatctcagctcaccgcaacctcagcctcctgggttcaagtgattctcctgcctcagcctcccaagtagctggaattacaggcatgtgccaccaagcctggctaatgttgtatttttagtagagacagggtttctccatgttggtcaggctggtctcgaactcccgacctcaggtgatccacctgcctcaccctcccaaagtgctgggattacaggcgtgagccactgggctcagccaccattgcttttcaaactctcaccaccacacagaaggcctgcatgattaaagagccctattctctcctccaaacctctggtcccatctctgaccactcctctccctgtcccctaatttcagctatactagatttcttgtggcttcctgaatacatgtctctcatatgcctgtgccttagcataccatcacccttctgcctggaaaagtcttcctccatatagccatcctcactgggagacataccctctctctttgcccctagtctgggttgagtagcttcctatctgtgcaagctctctttgtttgcctctccagaacttctctctactattttccaacctactttgtgtcccaggtggttgggctctggactgcatcaaagggctcccttgcccttgggatcctggttgggtctggccaatgggagttactaacaagataccagaaggtgggagaaagaaagattgaggcatttattctacctgtttcttcttttcagggcagcagctgccttcatctaagctcacctctcccatctggcagccctctgctatagctctagttgtttctgggtttcactaactgctctttcaagcttagcagtggtagtgatttcctactattgctaaccctggggtgcttcttcctaaacagtctctttattctcttcaatcacaccttttgagtgtggcatctacagacagttccccacttacaatcgttcaacttaagattttttgactttacgatggtgtgaaaatgatacgcattcagtagaaactggtaagatattctctcaggatgctgggcagaggcagcgagccacagcttccaatcagccatgtgatcaccaggataatcaattgacagtgaacagtgtaccgtgttaccagatgattttgcccaaatgtaggcaaatgtaagtgttctgagcacatttaaggtaggcaaggctaagctatcatgtttggtaggtgttttctatgcatttttgacacatttccaactttttttgagacagggtcttgctctgtcaaccaggctggagtgcactggcacaatctcggctcactgcagcctctgcctcctgggttcaagtgattctcctgcctcagcctcctgagtagctgggactacaggtgtgcaccaccacacccagctaagttttgtatttttagtatagacggggtttcaccatattgcccaggctggtctcggactcctgacctcaggtgatccgcctgccttggcctcccaaagtgctgggattacaggcatgacccaccatgttcggccacatatttccaacttttgatgaatttattgggacacgactgcatcataagtcaaggaacatctgcatttcctgcagggaccctgaaccatgttcctgtaacaccaaattattgtaattttttttttttaacatctgtcttctcttcgaggctgtgttctctggggctgaggactacttttctgttgtatcttagtaagctagcacagggttatgataggggctcttgcgaaaagaatgaaagaaaagatatatgaatattctcatcattccatgctcttctctatatatcctttagggtagtgaccatcaggattcctcagaaagactccatagtcacttgagatatgcagaatcagatcatgtgggtaatgtgggtattttgtttcagcacaaagacccctgtccagacagtctggcaaatatgataaacttttggctaaaccatctggagcatgagtccttcccaggaggagtatggtcaggaaaacagagccatgctttgctgctgacttatctgaaaaccagccttggagtagcaaaaagcgaaggggtggggtgaggctagggtcggagtgggatttggacagggcctttggcag

SEQ ID NO: 98066 - DNA, 15463 bp, Homo sapiens
tccatctttcagtccatgccacaccaagacggatggagccatggtttgtcccagggctgcacatggccttcctgtatcatccactgataggggctggtgtccctcaccagagagagggaaccacaagggaagttgaggctcagagagacagagtcgatactctttgtataactctcttctacctggaaattttcctgtgggtgagttttggaggattttggctttggtttgaatgaaactgttcccttacctcagggtttttcaagtgtagtctctagaccacttctattacaatcactgaaatgtttattaataatccagatagatgggccctaccatagacttcatgtgtcagaatccccgtggaagaggcccagaacaaactcaccaagagtttgactcctgtgcacactgaagatcaagaacgatgccctttcatttttcttctcagctgttcttttttctgcattcccactgcctgcattcttcttgggctagcagtagccatgagatcatgtacctgatattctggtcctgaacgcatgtcttcttgaacctttaagtttagaaggctttcaagacaaagggctcatggggcaggaaaaagagagctaaaattgagctgttcctactagctgtaaacacatgaacaaggtgcacaccttgaggcatcagtagtgtaacatgcacaagaagaaacaagcccttcccttaaggtgctcctgtccagtgggggtgacagacatgcaaacattctaaatacagtaaatgcgtatgtcacacttaccaggaaccaggctccaagcactttatgaattcatttaatccttacaataaccttatgagataggttctgcatggtagtagagggatgttcaggatgctgaggggcccagagaactgtgattctgcctgggctgatacagaaagtcttcatgaaggtgattaccagatgacccatgaaagatgagaaaaagtcaagtccaagaggcaaaggacagaggaatcacccaacacgtgtaaagcacagacatgtgagacaacacagtatgtttggaaaatgcagacagctggatgaggactggcatatgggtgcatgatgagtacaaagtggcaaaggatgtgcatgaagaggtaagcttgggccagttcattaaaaatccttttgccatatttaggagtttggactttcttctgaaagtaagggggagctttcaattagggatgatatgatcaagttttgcatttcacatgattcataatgaaagcaacatagaaaagaaattagaggggttgggctggaggtaggaagatagagtcctcttgggatgagagataggagaacctgaattagggtagaagcagtacgaatgaaaaaaaaagggtgggtttgaacgttgtataggaaatagaactgattagacttgataacagattcaatttggagaggagggagggcagagataagggtggtggcctgagtttctgactcatgggtgccacgaagagaggtgccatgcacagaaattcgaagctcaggaggaagaccatattataaaagggaaggtagaccaggcacggtggttcacgcctataatcccagcactttgggaggccaaggcaggtggatcacaaggtcaggagttcgagagcagcctggccaatatggtgaaacccagtctctactaaaaatacaaaaaaaaaaaaaaaatagccacgcatggtggcacatgcctgtaatcccagctactcgagaggctgagacaggagaattgcttgaacccgggaggtggaggttgcactccagcctgggcgacagagtgagactccatctaaaaaaaaaaaatgaagataacgacctctggtttttagtctggcctgtaacaagcttaggagtcctcactcctgtcctcacaaagaaaaatgctgaacaaactgaaagtcagcaactcttgttggatctatcagagaattgagggcacagggcaaactgctgcccctaaaactggagagacaaaaaggcagatacagagaatcacaacttaacagcagaagcccagaaacagaaacagaaacagaaacttctggggagccagtaccagggtaggaaaacttaaagtgtaattgactcatagctggaggcttagggtggacaaatttgagagctaaaaaatctatagtggccaggcatggtggctcatgcctgtaatcccagcactttgtgaggctgaggcacgcagatcactgagctcaagggttcgagaccagcttgggcaccatggcaaaaccccatctctacaaaaaagacaaaaagtagccgggtgtggtggcacatgcctgtaatgccagctacttgggaggctgaggtggatcacctgagcctggggaggttgaggctgcagtaagccgagatcacgacactgcactgcagcctgggcgacagtgagactgtctcaaaaaaaaaaaaaaaaaacaaaacatctaggggtcccattcttaggggggaccctaccctttttttggtttttgttttttattttttgtttcttgtttttgtttttcccaggctggaatgcagtggtgcaatcacagcttactgcagcctccaactcctgggctcaagcaatcctcctgcctcagcccaactagctaggactgcaggtgtgtaccaccatggctggctttttttttttttttcttttgagatggagtctcgctctgtcaccaggctggagtgcagtggtgcgatctcagctcactgcaacctccacctcacctctcaggttcaagtgattctcctgcctcagcctcctgagtagctgggattacaggcacgcgccaccatgcccagctaatttttgtatttttagtagagacgggtttcaccatgttggccaggatggtcttgatctcttgaccttgtgatccacccacctcagcctcccgaagtgctgggattacaggtgtgagctactgcgcccagtcacctggttaacttttagatttttttgtttgtttgttttgtttttgtacagacatggtctcactatgttgcccagactggtcttgaactcctagcctcaagcaatcctaggtgtgagccatggcacatggccacaagttttaccaggatcccacagtgaaaactggagaaccccctgccccgtgattctggcaaaggggaggaggaaagtagccactttgaaatacatccattgcattctgttctcactctgttgcccaggctggagtgcaattcattgcaaccaggctggattacagctcactgcaacctcaacctcctgggctcaggcaatctttccacatcagcctcctgagtaactggggctacaggtgtgcacatctatgcctggctagtttttcaattttttttgtagagacgggggtctcgccattttgcccaggttggtctcaaactcctgggctcaagcaatccacctgcctcggactcccaagaagtcagctacacagagatagcagctgaaaatgagtaattcagctgggcacggtggctcacgcctgtaatcctagcactttgggaggccaaggcatgtggatcgcttgaggtcaggagttcgagaccagcctgggcaacatggcaaaaccccatctctactaaaacaaaaattagccgggcgtggtggtgtacgacctgtagtaccacctacttgggaggctgaggcaccagaatcgcttgaacttgggagacacaggttgcagtgagctgatattgagccactgcattccagcctgagcaacaaagcaagacattgtctcaaaaaacaaaaaaaacccactgtaacagaaatgatgaatgtctgtgatgggctcatcaatagactggacatggccaaagaacatggtgcgcttgaagaaatgtcaacagaaatttccaaagctgaaatgcaatgagaaaaaaaaatgaaaaagaacagaatatccaagaattgtaggacaattatagaagctgtagcatacacataatcagaatggcagagaagaaaataaaggaacataagaaatgtggcaataatgactgagaatttcccccaaattaatgacagacacaaaacacagatccaggaagctcagagagcagcaagcaggataaatacaaaaaacaaaaaatgaagatagactgggctgggcaacacagagagacaccccttctctacaaaacatatttttctttttttttttttttgtagagtcagggtctcactgtattgcccaggctggtctcaaactcctggcctcaagtgatcctcccacttcagcctcccaaagttctgggattacaggcatgagccaccacacccaccaaaaaagattttttaaaaaattagccagggactgcgtgcagtggctcacgcctgcgatcccaacactttcggaagccgaggtgggaagatcgcttgagtccaggaattcgagaccagcctgggcaacaaagacttgtctctacaaaaaatagaaaaaaatgagccaggcatggtggtgcatgcctgtagccccagttactttggaggctgaggcaggaggatcacttaagcccaggaggcagaggttgcagtgagccaagatcactgcactccaccctgagcaacagagcgagactgtctccccacctcaaaaaaaaaaaaagagccgagcgcggtggctcacgccttgtaatcccagcactttgggaggccgaggcgagcggatcacgaggtcaggagatccagaccacggtgaaaccccgtctctactaaaaatacaaaaaagccgggcgcggtggtgggcgcctgtagtcccagctactcgggaggctgaggcaggagaatggcgtgaacccaggaggcggagcttgcagtgagctgagatcgcgccactgcacttcagcctgggcgacagagcgagactccgtctcaaaaaaaaaaaaaagtaaaacaacagaagttcatatctacataagaaagaaagaacattagagaaggaataaataaagggaaaaaggaagataactagaatttcacacatatccaatttggggtactttgggactgggtgtttcttgggcagtcgaatgtgcggatcagctgagactgatccggggcggagacaaggatgtgtgaaccattatctctgggaatggaagacatgggctaaagacggagcagtttcactaaatccttgtaaggtggtcaaggcaggcaactaatccagccaacaattaaggagtgtaagctgtgtgttaggttctgtgcttgctgatggaaatgagaggcaccaggaagcctgtggaagagacagtcaaggagagcagtcaattacattagggggctgacaagttcagtgcacaacagaatcctaaaacaagaaactaatttgtgtgtgtgtgtgagaccccgtctcactctatcactcaggctggagtgcagtcactgaagcctcaacctccctggctcaaacaatcctcccaactcagcctcctgagtagctgggactacaggcgtgccactacgcccggctagtttttttgattttcagtagagacaggttatcgccatgtgatccagtctggtctggaactcctgggctcaagcggatcgatcctcccctctcggcctctcagagtgctgggattacaggtgtgagtcaccgtgcccccagcctgtattctatttcttcttcttcctctttttttttttttttttttctttgagagagattctccctctgtcgcccaggctggaatgcagaggcaagatcgcggctcactgccacctcccgtctactgggttcaagcgattctcctgcctcggcctcccgagtagctgggattacaggcgcctgccaccacgcccagctaatttttgtacttttagcagagaaggggtttcaccatgtcgcccaggcttgtctggagctcctgggctcaagtgaccctcctgcctcggcctctcaaagcgctgggattagacacaagccaccacgcccagcctgtattttattttttaagggcgggcgccctcttctgttttataaaaggaacagtcgaattcctactggaagcgacgcgcgcagaggggaaggctttgtagacgccggctcgggtctggaatttaaagaactaaatttcgatgggtgaagacagtgggaaagggcggtggcatgatcctcgttttacagactaggaagtcgagcctcasgggagtgacggggcttctccgcaggctccgcgaagaaagcaaggctgggaggacccagacgaacggccacaacagcctcagcggccacgacagcctcagccgccaactcatgtcagccggcagagagtgcaggaagcgggcagctacagctccgctggggcgtggccttctgacgcaccgtcacggttccctctgtggccgcccattggctccctcttaccgcccttttccggggcaagggaagctagtagcggagccggaagtgaggcaccctckggctcgagacagcggcgacgtttaaagctgagcgacccagtgccactggagacggtcagcttctccactcaggctcctccagcccgagccagaagaccccctcccccagaattctgggggccgatggaagggagccgagtcagatcgcgaggtacccagagccgacagaccggagcgacagggagttgccagaagccccgcccctaggagtgatcggaaagcctcacccatccgggtgaggaacccggagggaccgcctccgggcggagcccgccgaccatggctacgcccctggtggcgggtcccgcagctctacgcttcgccgccgcggctagctggcaggttgtgcgcggacgctgcgtggaacattttccgcgagtactggagtttctgcgatctctgcgcgctgttgcccctggcttggttcgctaccggcaccacgaacgcctttgtatgggcctaaaggccaaggtattggagcaagtaggmcctggaaggggaaagaaagaaaggggcgggatgcgagcayctgacaagggcccacagcttggggatgagactagttggaaaaggtcagcttgccccgaagtggggattctgaattcagtaccgtacaggtggtggtggagctgatcctgcagggccggccttgggcccaagtcctgaaagccctgaatcaccactttccagaatctggacctatagtgcgggatcccaaggctgtgagtaatccccggaacaagccctgaccccagttacacttggtrcagcaaagttgctcctcctgtctactggatgttggtgctaacttctctgtcttctgtatcctcaacagacaaagcaggatctgaggaagattttggaggcacaggaaactttttaccagcaggtgaagcagctgtcagaggctcctgtggatttggcctcgaagctgcaggtgagactggtttgaaggctattatgtggctattttctctaacccwtttttttttttttttgaggaatcttgctctgtcgcccaggctggagtgcagtggcacaatctcggctcactgcaacctctgcctcccgggttcaagcgattctcctgcctcagcctcccgagtagctgggattacaaatgcccagctaatttttgtattttagtagagatggggtttcaccatgttggccaggctggtctcgaactcctgacctcaagtgatccgcccacctcggcctcccaaatggccaggattacaggcgtgagccaccgtgcctggccactaacccacttttgacctaatctcccctgctgtaggaacttgaacaagagtatggggaaccctttctggctgccatggaaaagctgctttttgagtacttgtgtcagctggagaaagcactgcctacaccgcaggcacagcaggtttcgctggggcaaaacatgtaagggcagagtgtggggtggctgtttcaaggattgtggtcttcatacctctgtccctgcccacagcttcaggatgtgctgagttggatgcagcctggagtctctatcacctcttctcttgcctggagacaatatggtgtggacatggggtggctgcttccaggtactaggaatttggaggtgtagtgtttagcctgagaccttttgaggcagtccactggaatagttccatgggctccgggcataagaaaccagttattctgttaytatctgttctctttataaggggcctcattttctttttcagagtgctctgttactgactcagtgaacctggctgagcccatggaacagaatcctcctcagcaacaaagactagcactccacaatcccctgccaaaagccaagcctgrcacacatcttyctcagggaccatcttcaaggacgcacccagaacctctagctggccgacacttcaatctggcccctctaggccgacgaagagttcagtcccaatgggcctccactaggggaggccataaggagcgccccacagtcatgctgtttccctttaggaatctcggctcaccaacccaggtcatatctaagcctgagagcaaggaagaacatgcgatatacacagcagacctagccatgggcacaagagcagcctccactgggaagtctaagagtccatgccagaccctggggggaagggctctgaaggagaacccagttgacttgcctgccacagagcaaaaggagtgagtggaacagagttgcttcttactaggagcacattctttgcctgccttcccttcatcctatcctctttgcttgctctcacctcaggaattgcttggattgctacatggaccccctgagactatcattattacctcctagggccaggaagccaggtaggtagtctgagtcaggattggatcaacagcctcctctcttggggactctcaagagcctgtgttcatctagaagtagtagtttgattctggtttccctcctacagtgtgtcctccrtctctgtgcagctccgtcattaccataggggacttggttttagactctgatgaggaagaaaatggccagggggaaggaaaggtgagtgggaaggagcagaaagctgggaaaggggatgggtagaacaagactgagaaatccacatgcttcagaattcagagggttcagggaatggtttcggatagtaggctctccctgctcccttctctacaggaatctctggaaaactatcagaagacaaagtttgacaccttgatacccactctctgtgaatacctacccccttctggccacggtgccatacctgtttcttcctgtgactgtagagacagttctagacctttgtgatagaactaaaatgctctctgtactctagtctcctgcctcctcagctctgcaagtagtttagtaggaatgaagtggaagtccaggcttggattgcctaactacactgctaaaaatatttgtaatccttaataattaaactttggatttgttaaaatactgccttgatgtgaaggaggggaattaaggtttccataaggtcagcataagtcattccttagaaacagaactggcccttccaaactgaaaggatccctttgcctttttttacttcccttgctaagtgttgttcagctgtgcctaaaagggttagcagggttgaaagcctggaagagaaatgtcctttggtattctggaaatatgtgtcctcaggccagaatatactttgtaaattctcatgctgccagattatctgggtgtggtggcactagaatggagatacttcatgggaataatactcattgttcttgaccccactgggtcagtgctgaccctaccaccacccactctgcagcagcacccagatgctagccttgtacagaaagccccagcatctctttacagtcaatgagctctctctttattgaggtatttcaaatatacaaacacttcagagctttttagatatgtgaaggtccaatttagtgaagcggattaacaaaacatgattctaaaagcctgcctcctctagaccaaggccatgtaaaagatttatgtaccaatcagcatcttttccttttaataatcttcaggatgttgtgttgggtccccagattcccatttgattttcttgcatcattttctcagactgtttgcttccttgcttcctccccagtgagtgccttgggcattttgtgtgtgcagatagagaagtacagagttactgcaggagccctcaggagtgagacaacaggaaatgacaaagtaatacagagctgcagtagctgggatgggtgaggaccccacttgggatgccccatggtagagtactggtgccttgggagggtagaactgctcaggtctagcacgcctcactgaagattggattcacctgctgggtgactcggatgaaggtagttctcctgctcaactctttgagcttagctgctcccacataggtacacgtagagcggatccctcctaggatgtctcggatggtatgttccacatctcctttaaaaggaacttccactgtctttccctctgaggctcttaaagtaggaaaaactttattatcttctccttctggattccttaagcccagggacttttccacagaccctagcattgagccccggttcaccatgcttctctgagaactgtaccatccccctctcagcagccatgagttctgcctccatactattactaagctcctgggcctccacacatacctgtactcagccacgcccccagcatacttcttcatggccatttcagaactcattccatagaagagcttgtacttcttgccatccctctcgatgagctcaccacctgactcactgtgcccagccagcatgccacccagcatcacgaagtcagctcctgcccctgccaccatcatggaggggggaaagagattaatctggccaaggtgctcacatggccaccctcaaaagcaactcacaccatattctcagtcctgacaatgattccagcgtcttcctccttctgcttccctagctgacccacaatccacgcaggcctgatctgccctggcctctattcctcagtgggtatgatttccccaagatttaaaaaagagcctctggagagtccctgcctggcttttgctttctccttttgctgtttttaccatcatcgtctggtcatttgattttactgtgcccagctaaataagactcatttcatgtgtcccaagagcaaagatccccaactttaatgggagtaatgatctcctgggaagctgtgcaaaatgaaaaatgcagatgtgctgtcccattcctcagagcctatttttaggtatggctggggctcaggagtctgcactgtgcagcaatctaggagatggtcagatggccctggcccacacttggagtctcagatgtcccctgctggctgccccagatgataccatagacttcggagtcactaattcatattatgaaagaatctgaatgacttcctgagcctctcttagcctgaccctagaccctcagaggtgattcatcctcttgtatagaatcatccttctgtgccctcaagctccttaccaaaagccttggccacatccccaggacagctgcaacctccatcctgcaaagtaaggagcactatgaatacaacatggatttcccaagccctcagcgatgtcccaacagcccaactcaaagccaacaagaacccaggaattctaatccatctctgccacctccataccctgcagaaaccccgctcataccctaccctgcccttgagccttactgaaatgatgtggcctttgaggccatgagcagcatctgcacactccatcactgcgctgagctgtggataccccactccagttttcttccgagtagtacacacagagcctaggaagaacatgataagggtaagaatgacgtgctccacaggtgtttgccactgaaggggggtagccagtggccccaatgaaccagcttacctggcccaattcccactttgatgatgtcagccccagaaaggatgagctcttctaccatctctcctgttaccacattccctgcctgagacagagcaattgaaatacagcatccttagggccagaaacaggaggtcatgtattgttacggtatgcatggaccatgactttccaacattattacaaagaaaggataactaggtcccctctactgggccctctgagggcttttacactagccactttagagaaccctgctccctacccatccacccaacaccaagccaaggtaggagtgagtggccaatgtcaccactgaacctagggtaaagccgaggtccatgatgcacttttctaaggcaacaaggtgctatgatcaacagggacacatgaagtggcatggaggagcattcagtgaggcaaagggaactactggaccaggctcacatctgatttacagtagatttagctccccttcctcaagagacccaaacatattctgtccttaagccattctgtcatagaacctgtctggcttcagggaaagggagaaggcatggtagtataggctaaagacccatttgaccagttgattggcttttgatgatcagtagacacacccctcaatgctgcgaagaaaatgaaggccactcttctaaggttgtaaaaagataaatcattattcatgtgacccctttttatgtgactagtatgtgtccatttcagtgggcagatgtctatgtaccacaggtatgtacagtgcacagatgttccatcatggtttggtgagtgacatcagggacatcagatttacaaagactatgaaccaagggtcagagatactacactgaccaaatagacattttcagcttagaactatggataatcatccagtatcatgattaaatgaactaggaatatcataatgcagcagaggagaaatggactgatgtagcaaaacggagtggcaggaaagtggaaagataaaaaggtaccgactgtaatagaaacataccatgatggtgtgctgggggaagcgcttccgtacatcttttacaaattcaacaaagtgttcagagtagccatttgccacatccaggcatatatacttcacctggggaatagcttccaggatctgttccagctgctcaaagtcagaagagcctgtgcctgagctggcagccagatgctgtgggagaaacagagtcattggcatatcagagatgatctggtgggcagccagtgggtcattggtgagtgctggtccccagaaagccaaaatataattgctggaaaactgggataaggaagggagcagggtatgcccagtgttacctcaagacagtcaggattctggccagcaaactcttgccactgaacgaggctatagtgcttatggacagcagtgaagagagagaactggggagaagacaaagaagcatcaaaagggagaaaactttattaaggtctcttttctagaaacagacctattctatctgagggaggacatgattgaagttggggaggaaacaagtcaaagaactcaggttgagctgggatttgagttcaacctttcttctctctacaaatactagtagggctttttaccataagctagtacttgtcagatttcccaccaaagtactgagtgatctgggttggatttcatctgccagcacattcactgcttctgacttaaaaggtgacaagctgctggtgcagtgggacaggcagcagacatgaaagaaccatgaagaagctggatggagcctgtgtttctctgcactgactcagcccctcctcctaaggtaacctagtactaaactatttttggttatgttctcgttcatttaccagcagtaattcagtagatctggatgctcaccaaaggtaatgccttaaggttgataagagctgataaggggctaccctaccctgtctccatctctagtggaaaaaaggacaaatttcctagttggggacatggatcaagctaaaaaatctgtttcattcagtccattttaataaagttcaaggacataatgactcatcaaactcatattctctagctcaacagattgcaaacaatatcccaatactttgaggaaggcattcaaaggccattgtgtatgctggtgtttgtgccttacatgtctacatgcaaacagacaagagacagcagttggctgaaacagcacaaatcttgcaactaacaagaaacccaaggaagtcatgtattagctagcaacaagtgctctacatacgtactcagagatcaacaatatctagctaaagctggtattgaattctgctttctcaacaactctatcatcaacatactgataagcaaagaaaagtcaccataggataggaagtcagcagatgttggagatatactggcagagtgtggcatgatgagcacatcagattacataccaaacttagaaaaagatgtttgcttgcatccaacctttttattacagtaagacttggctcttatctctaaaacctgatttctttacctctcgtcagcaatactgaaagccaggctccacataaagcatcaagacagtccccaaaaaggttcatgtattacagcacgcctgttaactctgcagtcagagtcaccaattctgaactctactggtcagggcagatggacagtgggcaacagaaagattcctaagcagttactgaatggcaataaaaataaagtaaaaataaaactgcataactatcaaccttaaagaaatgacaagacattccacaaagacacagcaatcaaaaatagaaaaaggatatgaagtccttaagactaatggagccacaaacaatagcagaattcatcaaccagggctacatggatcaaccagcagagtgcatatgttctcaaagtgcccagataactctctaccttctcagcaacaagtatagaggcaggtaatagtactgacaggagcagcatcttccatttcaaagtgaacaacttgtatataagaaaaacacatcccatttggggcacatcccagaaactcccaggaacctaggacttaaagaagaggaagattaaaaaaagaatggcagaagtattcttttattaatgaattgttcttattaaagaaaattaataagctgcttctcctaggatcttctagttaggatttttgaatgcttaaactgtagtttctggactaaaacagtgaatgcttaatgtggacaatcgcataactgaagggatgcatgtgactgtgagggggtgacctgggtggtgggaaaagttggcaaggtgtacaaactgctaaacaggacaaaagggaaaattctgttcatatatcagaaatatcggagcagaacttagctttgaatctcactaattcagatggccttttgaacttatcagataaagggcttcagtagtggaaaaaaccgtaaatcagagcatcctgactgctaactgccagagaactgactgggcatgggggtggggatgcaaacacctctgcagtcagctgggct

SEQ ID NO: 98067 - DNA, 16201 bp, Homo sapiens
ggttcctgttcctggcccagctgggcctagctcctgtttggggaagtcaggctctgagaacagaaaaatctggcttgttcctacccgctgcctctggcaaagcactcggcccagcagcctgggccactttgagtgatctctaacaggaaaagccaccagaccatgcctgctgtgcccttcctggctgaacacgcagccagctggagtgcctggcaacacagcagctcatggccttggggccccagcttctatgacagtgcagcacagacaaaggcactagtcttcagagatcaggctggcaggggagaatccattcagggcaggagaaacaagaaacagtggtgagatttaccaaaaactgtttattgcgacttccactggaagctgttaataagccacatggcagccaagagccaggtgtgacctagatcagctggatgcaagtgcctgtcccttcatccacacaacctgctgctcggggaccctgctaggatgcgcttgctggcaaactggctaaaacccaacagggagaaatgatgctactgctcatcatttccacctccccacatcccatgtccaagacaatacaggaaaatgccacaagtacccctccaaaataaacccgcctgcgtctgtctgtcctactgaggagccaggagtgtcctacggctctgcagcaaaccagagacccagcaccagcgaggcaccagtcccttgctcgctgttccagtgacctcccctgcagagaccccagcctcaccggtgtactcagtcagctccacaatgcaggaaaagtgggaagccacactcaaggaagcgcagggtttctgattggagctgtagttggtcccaggggacctggcagagccccaacagctgtagccctcatcaactcttctggaagacacggtgcaggctttgggccaggatgtctgtctcctcgtagccttcacagctttgctgccagctctctggcacctgatccatcccatagtaggcaccagcaatggccccagccatggtggcaatggtgtctgtgtccccaccaagtgagatggaataaatgagagtcctttggaggctattgaaggcagaagggatctcagggtctggctccatgcagcgtaggaagcagtagatggcggtgggtaccgactcaaaggcagcaatgccattccctgtggggaagccaggttagaggggctgcatgcttccccaggcctcctaccatttgacacaagtcagcactctcggcttcaagcaggctgtgactaagatctcaggctctacagttagaccacctgggctcaaatcctggctccaccacacactggctgcgtgactgggagagttacctaggggaccgctaagcttcctgctcccagattcaactccttaagcagacagggagtaacgttagcaactctctgacagggctgttgtgaggatgaagcgagatcgtgtctgtgaagcattctgcacaacgcccagtatagatgctagacaaataaaatccattatcaacatttttacgactagtggccagctgccatttctggggacactggtccacaaggctgagggtgctgtagcttcagagcaagaagcgctgagctcaaccctgccattgactccgtgtcacagcagcccagggtacaatgcgacggcaggcatgactccatgctcccctgagcccaagaccgaccctgaaggacgacagagggagagacaatcccaggcagacccactcacctagctcagacaccacttcctccctggtcaccgatgcctggtctagaagctctccaatcttcttcaggcggctggagtatggacgctcctccatgcccaacctgtggtttaggggagatttcagggaggtcagagctagcagggtggtggcgcgggcaggggagagggctgcatgtgagaacgagcagggatgtggtcaggctggcagccaggcacaggtgccgacaagaggtgggagagggctggggtgagcaggtcgtttcgttctctgggaccctgagagccttgaaacatagacaagataaaggggcttctgcccatgcctccctagggtctgcaattgaggaaggtttacagtttgcggcaatgccagaggccccctggatcacccacatacccacaccacacacctccagccccatactcactccctggcatccaagacggactgggcatcaccctccagatcctccatgtggcccaggagttgcttgagaaagtgctcgctggaagactcgccctgcaaggccaggtgcacagccagggcctgcaggatggcgccattgtaacccagggaggaggcgtgtgtcagctgggccgagagccgggcaaactagggaggaggagacctgctgtcacagaagccctgctgcagaagaggaaggggacagcccagaagccagcccgccctgaataccttctgcacatcctggacactgctataggccagggagatgccagccacccgcatggcacctccattgccataggagcctttcccgttaaactgggcccgggcaggctcaaagacatcgcgacatttggggttcaggagcttcttgaagacagtgactactccagcaccatagcccctgtcagggtctttcttgtactcctgagcaaatctagggaacagaaggggagacagaattcagatttacaagatgcctctaagggttgggagagaagaaatcgaggctagtttggaaaaagagaaagcctcgggggcctaaggagcctgcaccagcagtgctgctgttttagcttgggaagctgtgccagcctgacacaggcttctgtggagggttgggggcgtggacatgcacaaatgtcattcctctggtcaaggggtgcaataactttcccacctggtttgcctcagcccaggaccatccccctcacctgtgagccatgtccacctcgtcaaaggcctccttggctagcagggactgcaccagggccctggccatggctgtgtcatctgtgtagtacaaggcttctgtggggagaggagggaggatgagagcctcctgctcacctttgttttttttgttgttgttttttgctttttttggagacagagtctcgctctgttgcccagactggagtgcactggtgcaatcatggctcactgcagtcttgaactcctgggctcaagctatccttctgcctcagcctctcaagtagctgggactataggcatgcatcatcacacccagctacttttatttttttgtagagacagggtctcactctgttgtccagactggtcttgaattcctgggctcaagcaatcctcctgccttggcctcccaaagagctgggattataggcctgagccactgtgcctggccctgctcaccttttattttagtttatattattatttttttggtacagggtctcactctgttgcctaagctgcagtgcagtggtacgaccatggctcactccatctcgacctcccaggctcaaggagcctcttgccccagcctcccgagtagctgggactacaggtgcacaccactgcgcctggcttttttttttttttttttttttttttgtagagatggagtttcatcctgttgccaggctggtctcaaactcttgggctcaagtggactctcccaaagcgctgggattacagttgtggctacggcacccagcctctactcatgtttcagagttaccacatctaaaatgacctcaaatcagtttctcactcccattcactttcgtgggcctgggaagccttaggatctcagcaatgggattttcagcaattctttattccaagtcagtcctgctgctttctattttatgtatttatttattatgagcctacatcatggtttgatcttctgatttctgaaagaaaacttccatccccttgtggctgccatccttgcagctccagtctttttgtttttgttttgtttttcttttttatagacaggatcttgccatgttgcccaggctagtctcgaactcctggacttaagcgatgatccttccacctcagtctctggagtagctgggattataggtgtgcgccaccatacccagattgaaaatgatagtttctggatccagatctcctcctacttcacttctctggagcacaccaccagtgatcagtgtcttcattttgaaattcttttcctaggtttcgttgatagccactcctgcttctcctcctatcaaactgtttccttccctaatccccttccctccctccctccctcttaattaccggtgttctccagggttctgaccatggccctttcttcttactatgctacctgctctccaagaagattcacctcctctgcttgacctcacacctgctacctgagccgggatctgagcccacaagggaagggaagttagttttacaggcgagacagcgcatgcaaacgcctggcctagaggaatcatggtgtgaggaaccgaagagcagaaagcaaggccaaggctggcggaaaacgaaactgcagacgtgtgggagggccggaccacgtcggacacgttaaggaatgtggctctgtactaagggtaatgggaaatcacagcagggttttaggcaggggaggacgcgattagagtcaggcttccaaagcacgccttgcggggtggagaacgggctggtggtatactgactctagagaaccgggaaaaagaggtcaagtcggcaagggtggacagacagtccccgacttaggatggttcaacttaagtttttttcggctttctgataacgctgatacgcattcataggctcctcgacgtccgatggggctgcgtccagataaaacggtcgtctaagctgaaagcgcactttccacttcaggtattttcaacttacgatgggtttatccacaccctgcacggttgaggccccggtgctgccacgccccgagcacgggatgttcggggcgagacgtctataaggccggagatcgcactggcactcgctgagctcaagctgtctgcgggtcatccggctctggccccggtgccctcggcagcctcatccccgcgcacccccgacccgtcgcccccggaggctccgcgccccttcggcctccctcccgcacggcctctgacttgcgcccggccccgcccacctgtccgctcactcccgggcgtgccggggtccggctccagactctggacatgacgcaggactgacgtcaggtcgacggtgtcgtgggcctcgtagaaggagcccacgcagtccccgagcagcgcgccagccaggcagcctcggaagcgcgagagggagcgggccgcgccagcccctccacctgccgctgccgccatcgccgctgcggccatccgcgcgcagactgctcgccacttccggtgccgccctcacagtttccctacttccgtccgcagcgctccctggggcctagagtttccactccgccgccaggcccacagcgccgcccagcggcccggagtcgcggcgccgcgcacttcccgccagcctgtgctttgagtctcggttttccgctcctcaccactgggctaactgggtgggaaggccactatggggtctccgggggatgggcactgagccagaccattggatcactgcagcccacactgccttccgcaggcgagcaaccctaactccgcacccccagccggccctccccaccgaggccgggaccacccccaagccctcccaccgggcccttgccccctgtgggcctcccttaagcatcaggagggcggaccaggggccaactgggacacagccaggtagaggccgcgctgctgcagcccaggagtgctgacccagcccagagaggggtgccctgaggggagggaaagaactggatttggtacatggagttcggaggaatagtgttccccatctttgctcctccatagacaggagggtgttcaagaaccctctccctgctggctacatacagtggggcagagaacagccggcctgagatcctctgcatttattccattcatttctctcctccckccttccattgcccacccaaccctgccctcctcctgcagtcctccaaggctaggccagctccagctggcagcttttgagtggactcagggtgctatttgtggtacgtgtgaaggtgtccacctcaggcacgaacctctcagcaggcacggtcagcttgcgccgygtgtccatgcacttggtgtccagcagcatggagttggccttgcaggcaatgtcagcctgcagccgggccaggtgcttgcacagggcgtccagtgcgtccctagggaaggacattgacaaccccccagcccccatgaggctgggaggcctgggctgcktgcatagccttcagtcaggaagacagccccagggagccagcagccagcaagaggccccatttgtgggcagcgtctcactgctccttccgcccactcccgagacctactgtgcttgcgccagcttctgcttcagggcagcgatggttgcctctagctggtgaacctcgtcggtgaggccgtactgtgcctggaggcagaggggttgggagttccaagtcagccacactgtcctttacctgagtgctgccccttgacagcagtgcccttgctccatcaggaatatgagaaaaccttggctagggggcccgtgcgccactgggacaccctctcacctggtcccggcagagttccacgttgggccggtaggttctggcctctagccgggtatgggacagcttcaggctcaggagctttgtgcgcagatcctcctccaggtgccggatgtcctcctgcagctcagcgatctcctccaaggtctgcaggggacagagtgactggtttccacctgctggactcacgtgcatgcctggtccagtgcctcctggcgggggcatgcggcttctcatcccacagcaggaagtccaggcccctggagatgctcacattcttctcttgccacttgagctcactgtacactttctccatctcccgcagccgcttcctgaaggcaaattccgttgcaactctctgggcttcaagctcgttgttggtctgaaggagaaaacacagggcaaggggagggtctacactcagggctgcctgaggatattactcaagcgaggggcagggggccacatgcacagcagggaacagaagataagggctgagcgcacactgggaccatccattagctgtgggtggcctgtcacctcagcaatagttagagcagkggcctccctcagctctgtggctgccttcatctcagcctccgctcggtccttgttgaaccgactgaagtcatcccactgctggagtgtggtggagctgcaggtggcagggaaaatgggggtcatgagggtgtggcctgggaggggaggagaagagactggctgaaacactcttcttaccyatcaggtacacgtgtggggtcaaccttcagcgagatgtttggggatctgaggttgagagagagacagcctctgtcgatctctagtgtctccattttgccccgatggtcggagttgagctgctgttggacttcctgcaagaggctggggaaagcgcagactccatcaggaccatcccccaagggccagaggcaggcctcactgtactaaagggacaccacaggaagaggaggctggggtgacccttcccagcagaagacaatggagcttcagccactgagaccaagagcagcacagctggatgaaaatgctgcccccacatgccctacacaccgtaggataaaaatgctgcccccacgtgccctacacacccgcaggatgaaaatcggatgaaaatgctgaccccacgcgtcctacacacccgcaggatgaaaatcgagtggaaatgctgacccccatgagccctatacacctgcggggcacacggatgtagctgcgctcacaaaggctcatacacacacactcacaggagctactcaggggtggtggcaaaygggtgtcacctctcatgcttccaatcagtggataccggctgcccagggcagggtcgtgagaagtattctgagcccatgtccaggcagtgggaagagtgctacaattgattagtggtttctgtcacaggcaccagagggccaaaatgtagcacgagagccagttgctcctcatccacaatacctgtgttccacattgaaggcacacagcctccaggggcccatgaacatgcggacgacctgcctctcccttaccagagctgctcgaaggcctggctgaccttctgttgcaaggccttcttggtggcctcgatgacctccacctctttatgcagctcatcctccacagggtccttcaccacatcaatgtctcgccggctttcccgcagggtcaggcactcartggccacatccagaggcaggttcttggcctgcaggttttgctctgctgactccttcatctagaaaagagggcgcggccgggcacggtggctcacatctgtaatcccagcacttcgggaggccgagttggatggaacacttgaggtcaggagttcgagaacagcctggccaaaatggtgaaaccccgtctctactaaaaatacaaaaattagctgggagtgatggcgcacgcctgtagtcccagctactttactcaggaggctgaggcaggagaatcgcttgagcccaggaggcggaggttgcagtgagccacgatcacaccactgcactccagcctgggcaacagatccagatgctgtctcaaaaaaaaaaaaaaaaaaaaaaaaagaaaagaaagaaagaaaaaaaaagaaaagaaaagagtgggcgggggtgctggtggggccatccatggggaagtagcgcttgtccccactttagcagggggccagtgactcggatggacatgccactcatgaccccccatcaagggcttctcaacctagctgtggggaaggaggggaggtttyggcagcagcccccgggcacccagtcctggatccctgcctgtgtcagggcatcgatctcggcatctaaatctgtcagacacttgtccagcatctccttccaccggttgacagtatcaatcctctccaccagtcgagtcctgttgtcatgttcatcccaaatggtctgagagagacagagccagatagagagggtgtcaaggggttgggsgctatccctttgcccacccagctgagttcccatccccaacctggttgttggtctcgttgcrgagcacccgggcctcctggcggatctgatgggaagcatctcgctgcagctgggcattggtggatagcaggtagctgttagtgtgccagtcgggcagctggaagcgccgacttggcttgacgctcagcgtggccatggcacagaaaccagaagggtcagaaacccctaggcctgttcacagacaccacctgcagagggaaaacactgctgcgggagacctttccggagacctcytggatcacacgccccctgcgcaggacttgttcctgtccattttgctctgagccctgtcctgctggaagcctgcttggagacagcccttgctttactcaactttgtgtgaggtattaactaagtttccctccctcccgtccccaggcggacacaaacccctggaccttgcaggtcctggagsaggtaaaaaggaataatggagtcccggaagcctcgaagtgtgtgtgaagtgccaaatgcctggggggtaggcggatggcagaaaaaaattgcccttaatgcattttccacacctgcccccagccaaccatgccttgttgatcttcctttcctttcttccccaggctgcgggccagtccccgtgggggatctaagggcaggagccctgttctgtctccagggacgcgtgcctgttggcactggggagctggggggcggcccccggggcggccccctccccgtctggtagccgccacgccctcccgcccctccgccctcgcctactgttggaggggaaggccggacagggagagccccgtgggaagagctggggtcagtccggttccccgtcaaacccctttcttcccctccgcaggatgatcgcctttggtttagatcagtaccccggtccagcgcggaggaagggggcgcccccgcttccctagctcccttacctcctttcccgcttcgctctccgcgccccccgctctgagctccagtgtttggcaccaccggttgctaggcaaccacccctcccctacccccccaaccccccgcggccaacgcggcctgggcgcttcgcttggcaaccgcggcggcgtcgggcggcgtccccggaggcctttagggtaggcgaggggcggccggccgagcctgggagaggtggggggcatcagggcagcgctttcacttgatttacaaattaaatgaacatttgttgtcttttcagacaggatctcgctctgtcgcccaggctggagtgctgtggctcagtctcggctcactgcagcctgaacctccccgactgaagcgattctcccacttcagcctcccgagttagctgggaccacaggcgcgtgccaccacacctggctaaattaaaaaaaaaatttttagtagagacagggtttcaccattttgcccgggctggtctcaaactcctggcctcaggcgatccacccatcacaacctcccaaaatgctgggattacagatgtgagtcactgccccggcctaaacaattttattttgataaaggtatgcatagacatgatagaaaatacgaaaccaagtgcagtggctcacgcttgtaatcccagctactccagagacccaggcgggaggagcgcttgaggctaggatttcgaggtcagcctcagaaacatagtagttgccagcaaacgaacagtacatagaaaaagtaggctgggcgcagcgactcaggcctgagatcccagcactctgggaggccgagaccaggtggatcacttgagtccaggagttggagaccagcctgggcaacatggcgaaaccccatctctacaaaaaatacaaaatttggccaggcaaggtggctcacgcctgtaataccaacactttgggaggctgaggcaggtggatcacctgaggtcaagagttggagaccagcctggccaacgtggtaaaacgctgtttctactaaaaacacaaaaattagccaggtgtggtggcaggtgcctgtaatcccagctacttgggaggctaaggcaggagaatcacttgagcctggaggcagaggttgcagtgagctgaggtggtgccactgcactccagcctgggtgacagagtgagactccatctcaaaaaatagattaattaattaaaattaaaatcaggtgcactccccagcaggtcccctccagcaatggatggatagttaatgttgtttacaacatttcttctattctgtcttgcccaacaactttgcccatcttgaaggtcatacaaggaatgataaagggatgataatcatgtttggagagggcacaaccctgagagaggtaactggggtatgagaagcaatgctctggtggcacacgcctataatcccagctactcgggaggctgaggcaggagaattacttgaccctgggaggcggaggttgcagtgagctgataacacgcctctgaactccagcctggggaacagaacgagactctgtctcaaaaaacaaaatgaaacaaaacaaaacacaaaaaaaccagagaagcaatgctcaatattcaaccatttctttaaaaaaagaagggaaaaaaaatcatgtttgtcttattgtctagtactgtattgtctggtattgcctagtatttctaggggttggaaaaatattaacatttaatcttcacaactaataggtgaggtgggcattgtccccactttcttaggtaacaaaagagacacactgctaaaaagcagggagggaaacccaggtgttctggccccacccagaggacactctgctgtgctccacactgcctctcatggggggctgggatagagaggaagacaggtgtgcaggcctggtcctgttctgaggactctgctgaaccggatcctatgaggtgggtactgttaccatcttcactttataggcagggagactgaggcataggccagtgaggacgtgcccaggtcacatcactaacaagtggtacagcctggattgaaacccaggcagttgggcccagggggaaagaagtcccagaagggtccttcagttgtaaaacgtcactggggggatgggaagaacagtagagaagcaagggcttggtaggcaattgggggatgaggttggcttttgagcagtttttgagcagtttgaggtgtacacagtggatccagctgctgcctagcaggcattggggttgtttttttttgttttgttttatttggttttttttttttgacagagtcttactctgttgcccaggctggagtgcagtggcatgatcttggctcactgcaacctctccttcccgggttcaagtgattctcctgcctcagcctcccgaataactgggactacaggcatgcgccaccacacctggctaatttttatatttttagtagagacggggtttcaccatgttggccaggctggtctcaaactcaaactcaggtgatctgcccagcttggcctcccaaagtactgggattacaggcgtgagccaccatgcccggcctgacttgttaattgcaagtctgtcgttcagcaggactgaagccagaacactaattcccaaactcccttcattacagagtatttttttccacaggttattttgtaaactctaatatatgacttgtaaactggacatgaacaagaatttgtgatatagcctctttaccaggattgaagaagatagaaagaaaaaaatcttggacaaattaattgcaggaagaaatgatcaaattttggcttacatattttgcaacagtggtataacacaaagaagtaagcaaatatggcagaagtgtggtggctttggcgtctacttttgaccatagtggtggccctgttattcgtggctcccggggttcctacacatccttcccgatggaagaaggggttggccaaaaaggtcagccagctgatgggttggaccaagaaagacagagtgataagaatgagtgacaccatgttctatcattttgtattagatgcaccaaaaaactattctgttattgtgatgcttactgctgctctccacgcgttcagttcatgtgtcatgtgcaaaggtgctgctgaagaatttcagatcttggcaaattcctatcaacgccctggtgcattcaccacaaaggtattttttgcaatggtggattatgatgaaagccctgaggtctttgaagcgctccaggtaacgtcagttccgagtttcttccacttttctgcccaatggaaatttacaacagatgacatttataatttgagaggaagggatattgttgctgaccaaatggctgaatgggtagcagaaagaacacatgtcagcgtcagaatcagacagcctacaaataaattatcatggtctcctcaagccagggatacttctggctctcattggtggacttgggtatttcttgaaatggaataggaaatctatttcttgcagaattttgtgcgaagttttaactctgtgctttgtgattgtgatgacgtctggtcaaatgtggacttatataagaggagaaccatatgtccaaagggaccctcacacaggacataaacattatatcagtaaatttagtcaggctcagtttgcagcagaaacattcattatttccctgtttaatatgtgtgttagcctgggaatggtgctgttagacaaggctgccacctctacgatgaacatcagaaagagaaagatgatgtgtctggctggtatgtgtcttgttgccatattcttcagtcggctgctttccctctttagatttaaagtacctgactatccatacagctttgtctgggattaaaaaggatcctacagacatagacaatgaagcaagaaatttgaaaaaaaaaatgtgaagcagaaaaatgcaaactcatagctttttaaagtaattgagatttcaccaaaagagaccataagtgctttaagtgctttcaaaatctgtcaagtattatggtatgtatcttctctgttcttaatttttctccccgagtgttatagattacctcaagtccaattattaaaatctttagagagtacaactttcatcgaatcagaacaatgttttacaatgtttaaaagtaccttagttaatattaatatttggtcagctgatcttattctaatatgaaaaataatcttttttcttttctttttttttttttttttttttgagatggagtctcactctattgcccaggctggagtgcagtggtgcaatcttggctcactgcaagctccgcctcctgggttcacgccattctcctgcctcagcctcccaaaaagcggggactacaggcgcctgccaccaggcctggataatttttttgtatttttagtagaaatggggtttcaccatgttagccaggatggtcttgatctcctgacctcatgatccgcccacctcggcctcccaaagtgctgggattacaggcgtgagccactgcgcccagccaaaaaataatcttttttctttttcttttgaggcaaggtctccctctgttgctcagactggagatcagtgacacaatctcagctcactgcaacctccgcctcctgggttcaagcgattctcctgcctcagcctcttgagtagccgggactacaggcgtgtgccactacgcccggctacctttttgtatttttagtaaggacggggttttgccatgttggccaggctggtcttgaactcctgatctcaagtgatccacccctttgacctcccaaagtgctgggattacagacattagccacagtgcccggccgaaaaataatatcttgacaaggtattcccacacctggccactgaagataattattatccctctatggcagtgtacatttgcagtctgttttgtgggcagtgtacatttgcagttgtattatcttgtcccctgaagtttaaatacctatgtttagagtacacttccaaagctcagaggcaaatacatacttcttagtactactacatatccgtctctcctattggaatacactagtatgtttctttttgtttttttcttttaccgtgctttttttttttttttttttcttaagacggagtttcactctgtcccccaggctggagtgcagtgagtggcatgatctcggctcactgcaacctccgcctcccaggttcaagtgattctcccacctcagcttcccaagtagctgggattacaggcacacgccaccaagcccagctaatttttgtatttttagtagagatggggtttcgccatgttggcccggctggtgttgaactcctgacctcaggtgatccgcccgcctcagcctcccaaagtgctgggattacagacgtgagccactgcgcctggctcttttactacgcttcctgatagttgtagaaattacaaaccagttaaacaccagattacaatttatctttgattattaactaccttttatctggaaatatttcagatatgttatcttttcttatttttctttcatggggccaatctctaacaaaatagtatttcctatttctgtgttgactttgttgacttgaggttgttttccatttactttaaatctaagagaaaaataggtataaagacaattgagaagataaataataatttcattcacccattctatttaggagcctgctaaaatatcaagtcatttccaaaatggagaaatacaaagctgaacaccctaatagtatttttgtaattttagtaaaatctgttccatttcagcctttcttccctcttagtggaaaaacaaagtacaaatttaaagacgttttccccctttatcctccttctgtcatatgtaaagtcctaaacatcttactaacatacttggcaaattatagcaaagatttaagtggaggatttttttgttgttgttatttatttattgagatagagtcttgctctgtggcccagcctggagtgcagcagtgtgatctcgggtcactgcaacccctgcctttgccttcaagcgattctcctgcctcagcctcccgagtagctgggattacaggcgaccgccaccacgcccaact

SEQ ID NO: 98068 - DNA, 16213 bp, Homo sapiens
ctccctgattccctctccccacgctcagcaaaaagacatcatggatctagctggaccgggtaagggatgtcaaggtcaccaagaaattgtgctgaatgaaggtggccatgagatgggggtggggctgggagtaggggtgggtgactgggacaaaatagaagaatgaaaaccactcacatagtcatcagtggcatctttaacagctgtgatggtgaggacaagaaccaaaggcacaatggtggtgaaccaggacagggaagagatctgggggatcaactgaaaaaaagaaagagaagtatgcctctgaggccccatctgatgccttcattccctttcctcttccttggctttattcagtttggggagctgcaaaaaatctactatgggtcacctacctgcagaatgaggaggaacaggaagtaagtgttggcaacttcctggaactgctcaaagaggttgacaggcaggaaggtgagaatattgtacttggaggtcttgatgcagttactctatggcagtaggagagaagataatgagcagtctccagtcccaacccagaaccagactgaggctgcctcccccatctttatacttccccagacctctaccccaaaagctagcaaacacaggtgtgggagggggaaagaggaggagagaagggagtctcaagggggtcaatgtattctgcttcactgacaggtgaaggcatgaaaaattcagcacgatagcagatggagagtggctgaggaggttgcttcccctcccccaagcactcttcccaggcagccctcagtcccaacggtaggttgtccttgccccattcccctctccaaacagagagagggaacaggtggtctagagtcgcttaccgcatactggaatttctcattgtattctcggtcattagcccgcgccctcctttcttcttctgcaacaaaatgatgctgcagtcaggaggagcaaactgaggtctggaccaacactttgctggggggttccctgtttttttccacagaatatcattttaaggagttagctccacaactgagggggtcatcaaattcttccctccagtccacctctcaccagcagcctgaccacacggctctccaggttacattcacaggacaggacatgttctcttttcctcaccaccaaacttcaaggtcttccactggaagcacccagtttgtctcccccacccccactccagaggaatctgagccactgacagtcctgggattccccagccccttttgctgctattactaatgcatacattgtcataatcaaggagtagcgctgaaaacgcaaagcttccttccccctggggaccactgcagatctagtcgcggtactgctctctcccttatttagagagtggggtaggtggcaagaaggaggctccctgtgccctggagctgctctgcgggagcatcccagccccatgtgcagtcccccctacaggagcctctggttgtcacatgtcaccagcaactgcttctgactggcccgaaatgacatcaccttatttcaaagctcatcttcaagtagaaaaaggtgtggggggtgcgtttcagggatatgggtcatgcagactgagatagagatagaggagggaggaatgaaatgtaattgaaacagttgctctctaactggaccttccttgtaccatctgcacacatttagctttaaagggctcatctgtcactcagttagtgacacctatctagctaaacctatctgaaacctctgcaggtctgggactgcaggcatcaaattcatgtcccagaacaaggagctgtcctataatagattccccagcccgtctccccgggggtcaccatgacctcatgctgcaaaaaggggtaacttggttaggcagcaaacctaatgccttaagcctgtccgggagccaaagacagcattccagaaccctttctacacaccccaggacccctgcagagcacactgcagtaacaaaacccaggccacagtgccccctgcctaccaagccacttcactcccataaacttccctagaggggctctcttgggccaagtcccctgcgcaatcaccaaagaccatgcaaacgaagaaggtagggactggatccttcggagccaggatctctgggtctggaaagaggatcaaggcaggtagggggaggctggggacaagtgaatgtagggattggaggggggaaataatgggtgcgggagagctgccaggcgctgcctcccgttacctgtcccccaagagggcttctttcggctccaagagggaggcgcctgggcccgggcccacttctcgggcatctccttggggaccgtcatgatcccggtttgagtgggggagggcagaccgtctatatgtccttggccttagtggcatcgacggggcggctccccggggaggtgcaggagccgcagccgctcagaggggagccccagccgtcgggcgcgcgccccacccgcagcccaggccatcctcccggccgccggcgctcggggacaccgcgagctcagctgcgccgccgccgccgccccccatgccccccggcggatgccagcgtgcgctgagtggccccggacacgccgagcacgcccagggttccgcccccgcccgctccccgactgcaggagccgcagcctgccagcgcgccgcgtaggcgaaagctcgcgcgcgagccccgcctcccctcccacccccgggccgggccaatgcgggtgagcggactgccggcgttgtcgggggcaaccgctttcacacacacacacccccgcccgcggaaaaaccaggagaaccggtagatggaaaaacgaggggagcagggaaggggtgagaggaccaagcagagatgagaacacagctccctaggccagaaagcaggagctgcaggtgcccgaagataagactgcaggtgtttcggggcgtggggctggtgctctgcgctgtcctggcagataacccagctttgggatcaagcggaagaattcggtttcctaggctgcccccaagctgggtaggggctgctgtaagctaccctccctcagacccataccagttgtcccttttccttttgctccctgagccataacaacacccactcttgatggttcccgggatctcccctccttgcctgtcttacctggggggcgcttttttgcacacactgccatctcacccagcaagatcccagcaatcccatgggagaccctgcaagaagtgacagacgaatgaggtcaggaagctgaggataacccttccctcccctcatgagacctcttttgaagaccctcttctccagctctgaccctgcccctcccccagcctccttctcccagtctctcctcttactgccatgatgggttcctgggaaagaggggacttccccaccacctcccatcatgcccctgccttgggtgacatggggggctgagactttacagaagcccatgcctgtagggaaaggagaagaggccagatattgaaaaaaggggaacagctctcaaggtatccatcccagggacaatggaggctctcatgtgttctggcggcaatgagtagtgcttgtgcttactagaaagcagtttccccaaagggtggggtggagggaacatgagccaggaaacacctggcagggcatcaggaaacagggtgggcaggctccacccttctcgaaaggcttataagttccctgccatccccaccccccattactagggcttccattatcacctcctccaggggagctcacattagaggcatggccctcactttctgcacagacagtccctaaacagcttcccctcagcctgggtcagccacccttctgggctggcagaggggtcttcccaaccctggtggggagtttgcccctccctccctcccaccccaagcctagtccagtcagtatggcacagggtgcaggcttagggagcaccagtgagacaagcctctgcctgcttccgccttcccatgtcctttctcctaaaaggttcaaggcctggccttacaaggcagagcctcatccttactccccagcctggcccaaaggaaactgccagtcagtcacctcctctttccttgtctgggtggaaggcctttcacctcctcatcctctttggttccctctgcctttagcctaccaggcacaccccaccaacctgtcagccccaagagatactaattgcctgtctggctaagctctataattacagattctggccacaacccagtcacccacaccagttctcccttcgctagctcagatcccgcccttacaccaagtcaggcaatcctgaaagccagaagtccttttcatccctgaccttctccaactatggcagtccagggtgcctggctcaggaagaaaaacctcatccatattttagagatgccaagccctcctccagggcccccagccagggtctccacccagtctgagtatgagtcacgggagggtggggagcacagggagaggttaaaggatgcaagagtgggcatcacaagttctacaggcagccccgcccttggggaggaagggatcaagaaacactatcagcctaaacatctgagtttgagtcccatgaaagagttaatgtaggagctgcacacgccatcaggagtcaggagtctggatatggaccaggaaagttgttctacctctgagaccctggggagactggaagcaggcttggccccagacctcatcccctctgggggggccatcattccaaggggaagagaggagagacctgggaactgggatcccctctcacttttccttcttagtctcacacagcctgggttttctgagcaggtcaggcccatcagccacgttgccctgccccgtcacccagccccagccccctctcggccacatttgggataaaaatagccagccccggcaagcaggcaatgctccatggaggaaaacagctcctcctataggtccggtccctgctcccttacaagcaagagccccaaaggctggccacttctttcagaggaggatggcaggtcagggaaacaggaggaaatggaactcgagacctccagctcactggccaccaacacgagctcgggccaccttccctcaccaaggacagaactcagggctcccggcacagctatcatctcccagagctactgccccttcctgacaccctcagttttcctcaggcatagacctccaccttactgagacaaagcctaccagcccaaactcccttctccaggcaccaaaccctcgggtcccggttactcctctcgcccaacaactctctgggcgggtctcccctggccaaggctgcacgagcttctccttggcactcgcgccgctctcctgctctccacgcgccccttcggcaccccatcctcccatcctgtacgcagacccccgctctgccccgtccccgggcacccgacagcccctcgtctccagtcggccgccatccccgccccgtctggccgcagctcccaaatcttggcccccggtgctccccagtctacacccgctccccggcccctccagccccgcggctgcggccgcatctccctctgccctcctggccccgcgctcccgggcgcccccgcttcgcctcgcctcgcctcacctcagcgctcagcgctcggcgcccgccccggcggccccgtactgcccatgccgggggctggggcggggggcgctcggctcggctccccacgggctcccgcccccccagctgcggccccgctcccccggggcctcggcccgctactttgtgtcagtttcggccacggcggggcggaagtgacggagccggcggcgggggccggggggcgggagggggttttggggaggggagaaggagcggggaggagggagcagccatctttgtgcggggcagtgggagggtcttagcccttccgagcctcggcgtggctgggctgggatgcccccacacgtacgtccatccgcatcttaaaagaaaaaacaattcgggaggctagatcgctctgagggggtatttttaattcggaagaagggaatagaggaacactgccttctctgcaaaacgagcatcctctgcagggagcggcaggagagctgtagaagtggtgaataaccagaattttccctggcgccaggttgccctcagcccgactctcgctcctcggagccgcccgccctccgttccttcaccctccctcctcgccctggctcatttcactgtatctcaactctccttgaatgaacgacacagcaccgagatgtctaggaacggtgcctcagtttcacagccttgctctctgtctctgtgccccgccgccctccttccctccgcccccaccacgccccctgggtggaggcggcttccccacccctaactaccctcttggggaggcatccccgagagggtgaaggtgggaggcgccgaggcgatgagagctaggagtcggcagtcgggacaggctatggagggcagtccccagggttgtgccctacactggatggtggccccctccaccctgcagatgcccgcagccgtccccatccagcatccaggtgcgcaccctctagcggttacctcgagcaactacattccgagaggccctgagggtcagaaaaccgctttgcgggaggaggggatgagaagcctgagtcctggtaccttatcctcctccacttctccctgtccaggatccttcttagtttaggaggaagggatgccaaacagataaacagagaagcctcccaggttctggcacattaacaaagaggaagaatgwctgttgttcccaggcggggtcagtggctggctccagggtccatgagtgaagtgagggttgtcctaatcatagcttacactccagcatctgagctgaggcaggagtttccaactctgaggctttgtgttgagcagacaccagatcctgagctggctctgggccctcagggtggtgcagagccaccaacagctggtaagtggctgtgccaacggtggcccccaccagaggggccaccacaggcacccaccaccagccattaccagcactgcaaaagaaggacagtgggaaggtatcaggagtgactcccttagccttcccctctccaaggacggggggcagtaacaagagagtgccctaaagttgttcccagggtggtagacaccaggaagaggattgccttgtcaccaaagcatagtatttagaagagggaaccccaggagagcttggtccagcctcttgccttagggaattatctgaatatattaattttgctgatgaagtcactaatgtgcatggaagtaatgtggcatgcctaagaacacaacctctaaatcttactgtttcagtgaaaagttgggagggaagcaagggagaaagggggagaatatgacttggagaaagaacactgtcctaagaagccaagagagctattttaaaggcagagtgctgtggacccagggacagagcccttagcagaggaaggtgagtggaggccagcaccaggagagtctgtctcccacctgaagacttcaggaccccagccagccacgtaggtgaagagacgtgggcccaggtcccgggcagggttgagtggaatcccgcagttggcacccatggataacccgagggccaggatcagcatccccaccaccacaggctccagacccgcagggactcccttgttccgtctgtccaggatggccaagagccccacaatcagcatcccrgtgcccagaaccttggagtcaacagaggcagagggttccctgtcagctgccaggtgctccatctgccctctctcatccaaatattccatgtcatctggctttgtgcaacacaggcagttggggatggtggggagtgccaagatagacccaacccacactccacccagagactgaacaataggctggggtgccgaggaacaggaccaaagtagtgtccccaggtctccccctcacacttacctgatccaggaagccattgttcagggacagatagggggcaggataggtggcaaaaatggaggctgtctccttggggccagtcactgtcaggttcccacctgtatagttctgtagggcatctgtggaggaagggaacacccaggatttccctctttgctcattcatccaaaaccattctgaggcacccctgcccacccacaggtgctctcaaggcacagctccctctgttccctctgtcaccrtrgtagagaacataggtggctcccgaagcacagaaagcagacagcaactgcaccaagatgtaaatggggagcttgacccaggggaggcgtccaacgatgcacatggccagggagaaggctggattcaggtgggccccttcaagtatcaaggaaagaaaaagagcatctattaagtgtcactgccaggcattgtcaccagacaacactactgctccttcctatagctcttaaggcagatagtgtaattctcatcacacagcttaggaaattgaggctccagatgttacagatgttaagtgacttagcaaagtcacactgtgggccaggcacagtggctcacgcctgtaatcccagcactttgggaggccgaggcagtggatcacttgaggtcaggaattccagaccagcctggccaacatggtgaaaccccgtttccactaaaaacacaaatattagccaggcgtggtagcaggtgcctgtaaaatcagctattcgggatgctgaggcaggagaatygcgtgaacccaggggcagaggttgcagtgaacagacatcacaccactgctctccagcctgggcaacagagtgaaactccatctcaaaaaaaaagaaaaaaaaaaaaaaaaaaagaagaagaagacactgtgaatccaaagttggaacctaggtctgtctgctttttccacagcaacacactatgtctcaaggctccacccaagcacaccgatgcagtgtgtatctggggtacaaacaggagaggtcctgagtggagatgagcccccagaggacttcrggtgggggatacaagaggatagcagctgcccttcgtgccctgccattgatttctgtctaggtgagccaagcattagtgtgaggaagcaggatggagagatacagaaagaggaggggctggtggggccaaaggcttatttcagtctgggrcactgttcaaggggataatgtccacgagtcacagaaggatttgcgtttccaccatcaccagacagacaaactggcatgcacatcccacgtgctctratgaccagaccccaccctcctcacctgagacgttaccacccacgtagatggctatcgtaacggccagagagccagccagaaacatggtgaagaagttgcctttggtttctccactggtgacagcctgggccacagctccttgggtgaggagctgctgagaagaggagagatgaggaacagggagcccaggagaccaacagggagaaaggttgggaaggcyaggggagcagccaaggagatgaatgagcacagaagacaagcaagggaaggagaaaagcagaaggagggaagggaaaagaratggggaaagtggaggaagaagaaagggaaagaatgtgggaaaaaagaaaagaatttacccaactcataggcatttgagggtacaaacccatggcagggctcagctttaaaaagtcttatctaagattctttctatggaagagttccatcaaagccaattttaaaagcctatgtgaaaaataattattcttgctgcactttatacaatcatcaggccaagtataataaagcacattggtcttaccatgaaaatggtctttcataaaaatgggaaactgaagagagaaaaattatgtttcaagaactatgatacacttgttattaaagaaagaattaaaatgacaagaataaaaatgatgaagtaggagaggaaaggagattaggagagacgagaggataaaaacgaaaagtgatagggagttgagaggaagggggacaccaagagaaagagataaggacaacagaaggagccaggaacttttgcccaacccccttctttccttcccgcagtgatcctacctaccatgagtacaaacacacccagaaactctgccaggcactgccgggccaggaggctgcgtatcyggaggtggcccatgatttcagccggggcctgagtgaagaccatggtggaaacaccctattgctattcactgctccctctgtctgcataggcacactgtcactgcacagctactgcctgcctccagcaaagataaggaacagactttaaaaccattagctcagttcctgaacagcagctacgtgtctgtgcacgtgtgtaggctaggaaacagagagataacaagagaatgtctgggagcaggctatgaacacagagcctggagtttacccaacctctgtctcttttacccttcattcccagtcatcacaggactagcctcccccatcctgacaaatagaaggaagtaccccgcttcatagacattagatctcttggtcctgaagtcagctctgcaaagtagtactattgcttccattctacagatgaggctagtgggccttagaactccccaagatcaaactttttttttttttttttctgagagagagtcttgctctgtcccccaggctggagtgcagtggcaccatctcagcttactgcaacctccacctcccaggttcaagcaattctcctgcctcagcctcccaagtagatgggactacaggtccatcacacctggctaattttgatattttttagtaaagacttggtttctcgggaggccgaggcaggcagatcacgaggtcaggagttcaagactatcctggccaacatggtgaaactccatctctactaaaatacaaaaaaattagcgtggtggtgcacgcctgtagtcccagctactcgggaggctgaggcaggggaatcacttgaaccagggaggcggaggttgcagtgagccgagattgtgccactgcactccagcctggcaacagagcgagactttgtctcaaaaaaaaaaaaaaaaaaaaaaaaaagacggggtttcaccatgttggccaggctggtctcaaactcctgacctctagtgattcaccttccttggcctcccaaagtgctgggattacaagcgtgagccaccgtgcccggcccaagatcacacaattatttcatggctgagtgaattcaaatccagattttctgactctccagctggtaacccacaaagcctctcatttagaacctgaagcctttccccaaaccatttggatgcttgaagaactcaataggcatctggaaagactgggctaaagaccacagactgtgggaatgaaactcacatattgagtgcttgtacttcccttatgccgagtgtcacataggttagagaatactccatctttgtgtcccctgacatggcttgacatgaggccttcacactcatgctgagttccacctggccttctctgggtgcatgctactcttgctctgcatgaagtaaccgcatcctacttcttcatatctcaaggctccaattaaatgcattcaaagaatctacgtctagacactggagaaacagtggtgaacaaaacatagtctctgcccttctagagcttatgttctagtaggtggaaacagacaatatgcaactttttaaaataccatatacagtttatgaagttcttgagggctaccattatgatttatgtaaccctgtgggctctaccactgtcctgggcacatctgtgtgactagtaaagaaataatatttctttactaggtttaatggatactatagtgctccacccagattcccccttgggagccaatatgcccattcgctacatgtaggaaataccagctgctgataccacatagctacctccctcattgggcaatgcccttcaagtcagaaagatgcctcaccgaaggttacatgccctcctatggggcccatgtcaaacactgattgatggagggatataaaagtctagcctctttgcctcactttgcgacaactctaaagggctgttccagctccagttcccccataggatccatttaggcatctgttatatcatccatgtgtgtcagtttctcctggtgcctaatcttgttacaggaaaggggtctgaatccagatcccaagagagggttcttggatctcacactagaaataattcaggctgagtgcggcggctcatgcctgtaatcctagcactttgggaggccaaggcgggatcacaaagtcaggagattgagaccatcctggctaacatggtgaaaccccgtctccattaaaaatacaaaaaaattagccgggcatggtggtgggcgcctgtagtcccagctacttgggaggctgaggcaggagaatggcatgaacccgggaggtggaggttgcagtgagccgagatcgcaccactgcactccagcctgggtgacagaacgagactccgcctcaaaaaaaagaaaaaaagaattcagggcgagtccatagagtaaagtgaaagcaagtttattaggaaagtaaaggaataaaacaatggctactccatagacagagcagccccgagggctgctggttgcccatgtttatggttgtttcttgatgatatgctaaacaagaggtggattattcatgcctcccctttttagaccatatagggtaacttcctgtcattgtcatggcatttataaactgtcatggcatgagccaccatgcccggccatgacctgtatcttatggcaacctcctatctcattctgtaacttagaatgctttaaccatctgggaatgcagcccagtaagtctcattctcattttactcagctcttgttcaaaatagacttgctctggttcacgtgcctctgacatttccccccttccttttataagagaagcactaatcctaagggttgcagagggacgaaggtccatcttctgtaagttcttcaggatgaataggggcgatgatatttttgcctaactcttagaatctctcatattcgtggtagagaggagctcagttggaaagtgttggtatgggccaggcgggatggctcatgcctgtaatcccaacactttgggaggctgaggcaggcggatcacctgaggtcaggagttcagaccagcctggccaacatggtgcaacactgtctctactaaaaaatacaaaaaaaatagccagatgtggtggcgggtgcctgtaaccctagctactcaggaggctgaggcaggagaatctcttgaacctgggaggcggaggttgcagtgagccaagactgtgccattgcactccagcctgaaagaatgaaactccatctgaaagaaaagaaaagaagggaagggaagggaagggaagaaaaagcattggtatcttgagggccattcataactcatgagttctgacaaaaggtgatactctggaagattcataagtgttcagtttaaggaaacattcagtaagcttgtcctccattcctatacaaagattacaacagctatacattccacaaccataaagcaaaataagtaaaattatcccaagtaaactaaactagaaggctttccatgaactgaggaactgttggaaccacgctgatatgaggttgctagatgattccagtacatgcccagaattagaatattgatgcagatttttacattacccatccctcttgtttcttctgagcagcagtcagaggccactggttggttcacaggactaagcagggttagcctaaattgcagaaacaaacttaaagacaactgatgagactggaatttaataacaagtgtatcatagttcttgaaacataatttttctctctccagtttcccatttttatgaaagaccatttttatggtaagaccaatgtgctttattatacttggcctgatgattgtataaagtgcagcaagaataattatttttcacgtaggcttttaaaattggctttgatggaactctgttccatagaaagaatcttggataagactttttaaagctgagccctgccatgggtttgtgccctcaaatacctttgagttgggtaaattcttcctctccttttgaggtccccagataacttggggctcctggaccttttagaaggtgacattctttacttaccacaggtcagaaaccctgtacagggactgtgtaggcaaggttatgagcccaggtcgctaagtggcttttataggctttacaagtcaagtttgattccttaatggaaagcacaccattccagtcaaacccttcataaaataaacaatttctccaattgtgtcctgttgcaaaagaaaacagattcttattacccttatgcaaataactgcattgccataaattaagaatacacacaaataatttccaaattctggagaaatcaagtagagagatgcatatactccaaattttgttcacaggagtatactttactcgattattaaaagctgtaaatatctgaaaagaaaagttgccttgactctaaaaaataaaacaaaggatcagcaatgttttaagcaaaggcaaaaagattgctttagtcttctttagtttatgcagttaacttttgtttgatatctatgaacatttcagctccccatgagagttctgaaagttgtttcctctattctaatgtcacaatctccaaagttatcagaaacctgcatttaagtgcacctgttaaagtcctatggctgattataaactaccttctaaagaagatcaaaacaagacaacaattgtctgtggatgataaaaagtcttagggccaggcgcagtggttcacatctgtaatcccagcactttgggaggcggaggcaggtggaacatttgaggtcaggagtttgagaccagcctggccaacatggtgaaaccccgtcaccaccaaaaatccaaaaattagccgcatagggcaggtgcccataatcccagctactcaggaggctgaagcagaggaagtgcttgaacccaggaggcagaggttgcagtgagctgagatcgtgccactgcactccagcctgggtgacagagcaagaatctgtctcaaaaaaaaaaaaaaaaaaagtcttaggacagccactagtaaagccacaattaactaggaaattttggttacttctgttgcatacaaaattttatgtaacaattattaataacatacgctaagtcatattagaattataggaatttctcataattttggaacatgtaccaataacacatttaatctaatgctccaaagtagataaactgaacaattttttttgttgttgttgttttttgttttttgggtttttttgtttttttaagacagagtctccctctgttgcccaggctggagtgcaatggcatgatctcggctcactgcaacctctgcctcctgggttcaagtgattctactgcctcagcctcctgagtagctggaattacaggtgcgcaccaccatgcctggctaattttttggtatttttagtagagatggggtttcaccatgttggccaggttagtcttgaactcctgaccttgtgatctgcctgcctcagcctcccaaagtgctggaattacaggcgtgagctactgcacccagcctaaaattgaacaatttttaatagtcaaagaagcagcttatgaccttaaagaatttagcaaacttaatatctgacctgtataatttagaccaaatgtttacatttttttttgtttgtttgtttgtttctttttagtcagagtctcgctccatcacccaggctggagtgcagtcgctcaatctcggctcactgcagcctctgcctcccgggttcaagcaattctcctccctcagcctcccaagtagctgggactacaggcttgcaccactacacctaatttttgtatttttagtagagatggggtttcaccatgttggccaggctggtctcgaaatcctgagctcaaatgatctgcccgccttggcctcccaaagtgctgagattacaagcatgagccaccgcacccggacaaaatgtttacatttttgaagattttttattttaccaataatctttaaaactgtatttatttcccaaagattacttaagtcacatgaactaaataaagggtattccactttttacttttctgataaaatgtttgatttaagcaattcttattgttaaaccaattaattaaagcttttccatatataaacat

SEQ ID NO: 98069 - DNA, 136059 bp, Homo sapiens
gagggaggcatttgggttttattctaaagttacaggcatgtacacaggaagttatatgataaaaaaaaatagcatttgttgggtgcttaccctttactaagcatactatttaatcctctgccgtagctactcttctccccattttaccgatgaggacactgaggtacgagggttaaatcacttactcaaagctactctagcaagtgctagagccaggattcacatcacaggcagagcccacactcttaaccacttcagactgcctcttgatagaacaggaaggatgacagcagaggagagaccagatagacacggacaccgctaggaaggagctgccgacagacagcatttcaaagagtagaggaagtcaatggggtcagatgttgctgagccatcatgaacgaaatctgagaaacagccattggatttatattaggcaatcaccggtgacctttaagagttctgtttcagtagaggggtgggggcaggagctccttgcagggtatcaagaagggcagtgatagagccttgcatagaaactgacagttaaaagacagggagaaatgggagagaaatttccaagcttttcttttgagactgtgtcccaaaacaatggaactttttctttgttgaggaattgcaatatatttcaccttgttcttttgttttgatgggcaaagctaacaaattttaggagtcatggttaaaggagaattagtaactgtcatagaaattgttttttaaaagccctgcatcaaattcaggtaaagtacaaagatttgactatttcaaaggaaactgtcatgggcagaaggttaattggccttatgcattgtattggctggagaaaatggcaattgtgtaaccagggtgggatggtgtgagggaattgtagataaaataacttgcttcagacctgttttgagccaagggaaagaagctgaagcattgcatgcattacggcttgacagtgaaatctagagaacagctgcctggacttccaaaaacctgggctgcaaagggcaaaaatacttattaaaattccttgttttaatgagttctgggaataggagttatcagcctctgtcctagctactaagtagtttctattacaaatcaaaagcagttttagggaggctgtgttttttgaaggggaaatcctctcctggcgggtaattcagactgcctagggcagcaattaaagccatccgggaggaggagaggaggcctttgtggctgaggagcagtttctcccaggcttctttccataaccatgaactccctttagcatcccagtgtagtccattctaaagtgttctgcagatgaatcagtcctcaaagtgcctatgattttgctacggcccaagaactactgcaaacaatagatgaatgaaagatatatgtggagtccttcctgggactgcttacaccaaagacatctcaggctgtgatgcttctcagacacatggggtaagtgctttggcagtgaactctcagaccctggctcaaacagggatgacaccaacaggtatttaatgtttaaaaaatgcaacaggctaataatgcaggcagtgcaaggattcacctgtctgtgtaaaaagccagtaggaatgaccgtaggctccttttcctttctagtgactcaggccactgggagagttgatggatggctgaaggaatccagagtctcctttggaagttcttcaaaaacattatgcattcccattacaagggaacccacacagatctcttctccatcccaggccatctccccacgtaccatttgctgcctcgtcacacatcccaaccctcaggtgactttttccccatctttacaggttcctctcttcccaacaccggctcaagagtaagccagatctttcccgattcttctctactttcttgctgttcccccaaacaacacataaagcttttgcattttagaggtttcattgctcactacagagaacagtaaggactaacaaaaacaaaaagtgtgggaagctggaaagattcaaggataccatagtgatttgttgattcttttttcacagtaccagagttgggggagtgaacaaaatacacagaacccctgccctttggagcattcattccatgggggagatgggcaatacacttaacaactaattaatatagtaggctaggaggtgctacgaataaaagcaagacagggaggaggaaaggatgctgtgggagtggggatagttttaaaggagtggttggactatgagcaaagctgaaatgaggcgagggactatgaagatacctgtgggaagagtattccaggggagagaaccattagtgctaagggcctggggcagggggtacagcaaggaggccagtgtggatggagcagaataggatgggaggccagagaactatggggcagaaagtgcttcatcttgcagtcagggtgcaaaaggcaatgagcccagagtttgagctatgctgacttgggctcaaatcttggctctgccccttaggtcatataccttgggctcccccacttcttatcatataaacagttgaccacaaagggtggtcactgcaatatgagatgtgaaacttcctatcacaggacacagcacacgacagccatagtaagaaacagagactgatgaaaatcaagtatttcaaagtaatctgtgaacttttgtgattcaagactgtcgacaactgaataaaaatctcattttaaagaatactaaattaagaaatactttaagaaaaaacacatttcataatgaagtagcttacaaggtcgatcaaggaaaaacaaatatcccagttttagtgccttattcaacaatgtactaaaatattcattataatcagtcaccacagacatgtgagtttcatagcttggaaaacttttcccccactctcccaaaaactctcgtgaagggaataaaaacaaataatgcttaagcattaatagtttcccatatgactttcccagtttaaatatatgttttaagagaaaaaaaaagtagtccagaaacacttttatatttcctgaattggcctttgcacgataaagccttctcagctctgcattaaatgaaatcctgcttgaatggaagacagcagactagtccgtttctcaaactcttcaatcatgagattcccaactgaagaagatagtgatgctccccacaggaaaactcatttcctccccagaaatcaagtaacacctcttgctttctgcttcttgcccagtaacatcaggactcatcttgagtttatctgatcatagactggaaatccccaagacagaaagatcctgtctcagcatttctgtaaacaccagggaatgtgctcctcctaaactgagtgtttcccacgaggcaagaatactatgtacaaaccgctatactgtttcaaaagaacagtgtaatgaaaaaggtaacatcatgttgctctaaaaccaatcacattgaccaaggcaaaaacagagcttataaaattaaaagagatagtcttatatttcctacttaatattattcatcaatttataattaaaagctgttatttgcatgggatatactttccaaataattccttctattcacctatacctttctcaccactatctcaactatgtgacctgagtagaaaagctattagccccactgggtgaattttcactgatgcaactacagcaatttctaagtccatgagaactgctaggaatgtttaacaaaatccaatacctgcattataataatgcactttaaaaaaatgattaaatacacatccatagctgaatgcagagattccaagaactttgaatgcataattgctacaatcatagagagactggattacgagccacggctggtacggatggattccttcctcccattaaggcactcacaggcaagtgtgatagacaatgttgctctgatgactggcagtgagaccagaagatagtgtgaagggcagcaaggagggtagggtgggatgcgataatggaaaatgggagtgattcattctacttaatgcatatacgttttatgggtttaaatctggagggaaacaactttttaaactcaactccttgtgtgtgagaattaaatggaagcacatcttggaccccactttttataggtttagtgccacctcaaaaaattccatactgatccattctgaaacaactgcttttcttactggaaagccacaaagttggtgcagaatctatgaaatggaaaattagacccaagccaacatgctcatgcataagcttgattttaatgaaaaggtacacggagcagccgcacctggaggaaaagccccctcagggctccccacctccagtatccccatgtgcttgagtttgcatccttaccctgtccctgactgtgtgaccttgggcaagttagttaacctttctaagtcctggcttgttcatcttcaacatggacatagcaggtttgctgtgaggactaaatgagctcatacacaaatagttttagctcagtacctggtacatatgaacatttaagaaacatgtccttctcgtgattagatgtgacactctgaccattttagaagcaattacggttcagctatcatatcccaacatcttgtgataaccattttcattttttgcttctagctcttactattcttttcatcacaatattttagggtggaggtatttgggggaggaggtaagcagttatatacatcccattttcccactgttgttcaaagcaaggtgaaaagccagggaaataaacacatgcactgaagagaaattcagtctttaggatatgatgtgataggtgtatggaatataaacaaatcatataatttcaacctctcacatatagggcatcaaatcataggtaggtcttattttaaaagaaaagccaagcagcattaaagaggatagagggaacccatatgggcctattgctagctcagtattggtgactgtgaaacagggatgggtgagctagattacgggggtgtttcatggggtctgacttccaacaggtggctagctttagtcatgttcagatgcaaaaccgtaatgagtttgagtatgcaagtcccagggattctgttgaaggccatcttttctcggccatcaagggagacaattttctaggtttaagcctccctggcaagttagcaagcagggaactgcctgccctagcttgcacctgtcccctgaaggggattctggcctgacggtgaagacccaccatcccttccagacagcccattctgccgctggggcacctcccgacaaacgggggaagcccactaggaagtggtcacgaccaaccaagccacaaatcctcagggtgtgggatttccacctctataccacgtctgaaaaccgaaaataggcgcccgcttgccatactgcaatgggattccccccagcagcaacccccccctccagcttgcatgttttattaataaatgcaagatggcacacggaggcaaagaatgggaggtaaggcatctgcagctggacccgaaccagggcagtttgcaaaaataaataagaagcatgtgacaagaagcaggtctccaggctggagctgaagccctgggctgccccacgcaccctcgcctggctcccccggccagggggatgaaggtcagcggcaagatcccagcccttccgagcacgcatcctgcaaaccttgaccggtccccccaccccccgccccgaccacaagactcgggcagtgaggcaggggaagctctggccgcggccggctgcgaggacacatacctgctgcccgggctcgggattcgctcggctctgcagcggcgccggccgcggctcgcgctcccggggctcccctctccgcccccccgccccctcgcggccccgccgctccctccgcccctccgcccaccgcgctctggggcgcgcgcgaggcctcgcgccggcggcttggccgagcccgcgcctgcgccctcgcctcccgccggccgcgcgcgcgcgcccccgaggctgcggaacggcggcgcggctgtctaggaaaccgcggcgtcggctggcaggggctggcggcctgagctgggcagggggcggaggcgggggctcggctgtctccggggctgccacgcagagcgggcttcgtggcgtgggtgagggggtcgcggggcagggtcggggcctgagtgcgagcgtgtggagaggcgagggggccgcgaagggtgggtttgacggggacgcaggcggggcgcagaagcaacaagtgcggaggccgagggcgtcgctcggggaagcggaggacccccgcgggatttcgtacagctgagaatgggaacctcccgtcgctttggcgcagcgctttgcagtttccagagctctttcccagttgctccgtttcatccgcgcggggcgcccggtgagggagcggatggcacgcagtgcccsctgcgcttggaggccaccgaggggaaaacacctctttctgtgtggccggagtcatagcacggtcagagtgccttgactctcagttggctgcctgggagaaaaatacctgtcagtacattcatttgatggcctcagctcaggacccttgtaggaccgtgtttctcctctttttccgtttttcgttatctgactcttaaaaaggctttttacacgtccccatctcctttccccgtgaaatcccagtaccgcagatacactgtcgacctgcttatgtgctgtatgtgttatccgtgcttgatgcataaaaagtaacattgcgccccttggaggcagcatcgccccggtggagaagcctgtcctagggccatgattgccagttaccgggtgggttaaacggaaccactgagcaatctggatgcacccacagatattctctgtggttaaaaaaaaagtcctcacccataatgggtactactctaattaatgtttgcaagggctgctgtgaatacggccatttaagcagcttctggattcatagtagcttattatcgtttgtcttctccaccaattcttgctaaaaatatagccattttcctatagggtgttgcgatttttatcttaaaatatttgaaaagatgggaaacccttgtttctaggacacggagtttcagaatggcttttggctctgcagataggtttgatttctgattcttgtacctcttctaaagtgtttttatttgattaggtccagytggcctcccaggaatgtcctttgtcttttcttcctgccgtagcttttttagtatggataaaatgaaaatggtagagttgaaggacttcaaaaccacctcttggaattgccccacggtcttggactaccttccctggattatacgggaatatctatacagggagtatctacttttggcamactgagaaaaaaatgtaaaatttcttcagatcctccttcgcctttcagcatttcctactcatctctaatctctaatggtggaatttcagaggaagaaacacttggagatgatacttgtggaagctacctgggttgccaaaggatttttctacatttctagacggaagaaatgtggactagaatagagaaagtggagatgggttaagaaaaattaatggaggatgcacgggaggggagctatagttttctgacagtcrgtgacagcattttaactaggtacactttctttagaaaaagctttggcatagcttgcccagattgttatscactccattttccaccttagtagaactctacttaagatttgattgaaactattgagaagcatccagttataacgctaattaactctcagagtacgacaagtattttgaaacttgctgagagaaatttgaagaccacttcaaatttctaccaggaatctttgtatcctaataaaatttttttgaattcgggttcatgcgacttcaagggaacatttttttctacaatggctatttatagtataatagccattgtagaaaatatttatatttataaatatttatattatgtatttataatataatagccattgtattgaaaattacatgctaataamgtttacgtgtgtcttaagtgttctgggttttgtccttttctgagtaatccgagttaatggaaattgtaggtgcaaccatttcatgttgtagtgtgaagtcaaaaatcccaaaacatgtataatttgtcaactctatgctgccccctggtgatgtcttacttcacagcacctccccaaactaaaatctcccttcgataaattttttagggtattgaaaacttaagtgtggacgagatgccattctgcattcttcaaactgggccttctcttgttttcaaataccctgaggcctaacaccggaggaggattagcccttgaggctgatgaggctagaggaactgtgaagatctgccacagatctcactttcacttggagcattattcttgaacttaactggcttataagactcacttgggaacacttgcttaaaatcagattctgtgagtcataaattcagctgattagaaaaaaaaatcggattctggagcctcctttcaaacaccttgaaatctaatatcagggggttgacttgtgatttttttttttaactgccccaggtgattcttattgacaggagagggtgggggaatcctagagctataaatagtacaggtgctgcttcagtacactgcaggtgactaatgagaggaattttgtgagtaaaggagcttagtagcaacaggaaagtataagagctgtaaagcagaagtggaactgtgggtttaagcttggtatatcacttccttgccagacataactgttcgtttctaacgtggctgtagttggcattctctctcataccaagataccttttgaggtaagtcagattttcttttagttaaaaagactgccttttcaagagtaccaggatcacataaatggaaaatttgtacatgtatgtagctgcaagattatrggaggatagattagagatgatgttgatcctgtgaatgtctgaaaaagattggtagcagagttaaagcttttgttctcttgagatagttgcttgtgaaaatagaacaagtgaatctgatgccatgtgatttgtgaaaatttgaataatgcccaaagtccttaaattgttaatgtgatataaatgttaatattttgaaagctcttctaaatgttataatataacctcacttatttggaatgtacaggtagaaagccaatctgagttggtaaaagcctgaaaaatggaatatatgtgactttgtgtggtatttattttaaatttgagtacatacaatatctaagtcgttttttattttttaatttaattttatttttatttatttatttatttatttttgagacggagtttcgctcttgttgtccaggctggagtgcaatggcgcaatctcggctgactgcaatctccgcctcccaggttcaagcaattctcctgcctcagcctccctgagtagctgggattacaggcatgcgccagcacacccagctaattttgtattttttttttctttaagtagagatggggtttctccatgttggtcaggctggtctcgaactcctgacctgaggtgatctgcctgcctcggcctcccaaagggttgggattacaggcgtgagccactgcgcccggccgctaaatcgttttttttaaaaaaatcctgttgagatgactttagcaaataaatatgattagtaactagcgacattcatgtgcatgcagtctgtgtggatacaataccatggactcagtaggctctcaataaaaattaattgtaaagttttctcctaagtaggttaagaatacttaatgcagcaagcccatcttcaaagatagtacttagagcagattttaccttgaatggcataccaagagtggggcaataagaacagtagatcttgggtatggacaatagtaattctcattatctgtagagaatttaaactacagtaaacccactaaaagtctgttttttatttccagtaatttttatgtaccagtaattctaaactgtgtcaataataaaatagtcctccatgaaaaatctctcatggatctggattttaaacaatttctgtagtctctgttaagttttagtatatgaatttaaacttcaaatcagcacattttaattatttttttaataaacagtatattctacatggaaattaatttagagaactcccactcatacaattgtccttcaacaaacatggacccagctattgtatatatttccaagtaaactcataaaagttcagggtaattcaagatttaaggcacagttcatgttcgcaaccctggtggtccatattcctgcatttaaacagtagattctttgtaaacaatggtagcacagtgattttaaggatgaagagacagaacttgattacttaaacattgttctatgtgaccacttagagtttttgtttatgaaatttaagagtgaaacatagtgtaaattttaaggtataatatttttgtttcatggaattatcctcttgaataattttttttgagacagggctttgctctgttgctcaggttggagtgcagtggcacaatctgggctcactgtagcctccgcctccgccgttcaagcaattctcctgcctcaacctcccgagtagctgggactacaggcgcccagcaccacgccttgctaatttttgtatttttttcagtagagttggggtttcaccatgttggccaggctggtctccaactcctgacttcaagtgatctacccacctcagcctcccaaagtgctgggattataggcatgagccactgtgcccggccccctcttgaataattgaattcaaataatacatttaactttgaatttttttcttttttcattgttaatagttgcttcaaaactaaaaaagaaatcaagaaaagaggtgtaatgttatttagtactgcaaacaaaccagtacattggcatatgtgttttttattttttgaaaatgttaatttcattacaatttccttttttgtactataatacttactttattttctattggtatataagtggagttgaatttccactgtctctttcctattgtttcatttcatgattattactgaaaaataattttatcacatagaggaagaggtaataaaaaaatgatccctctgacctgaggtctggagtttgagaccagcctggccaacatggcgaaactctgtctctactgaaaatacaaaaattatctgagcgtggtggtgggcgcctgtaatcccagctacttaggaggctgaggccagagaatcgcttgaaccggggaggcggaggttgcagtgagccaagatcgtgccactgcactctagcctgggcaatgagagcggaactccatctcaaaaaacaaacaaaacaaaacaaaacaaaaatgatccctctggctgggtgcagtgactcatacctgtaatcctagcactttgggaggctgaggcgggcagatcgcttgagctaaggagttcaagatcagactgggcaatctggtgaaaccccttctccaccaaaaatattttaagaattagccagatgtggtggtgtgcacttgtggtcccagttgctcgggaggctgaggtgggaggatggtttgagcctgggaggcagaggttgcagtaagccaaggttgcaccaccgcactccagcctgggtgacagtgtgacaccccatctcaaaaagaaagaaatccctctggatgtcagatgttctaagtatattaatgggcccaaatgatcaccacgtgaatggtattcagtttttaagtgagttcagttatgtgtttgatatttggaattttgcatgtactctatgaagaaccattcctttggctacacagttcacgtgccaaaatggaatatcagcgagtacatatacatgtattgaaaacaaaaatgatccactattccaattgtggtataattaagctattttaaaacctagcaagtacaggccgggtgcagtggctcacgcctgtaatcccagatcacttgaggtcaggagtttgagaccagcctggccaacatgatgaaaccctgtctctactraaaatacaaaamttagctgggcgtcgtagtatacgctggtagtcccagctactcgggaggctgagacaggagaattgcttgaaccaggaggcggaggttgcagtgagccaagattgtgccactgtgctccaggtgccactgctcctgagacagagcaagactctgtctcaaaaaataaaaaataagtaaaaataaaacctagcaagtacatatccatgtagttattgatagaatcctagtaattgctgacatttatggaatacttgccatatgtcagacaccattctatgtgctttatatatactaatttattttttttgtagcagtcccattggggagttatagttattaatgtcattttacagatgaagaaactgaggcacagagggattaagtagcctgctcaagatcacacagctagtaaggaaccaagattcaaacttgggcagtgtgattcagagactttaaattcaacgctggtgcctcactgcctcacgtatgtacacaaagttgtgcctaaataagtttgaggaatcattaagtagtaggaaaaacattctggattccagagttccagctccagttcattctgtaactatgagtaagggaaataaatcaaagtctctaatttagagagacttgtgcttacttcatctagaagttctctaagtttttttctaactctaaatttttatgattctacgattattttcacataaaggagaaaatttgtctttttactttctaacagactaaaagtgaatcagaaaaataaagaaccagcatcaaatttgaaggtagatacatttttgatgttttgtagttacaaaaatatactattcttaaaccttttatgttcgttatttgtatgactacagaaagcccataaacttctgaataattgattgttgcattctaactattgactggaatacaaattcgtatttttaatatatgccactttgatataattaaggtaacctgagctattgccttgatcttagtgccatataaagtaaaagctytttgggaaaattaactttctaagtggaagatagatcatatactactttttttcctcttctttcccacaaagactaccaccttattaaaatgacaagacatattaggcttctgtctgtgataatacatgtaacatttttttcttggggaacacaaaacataaaaagtggctttcataataaaagaaatgtaattccttgtccttacaaaatccctgtttgcatagtatgaagtggctcctcaccaccatctgatcttttaataaaattctatttccctcttaacccaactcctagccttttatttggaaatagtaacagtagtttttctgggacttaaaaagttgtgaaagggggaaaaattaaacatgtcaacaaagtgaaacttctgcttcttactaaaaagtcctttgaggtatcactaagtaaaagaaaaacattgatatgaaatttgcatatatattctactttccttctcttcgtgtattactaaaattgttatataaatattctgttcttgcttatttctttatagtggccacaaattctattaaagcagaagaaatagtggtgaaccataaaagagaaccagtttcctctctattctgcaatttagaggaaaaattttcatccaaggacagatcaggtaagtattcattctttttaatgttttggggctatatatgtagccataatttgttaattataatcctagatcattggtttgatttaactaagagacaataaggtagtctctgcaatatggaaaattccgtaatttttaattttatgggtttcagttctgtttgagaagactgtatgtatagaagtatgttcaattaggctgggcacggtggctcacgcctgtaatcctagcactttgggaggctgaggtgggcggatcacaaggtcaggagatcaagaccatcctggctaacatggtgaaaccccgtctctactaaaaataaaataaaaaaaaagattagccaggcgtggtggcgggcgcctgtggtcccagctgctctggaggccgaggcaggagaatggcatgaaccccggaggcggagcttgcagtgagccgagatagtgccacagcactccagcctgggcgacagagcgagactctgtctcaaaaaaaaaaaaaaaagaagattgttcaattatatgttaactatttatttagaaaagtagaaacaacaaagtgctgttgctggttaagtttaagtctggtctttgtgatttaaaaataacatgaatagaattcaacttttaggctgaacacagtgactcacgcctataatcacagcactttgggaagctgaggcgagaggatcgcttgagcataggtgttccagaccagcctgggcaacagagtgagagcccgtctctataaaaaaataaataaataggccgggcgcggtggctcacgcctgtaatcccagcactttgggaggccgaggcgggcggatcacgaggtcaggagatcgagaccatcccggctaaaacggtgaaaccccgtctctactaaaaatacaaaaaattagccgggcgtagtggcgggcgcctgtagtcccagctacttgggaggctgaggcaggagaatggcgtgaacccggcaggcggagcttgcagtgagccgagatcccgccactgcactccagcctgggcgacagagcgagactccatctcaaaaaataaaaataaaaataaataaataaataaataaataaataaataaaaataggcaggcatggtggcacacacctgtggtcctggctacttggtaggctaaggtgggaggatagcgtgagcccaggagttcgaggctgcagtgggctatgatcaaaccattgcgccacagtctgggtgacagactgagaccccatatcttaaaaaaaaaaaaattagttttggagaacaggagtctggagaaaagtccaagttgctgagcttagaaaaacgaaggctcggctgggcacggtggcttacgcctgtaatcccagcactttgggaggccaaggcgggcagatcaggaggtcaggagttcaagaccagcctggccaacatggtgaaaccccgcctctactaaaatacaaaaaaaaaaaaaaaaaaaaattagccgagcgtggtggtgagtgcctgtaatcccagctacttgggaggctgagggaagagaattgcttgaacctgggaggcggaggttgcagtgagccattgcactccagccagggcaatagagtgagactccgtttcaaaaaaaaaaaaaaaaaaaaaacgaaggctcggggtgacaataatgcttttccagtagatgagatgctgtcatactgaggatggtgcctgttcttttctaacctctacgaaggaaaaacagcaggaaaaaatagattagaaaaatcaaagattttgaaattaagaatatttgaggttgtagttatttactttgggaaattgtagaatcctctttctagaagatcttccaagtagtgaacatctgctgagaaaagcttatctaccacttatacacccatcattaggtcttctaaccttatgatgctatggtttactttgaaacgcagacagttatttatktctaaggctaacatgatatatttctaatgatagaataggtaaacttatagaactttaagactatggagaatgatagttattttaggagcacagaaatagtcatatgtcttatccaatttattccattcttggccgtgtgaccatcattaacatatttagtttttcttggctcttgtaatactctccaagtacatatatgttaccatcgacagaaatggaattgtggactcttaatgtatcatctctaccaagactagagagaaggatgggaggacagatttaaagaacagtgtgttcaagtgggattgttaagaatagttccccgaaatgtgggatagggtggagatttcaaacaatgagaaacaggctacagtatggtaatctgaaaatctcatgtaggagcaaggaaagggctgttgttctttctactgagtcagagaaagaggagaaattaagggaagtaagtggttatattggaaaaggcaccttgtaatctaaaagagaaccagctttttattagagtgaactgcacagaagtgaaaaataaattgagggtaaaaagggtttgtcctcaaagaaacagactttccagtagatattgttgatgaatagggaagaaggggaagaatgactgagatgttgaagaattgggtrtagagtgaatgtggttaggagggtttgagagtgaggatgggagggtcagaggtaaaaggaaaaagaggcttgtgcatatggggtgagcaaataaaatggaaatgaaagaagcatttgagtaggagaaaaaatagacacaagttgaggaaaaattaggaactttaagataatatttctttgtaagcaaggagatgttaaggatgaccagttatgtatactgaggaaatatactcaggaaaatggtcagagtgtgtgtgtgtatgtatgtgtgttgcaggtggaaggggatgataattaccccaggcctgagaagggcacacacatatgaaaagtaactaggctggttgaccctcttatttcagagaagttttcctggaacaatgttgacagacatatcctgtttggattttttttttcttttatgtgacggagtattgctctatcccccaggctggagtacagtggcgtgatctcagctcactgcacctccacctcctgagttcaagccattctcctgcctcagcctcctgagtagctgggaccacaggcatgcaccaccgtgcccggctaatttttgtatttttattagagacggggttttactatgttggccaggctggtctcgaactcctgacctcaggtgatccatccacctcggcctcccaaagtgctgagattataggcatgaaccaccacgcctggcccctatttggatattgattgtagactgagtttctaggcttcaagggcataggaagtctttagaaagacccaggtatgtatgagaggcagcgcttagggtagtgagggtggggagcactatgatttttttctcctttacatttctatacagagctatagcactttgtagagacatgcataattcaagactatttctggcagcaaagaatggaaagtttggtattgccatgtggcagtagcttaagagtttataaatcacattcaccagccagcttttttttttttttttttttgagtcagagtcttgttttgttgcccaggctggagtatagtggcctgatctcagcttgctgcaacctctgcctcctgcgttcaagtgattctcatgcctcagcctccgaagtagctagaattacaggcatgcaccaccacacctggctaattttgatgtttttagtagagatggggttttaccacattggccacgctagtctcaaactcctggcctcaagtgatctgcctgcctcggcctcccaaagtgctgggattataggcatgagctaccgtgcccagcctccaaccagcttttgaaacttttttttttttttttttgaaacagggtttctcttgtcacccaggagtacagtgacaagatcatagctcaccacagccttgaactcctgggctccagggatcctcccacctcagcctctggagtagctgggactacaggcctgtgccatcacagtcagctaattaaaaaacattttttttggacacatggtctcactatgttgcccaggctggtcttgaactcctgggctcaggtgatcctcccacctcagcctcccaagtagctggsattgtagttgcaagccattgcgtctggctgcaactttaattcttgatgaattattaatttggggaatttgtgttatttcatatttagcatataaagtgaatctttattattaaatcattttacatttgcagagactgcaactatacactattttttttcactttttttgaggtaaaatatacatataaaatttaccatctttaccacttttaagtgtacggtttattggtaataaatacatttatattccttttttcaccctttatccttccctctcctctatccttaatggcctttggtaaccaccattctactctctgtcttcatgagattcattttttttagcttctatatatgagtgagaacatatttgtctttctgtgcttagattattttgcttgacataattggcctccagattcatctatgttgctgcaaatgacgggattttattcttttttttatggatgaataatactccagtgtgtacgtatatcctattttctttattcatccattgataggcacttaggatgatttcatattttggctattgctaatagtgctgcagtatagacgggagtgcagatagccctttgatatattgatttcctttcttttggatgtagactccatagtggaattgctggatcagatggtagatctatttttaggcttttgagaagccgccatactgttctgcatagaggttgtactaatttacattcccaccaacagtatatgagggctttcccttctctacatccccaccagtatcttttattgatgatatttcattgtggttttgatttgcatttctctgattagtcatgttgagtgttttttttaatacacatgttgaccatttgtatgtcttcttttgagaaatgtctgttcaagtcttttgcccatttaaaaatcagattatatgtatatatttttttgctattgagttgtttgagctccatatatattctggttattgattctttgtcaaatggatagtttgcaaacatagtcttccattctgtgggctgtctcttcaatttgttgattgtgtccttgtgcagaagctttttagcttgatgtaatcccatttgtctatttttgctttggttgcctttgaggtcttaccccaaaaatctttacccagaccaatgtcatggaacatctctccaatgttttcttctgtagtttcatagtttcagcattaaatatttgtctttaatctattttgatttgatttttgtgtatggtgacagctaggggtctagttaaattcttctgcatctggtaacctttccccattgtatgttcttggcaccttggtcaaagaggagttggcaataaatgtgtggatttacatctggattctccattctgttccattggtctatgtgtctgtttttatgccagtacyatgctgttttggttaccatagctttgtagtaaattttgaagtcaggtagtgtggtgccttcagctttgttctttttgctcaggattgctttgtctattccaggtctttggtagttccatataaatttaagaattttttttcctatttttataaagaacgccgttcgcattttgatagagattgcattgaatctgtaaattgctttgggtagtctttatcattttaacaataattcttccaattaatgagtatggaatatctttccttttttgtgcgtgtcctcttcaatttctttcatcagtttcatggttttgcttgtatagatctttcacttctttagttagattgattcctaggtattttatatatttttgtagttattgtaaatgaaattgctttatttttaatttttgtgggaacatagtaggtatatacatttatgggttacatgagatattttgatacatgcatgcaatgcataatcacatcagggtaatggggtatccatcccctcaagcatttatcctgtgtgttacaaacaatccaattatactcttagttattttaaaatgtacaattacattattttttactgtagtcaccctgttgtgctagcaaatactaggtcttattgatcctttcttactaatttggatccattaactatccccacttcccccaaccagccccctgctccacccttcccagcctctggtaaccatctttccactctctacctccattagttaaattattttaatttttagctcccacaaataagtgagaagatgcgaagtttgtttttctgtgcctggcttatttcacttaacagtgacctccagttccatccatgttgttgcaaatgataggatctcattcttttttttatggctgaatagtactccattgtatgtatgtaccaaattttctttatctgttcatctgttgatggatgcttaggttgcttccaaatcttagctcttgcgaatagtgctgcagtaaacatgggagtgtagatatctctttgatgtactgacttcctttcttttgggtgtatatctcagagtgcaattgctgggtcatatggtagccctatttttagttttttaaggaacctccaaattgttctccatagtggttcccaccaacagtatgtgagtgtttccctttctccatatctcctccagcatttattaatgtctgtcttttggataaaagccattttaactgatgtaagatgatatctcattgtagttttgatttgcatttctctgatggtcaattatgttgagcaccttttcatatgcctgtatgccatttgtatgtcttttgagaaatgtccgttcagatcttctgtccattttaataccagattatcaggtttttttcctatagagttgtttgaactccttatatattctggttataatcccttgtcagatgggcagtttgcaaatattttctccattctgtgggttgtttcttttttgattatttcctttgctgtggagaagccttttgttgattgtttcctttgctgtgtagaaaccttttaacttgataggatcccatttgtccattttggctttggttgcctgtgcttgtggggtattactcaagaaatctttttttttttttttttgagacagagtctcgctctgtcgcccaggttggagtgcagtggtatgatctcggctcactacaagctccgtcttctaggttcatgccattctcctgcctcagcctcagcctcccaagtagctgggactacaggtgcccgccactatgcccggctaattttttgtatttttagtagagacggggtttcaccgtgttagccaggatggtcttgatctcctgacctcatgatccacccacctcrgcctcccaaagtgctgggattacaggtgtgagccactgcacccggcctactcaagaaatctttgcccactccaatgtcctagagagtttccccaattttttttagtagtttcatagtttgacatcttagaattaagcctgtaatcttattttgatttggatttttgtatatggtgagagataggggtcgagtttcattcttctgcatatggatatccagttttcccagcaccatttattgaagagactgtcctttccccaagtatgttcttggcacctttgtcaaaaatgagttcatgtggccgggcgcggtggctcacgcctgtaatcccagcactttgggaggccgaggcgggtggatcatgaggtcaggagatcgagaccatcctggctaacaaggtgaaaccctgtctctactaaaaatacaaaaaaaaaaattagccgggcgcggtggcgggcgcttgtagtcccagctactcgggaggctgaggcaggagaatggcgtgaacctgggaagcggagcttgcagtgagccgagattgcgccactgcagtccgcagtcccgcctgggcgacagagcgagactccatctcaaaaaaaaaaaaattagttcatgtatggatttatttctgggtcctgtgttctgttccattagtctatgtatctatttttatgccagtatcatgctgttttggttacagtaggtctgtagtgtaatttgaagtcaggtaatgtgatttattcagttttgttctttttgcttagcatagctttggctattctgggtcttttctggttccatataagttttaggattgtttcttctgtttctgtgaagaatgtcattggtattttgatagagattgcattgcatctgtagattgctttgggtagtgtggacgttttaacaatattgaatcttccaatctatgaacatgaaatatcattccattttttgtgtctttttcaatttcttgcattggtatagttttcattgtagagagctttcacttctttgattaagtgaattccttgatacttkatttgtagctattgtaaatgggattactttcttgatttcattttcagtttgttcacttttggcatatagaaatgctactaatgtttgtttgttgattttgtatcctgtaactttgctgaattcgtttatcagttctaaattttttgatgaagtctttaggtttttccaagtataagatcataataatctgcaaacaatgataatttgatttcttcctttccaatctgaatgccctttatttctttctcttgtcctattgctctaggtaggacttccaataccatgttgaataacagtggtgaaagtgggcatccttgtcatcttccagatcttagaagaaagactcagctattccacattcagtatgatactagttatgggtctgtcatatatagcttttattatgttgaattatgttccttctatacccagtttttttagtttttatcacaatgaaatgttgaattttatcagatgctttttcagcatcaattgaaataatcatatgatttttgtccttcattcttttgatatgatgtatcacattgatttgtgtatgttgaaccatccttgcatccatgggataaatctcacttggtcatgacaaatgatatttttagtatgttgttgaatttggtttgctagtattgtgttgaagatttttgcatgagtgttaacccgggctattggcctgtagctttttttttaaatgtgtttttatctggttttgatatcagggtaatactgaccttgtagaatgagcttggaactattccctcctcctctctttttcagaatagtttgagtagtattggtattagttcttttttaaatgtttgataaaattcagcagtgaagtcagaggtctcyggctttcctttgttgggagacttcttaatatggcttctatcttattagttgttattagtctgtttaggttttggatttcttcatggttgaatcttggtaggttgtatatgtctaggaatttatccatttcttcttggcttttcaatttattggcatgtagttgctcacagtagcctctartgatcctttgaatttctgtagtattggttgtaatgtctcctttttcacctctgattttatttatttgtatctcctctccttttttcttagtctggctaaagatttatcaattttgtttatcttttcaaaaaamcaactttttatttcattgatcttttgtattttattcattkcaattttatctctgctctttattcttctactgatttttgggtttggtttgcttttgcttttctatttcttttagatgcttcattaggttgtttatttgatgttttcctactttttaaatgtaggtgcttatagctataaacttctctctcggtattgcttttgctgtatcccataggttttggcatgttgtgtttccattatcatttgtttcagtaaatgtttcagttttctttttaatttcttcattgacccactggtcattctggagcatattgtttaatttccatgtgtttgtatagtttccaaagtccctctcattattgatttctagttttattccattgtggtcagaaaagatgtttgatattatttcaatttttaaaaatactttaagacttgttttttgacctaacatatggtctatccttgagaatgacccatgtgctgaggaaaagattgtgtattctgtagctgttggattaaatgttctataagtatctatttggtccatgtggtctatagtacagattaagtctgatgtttctttgtttattttctgtctggaagatctgtccaacgcttaaagtggggtgttgaatctccagctcttatcatattggagtttatctctttctttagctcaaatatttgctctatatatctgggtgctctagtgttgggtgcatatatatttaaaattgttatattctcttgctgaattgaacccttcattattatataatgaccttatttgtctcttcttaaaagtttttgtcatggaatctattttgtctgatataagtatagcactcctcttttttggtttctgttggtatgaaatatctttttctgtctctttattttcaatctatgtgtatcattataggtaaagtgtgtttcttgcaggcaacagatcattgggtcttgtgggttttttttgggttttttgtttgttttcttatccattcagccaccctgtcttttgattgaagagtctagtccacttacattaaaggtgattattgataggcaaggacttactcttgccgttttatttgttttctggttgttttatggtcttctcttccttttttccttccttcctgttttccttttagtgaaggtgattttctctggtggtataatttaatttctttttattttttgtgtatctgttgtatgttttttgatttgagattaccataaagcttgcaaatactatcttataacccattattttaagatgattacaacttaacactgmttgcatagacaaactaacaagcaaaaagaaaactaataaaaactttaacttcatcctcttgctttttaactttgtgtttctatttatatcttacagttctgtctatgttttgaaaagttgttgtagttattattatcattattatttgagacagagtctcactttgtcacccaggctagagtgcagtggcacaatctcagctcacttcaacctctgcctcctgggttcaaacgattttcctgccttagcctccctagtagctgagattacaggcatgcatgaccacagctggctgatttttatatttttagtagagacagggcttcaccatgttggccaggctggtctcgaactcctgacctcaaatgatctgtgatctgcctgccttggcttcccaaggtgctgggataacaggtgtgaaccaccatgccaggcccatagttattatttttgattggttcatcatttaatctttctatttaggataacagttgtttacacaccacagttcagtgttataaaagtctctgttttctgtgtacttactattgatagtgagttttgtactttcagatgatgtcttactgctcattgacatccttttctttttcttttcttcatccttacttctgatagaagtactccctttagcatttcttgtaggacaggtctgatgttgatgaaatcccttarcttttgcttgtctgggagaatctttatttctccttcatgtttgaaggatatttttgctggatacattatactattctagggtaaactgtttttaaccttcagcactttaaataaatcatgccactctctcctgccctgtaagttttccactgaaaagtctgctgccagacatattggaggtccattgtatgttatttgtttcttttctcttgctgcttttgggatcctttctttatccttaacctttgggagtttgattattaaattccttgaggtagtcttctttgggttaaatctgcttgccttctctctctctctctctttttttttatttggcggggtggcaggtacagagtctcactttgttgcccaggctggggtgcagtagtgcaatcttggctcacctcaacctctgcctccgggttcaaatgattctcatgcctcagcctctcaagtagctgagagcataggtgtgtgccaccacgcccagctaatttgggacagggtttcgccatgttggccaggctggtctcaaactcctggcctcaaatggtccacctttgggaggctttagcctcccaaagtgctgggattacaggtgttagccaccgcacccagccagcctttttgtacttggttattaatatctttttctaggtttgtgaatttctctcttattatccctttgaataaagtttctacccctctctctaccttctctttaaggccaataactcttagatttgcccttttgaggctattttctagataatgtaggtgtgcttcattctttattttgctttaatctctaactgtattttcaaatagcctgtcttcaagctcacaaattctgtcttatgcttgatcaattctactattaacagtctctgatgcattattcaatatgtcaattgcatttttcaccttcagaatttctacctattcttttcaattattttaatctcattgttaaatttatctgatagaattctgcattccttctctgtgttatcttgaatttctttgagtttccttaaaacagcaattttgaattctctgtctgaaagatcatgtatttctgtttcttcaggattggcctcgcaccttatttagttcatttggtgagggtatgttttcctggatggtcttgatgcttgtggatatttgctggtgtctgggcattgaagagttaggtattcattgcagtattctcagtctaggcttgtttgtatccacctgtctcgggaaggttttccaggtattcaaaaggactttgagtgttgtgatctaagatctaagccatgtctgcattatggggcacctcaagcccagtaatgctgtggttcttgcagacttgtagaagtaccgtcttggtgatattggataattctggaagaattctctggtttaccaggcagagattcttattctcttcccttactttctcccaaacaaatggagtttctctgtgctgagccacctctggctgggagtagggtgacacaaacacccctatagccaccaccagtgggactgtgctgggttagacctgaagccagcacagcactgggtcttgcccaaggcctgctgtaaccagtacctggctgccacttatgttcattcaaagccctagggctctacagtcagcatctagtgaagccaaccaggcttgtgtccttcccttcagggcggcaagttcctgcaggccctgggcaggtccagagatgccatctgggagctaaggactggagtcaaaaaccttagaagtcttcctggtgttgtattccactgtggctgagtgggctttcaaaccatgaaaaacagttctcacttttccctctccttttcacaggcagaggaccctcaccttatggtcactaccacctaaggcccacagggagtactgccaggctaccaccaatgttcacttaaggcctgagggctcttcagttagcttgtggtgaatgctaccaagcctgggattcactcttcagggaagtggggtcccctctggcccaggccatgtccagaaatgccatccacgagccaaggcctggaatcagggaccccaagagcttgattggtgctataccacgttgtggtagagcttgtacttaagatgcaagacaaagtctccactttttcctctgcttttctcaagcagaagaaatctcttaccatagccaccacaggtgggaatgtgctgggtctcacctgaagccagtgtgtctcccagtctcacccaaggcccatgccatactacctaagtatcactattgattattcagggtctcaagggctctttagccagcagatgatgcatcctgccaggaataggtccttcccttcaaggaatcagtttccctgtgggtccagggtgtgtctagaaatgtcatctggggagctagggcctggaatgggggccacaattctgtctagtattgtgtctagtattgtatccgactgtggctgagctggtgtccaaggtgcaagacaaaattcctctttactcttccctcttctctcctctcaagcggaaagggagtatttgcactacctccttttcaacaccaggcaatacagcttgtggctcttttgtgacttttttggagccacagctgtgttgcctggggttgggggacgggtagtgcaagcactcccttaggtgccctggcttgtgtctcagtaagtctcatgaccggtaagtccactggctccaagcccagctcaacactaaaacttgcagttcttggggcctagactgcctttacggtttatttagggccccagagcacttcagcccacaatgaggaagcttgctggaactcaagttccagctgctgggatgggtgattctcctctggctagggcttgtctgaatgctccctctgtagatgggtgtcagctaagttcagcccagttttgctttatactgtgacagcactgagttcaatgtaaagtctcacagtctctgtgctctcactctccccaagcacacagatttcttcacaacacttggctactgtgatgggataggggaggggtagcatcaacaattcaagactctttcctactctaagtttctctttcagaactatgaagttaaaatcaggtgctgtgagtgctcacctgatatttggttcttataaaggtgctttttttgtgtgtgtagatagttgttgaatttggtgttcctgcaggggggatgattggtaggaccttccattctgccatcttgctccatccctcgagattgcttttttgattgctttttcagattgtttgcttttggcgtatagaaatactattgatttttgtatgttgatttttgtatcctgcaactttactgagtttattagctcaaacagtttttttttggtggagtctttaggtttttctgtgtataagatcatgtcatctgcaaataaggctaatttgacttcttcctttccagtttggattctctttatttctttttcctgtctaattgctccagccaggacttccagtattatgtcgaataacagtagtgagagtgracatccttatcttgttccagtccttagaggaaaggcatttgatttttccccattcagtaggagttaggtggtcatacactatttaagtttcccaattaagagtgatgataatagctagcacttgttgaatccttcctatgttccaggcattttacatgtataaattaatttgatactcagatatccctttgaatgaggcattatcattatgtccccttctaactccgccctcatgtatagatgaagaaagtagacacaatgatttttctcccaatgtcacacacccattatagggtgcaacattctactgtggaattgggaattggagtctagccttctggctccagagcccattctctgtatactgtatagctacactacatatatttatatatataaaaaactatgagttgagggttgctgggaagtgatgatactttgaatggttggtgacttgagtatatttataggtggcacaatttatgttaaagtagcttttgtgagctgctacatggaataaaaatttattgcttaaacattttacataaagttgtttatgccaatataatcagtgatgtgaggagctattgcctggagcaggccggctgctgttattcaaaagaccacatcaggtggtagaaccttagtgaaatttttaccagggcctgactcagtctttttgtcttagaaacctaatctgatcagtagtgccccagagaagaataaagtagtttgacaaccttataaacctaatatgtaatgccagaatgcaaatttattaacatactaggagataaaactgttacataaaccagttgaaccataatgatcaagtcattttctttcaggtggtggacctagatgggaaacccaaattataatcaagagatttcttggtgagcaacaggcaccttaaatattttttgttttttcacaacgtttatctatttcagaaatacctcaggtatgtcatcaacaatagctgctattggcgtgtactgtcagtctttaacttctaaatagcctccaccccagggcccgaccaccaggggctctgctgccatagaaacagttgttaacaaacatgggtattttagagaatctgtaggttcagaattgaggaaaggaagagtccatgaaaagcagagttgctaaagggtgctgctaatttcaaggatagactcctaagtaggatgggtttgcttgagtggggatttctgtacctaaaatgtatttctataacactgcctgagggacttttttttttcacttctgttaccgagtctgaaatttcaccaaatagagtttgatttcttaaaattataaatattcataagtggcagatattcttagtggcttccataatacccattccctattgctcaccttaattttgttagggcagcaatgtgcccagcttgaaataaaaaatcgaatagttgaaaccagtcataacaatcctgttctcctttgccagtgattaagaagggaagtctgctgagttcagggagggcttttgctttcctgataaagaggacagaggtggctggtactttactctttctcctctctttgtgccttaaatggaatcatgaagccrggagctatagyaggcatcttgtaaccatgagatgacaagcatgaggctaaaatattctcacaagctgtggaccttggagtagatggacagaaagagactggggcattgttgaacagcagttctggctttggactacctacctccagacttaacagagaaagatgagaggaaagttattacccttgttatgtgaccgcaaggcatttgattaacttgtgcctgccgttcaatggcaggctggctctgtggaaatggaggctataatataaggagaagcaataggaaaaatctggaatattggcatgtattaattacttcttgtgacttttcagtaggatcctatagaagggggtgaactcaaattagtgctcctcagcattgaacgcgcagtggtggtggtggggatgcagttcgccatagaagtattctgcctttagctcctgctctaaattgacaaagaacctcataatttggaattttgcagggattagtggtagtacctctccacctaaagctattgttagaattgcctcaagtctatttaagagttcataggtcagcagctaagagataagaatccccaggcctaaagattatttggaagtgttttttttttttttagctatggttattcacacaaggagttgatgtgaagcaaataaaacagaagtttttccctccaagcaattgtcatatccaccactctaagtcaaaccagtgtgaagtgggctgcaaaagctttggagcccctgggaagggtgtctgtttagaaactaccttagatgtcgccaaagagggcaatgacaaagcagatgctcctgagacttatagcaggacctagcagattgactaaccagggaatttactttactgcctgccaaggaatctgctgtttctgtccttaagataatggtgtggattgtgggctgttgacaatgtgtgcttcccattattcccttttctgaatgggaattttaatggggttactctgttctttctttttcacagttatattaacaaaggaggatggcttagagatagatatcttatcttttgcctattcagatggtcagataggaattgccgtatttgcacttgatatagcagatagaaaatcacccagggattctgtttaaagctgtttgcagtaattggatgagacagtagggttgtctttcttgaggagagaatgagtatgttctgtttaatgcataggtgtgagaagaagtgtgtatgtgcatgttgggttgaggactgtgacagacactattggttatccaatccaatatctattccttattttcaccataaaaattagaaaagttaaatactagatttttaaaacttattgctacagtggccatgtaatacagttctagtccatgagtctgctgggggacttcacggaaggctttcctcttttctgataaaagggtcagacagggctggggtaaccccttttctgggtttgaccttagatgtgatgcttaaagctgaagtgaccatcttggaaccattaggcaataaaaatgagtacaaaaagttaacacatttaggatggtggagaaaaaatactgaaaatattgatgacatcattgattagtgaaccaactttagctgttgctctgttcaagattttgtgtcttgtgagaaatttatccatatttgtttatgctactgtgaactgggttgactgttacaacctaaagctttctaaactgatacattataaaagtctcttttatatgctacaatatcaggtacatttttgtttttaaccatgatgtcctattagtaaataatggttatatgaagtaagggcaagccttatttgtttattttttgaaatacagatgtgatttcattatgtttcccaggctgatcttgaactcctggcctccaggtatcttcctgccttggtcccctaatgtgctaggatgacaggcgtgagccaccacaactggccgggaaaagcttttggggaaaaacaaacaaactaaaacaaaacaaaacaaaaaaacttttacagtaggctgattcaattcacatgtaaaattgcatttttgaggtgttactattgacagacatcttcttgatacatagcccagtttacattttacttttaggagtagaatgtcagcatagctaagacttgcactttaatataattagggaatatcttctgaaaattggtttcccatgtagtaagaaatgctacaaacttttacaaccaaataaaagtcttcagaaagaaattgctgagtccagtatgataggttcaatatagtcatggcttttgaataagatagtattttagttctgcatcactgactgctgggaaatgtttattacttccaaagtgatattttactctaactgccttatatcagaacatctacttttactttcagttgtccttttaaatgtttttgttcatcatttcagaaaattttttgttccaattgttgactcaatcatatgaggtttaagattttacttttctatttttgcctttctaaaaattaattcatggtaatagccatttgtgccagctttttatatcacaaggagatgcttaaacaacaaccaaaggaaaatatgtggcaaagaagaatagatatttttctgtggatgtagtttatagaaaaattatatttggccttcaaagaaagtttttaagattttatgtttgttatttattcacatactgacaagttgtgatcaaaataattttcctagaaaagtagtctgaagttttttcattttgtttatgctaaattctaaaaccaaaagcttttaaaaataatcggaaaggtcctgacactgaatattctgttatttattaaatgcctaagacatgatttggggggtattgagatctaatggtctctactgtggttttcttggtggctttgtacacaatattttgccattcttttctgatgtaccctgagtcaggcctcacaaaaactaacaatattgtaagacttgcaaagtcagcatctaaggtgattcttaaatgtatgataagggtattttcaaccaattgactggaaaatctttttggtctatttctactgatatttgaacactctattgaagtggtttgaaacaaaccttaaagcttgagctttttcttgatttaaattactcttatttttaagaatgtattattagcatggtggctctgtgcctagcatataaagtcttattagtgggtaattctcctctctacttcttgtttaccctgtgtgctggcttttcttgagtaatgtatgccatacatatgctcattttctttcaccattgaaagcatttatctgtgaataattacagctttattcttcctttccaatttttaggggttttatttatttatttatttgagacagagtctcactcggtcacccaggctggaatgcaatggcacgatcttggctcactgcaacctctgcctcctgggttcaagtgattcttctgcctcagcctccyragtagctgggattacaggcatgtgccaccacatccagctaatctttggagagacggaatcttgctctgtcgcccaggctggagtgctggagtgcagtggtgcaatcttggctgactgcaacctccacctcctgagttcaagcaattctcctgcctcagcctcccgagtagctgggactacaggagcatgctgccatgcctggctgatttattttgtattttaatagagatggggtttcaccatgttgcccaggttggtcttgaactcccgacctcagatgatccacctgcctcggcctcccaaactgctgggattataggcatgagccactgtgcccagccccaatttttatgttttatatttctttttattgtcctaatgtgctagttaagacctccagtatagtggtgatagaaatagtgaaattggacttctttgccttgtttctaatcttaggggaaaggctttcaatatttcaacgtgaaatatgatgctaattgtaggtttttagtagatactctttataagcttaagcaatttcccctagtttgtggagattttttttccctcatgaatggatattgaagttttatcagatgccttttttgaatctattgaggtgacaatataatctttgtcttttattttgttaatgtggtgaattgtattaattcacacatattagaccaaccatgctgataaaccctactggtcatgatatattatccttttactatatcactagatttgatttgctaattttttaaggatttttttggtctatgttcatgaggattaatagtaattttcttttctttaatttcttgtcaagttttggcatcaaggttatgttggcttcagaaaaatgagttgggaaatgttcattcttcagtatctaaaagattgtgtataatgttatctctttttcctgaaatgtttggtggaattcaccagtgaagccatccaggcatagtgtttcctttgtggaaagattttaaattagagattcaaatttgtttatttttgctttgttactgtgcctttgaggtgttattcataaaatcttttcccagaccagtgtcctaaagtctttcccctatgttgccttgcagtagtttcatagattgaggtttttcatttagattgttaatccattttgagttgctttttttataaggttagagggtgggggactagtttcatccttctgcatattgctatctagttttcccagcactrtttattggagagattgtcctttccccaatgagagtccttgatgcctttgtgaaaaatcaggtggctgtagaagcataggttctttaattctgggttctgtattctgttccattggtctatgtgtctgtttttatgccagaaccatgctgttttggttactacagttttgtagtatattttgaagttgtagcatgatggctgcagctttgtttttgtttgtttgtttgtttgtttgttgttgttgtttttgagacagagtctcactctgttgcctaggctggagtgcagtggtgtgatcttggctcattgcaacctccgcctcctgggttcaagcaattctcctgcctcagcctcctgagtagctgggactacaaggtgtatgccaccacacctggctaattttttgtatttttagtagaagcggggtttcaccgtgttagccaggatggtcttgatctcctgaccttgtgatccacccgccttggcctcccaaagtgctgggattacagacatgagccaccatgcctggcctgcagctttgttctttttgctcaggattgctttatctgttttgagtcttttaggatttcttttgctatttaygtgaagaatgtaattggtattttgatagggattgcattgaatctgtaggtttccttgggtagtatgattattttaaacaatgttaaaccttctgatccatgagcatatcttcccatttgtttgtgtcctcttcaatttatttcatcagcattttatagttttcattgtagggatcctttacttctttggttaaatttattcctaggtattttatgtttttgtagttattgtaaatggaattgtcttgattcctttttcagtttagttaatcatccatgtacagaaatactgctgatgtttatatgtcgatgtttgtattctgcaactttactgaattcatttattagttttaagagttttttggtagagtctttaggttttcctatatagaagatcatgtcatctgcaaacaggaacagtttgatttcctcctttctaatttggatgccctttatttctttctcttgtctaattgctgtacatagatagcacttccagtactatgttgaataacagtggtgagagtgggcatctttgtcttcttccagtccatctggtatgatgttagctgtgggtttattatatatggcctttattttgttaaggtattttccttctatacctaatttcatgagagtttttaattatgaagggatgttgaattttatcaaatgctcttttctgcacctgttgacatgatcgtatgktttttctccttcattctgttgattataatgtatcatattgattgatttgcatatgttgaaccatacttgcattcctgacataaatcccacttgatcaggtgtattatcttttttatgtattttggatttggcttgctagtattttgttgaggaattttacatctatgttcattggaggatttatcctgtagtttctctttctgttgtgttcttgtctggttttgctatcacagttatgtgggatatcacagttatgatgtgctatcacagttttttttttttttttttttttytggaggaggagtctcactctgccacccaggctggagtgcagtggcacatctcagttcactgcaacctaccttcccctcccgggttcaggcaattctcctgcctcagcctcccaagtagctgggattacaggtgcaggccatcgtgcctggctaatgtgtgtatttttaatagagaggggaattcactacattggccaggctggtctcaaactcctggccttaagtgatccacccacctcaacctcccaaagtgctgggattacaggcgtgagccaccacacccagctggaatcacttttttttttttttaaacagtttgagaagaattacttttaattcttctttaaaggttcattacagttcaatggtgaagtcatctggttctagatttttctgtcaggagactgttttattactgctttacttttattacttgttattggtctgtttaggttttccatttcttcttggttccatcttggtaggttgtatatatccaagacctcatctatttcctctaggttttcaaatttattggcatgtagttgttcatgatcctttgtatttctgtggtatctgttttgatgtctcatttttcatttctgattttttttaatttgggttttcttttttcttagtttagctactgatttgtcaattttgtttatcttttcaaataaccaattttcatttcattggtcttttgtattttttctctcaattttatttatttctgctctgatctttatttcttctactaattttgagtttgatttttttcttatttttttagttccttgagatgcatcattaaattgtttatttgaaatctttctagttttttgtgtagacatttattactataaacttgccccttaatactgcttttgctgtgtcccataggttttagtatgttgtgtttctatttacatttgtctcatgggactttctgatttccttattttcttttttaatccaytggtcgttcagcagggtggtgtttaatttccatgtatttgtatagttttgaatgtttctcttattgatttgaagttttatccattgtggtaaaataagttacttgatatttcaatttttttaaaaatttgagacttgttttgtgtcctaatatgttgtcagttttggagaatgttccatgtgctgatgaaaaaaatcagttgttgggtgaaacgttctgaaaattatgtccgtttagcctatggtgcagtttaaatccagtgtgtctttgttgattttctggctagatgacctgtttaatgctgagagtgggtgttgatgtccccaactattattgtattgaagtctgtctctcccttaaatctaataatatttgctttatatatctgggtgctctggtgcttggtgcatatatatatatatatatatttgactgttatattctcttgctgaatggatccattgaggattatatgtttcctttttctctttgtacagcttgctttatatatctaggtgctttggtgctgggtgcatatatatatttacgactgttatattctcttgctgaatggatccattgatgattatataatgtctttctttttctctttgtacagcttttgacttgaaatctgttttgtctaatatagatattcctgcttgtttttggtttttgtttatggaatgtctttttccatcccttcactttcagtctatgtgagtctttatggataaagggagtttcttataggcagtatatagttggttcttgtttttattttattttattttattttatttttgagatggagtcccgctctgtccctcaggctggagtacagtggcacaatctcagctcactgcaagctctgcctcccgggctcataccattctcctgcctcagctcctgagtagctaggactacaggcacccgccaccatgccccactatttttttgtgtttttagtagagatggggtttcaccatgttagccaggatggtctcaatctcctgacctcatgatccacccacctyggcctcacaaagtgctgggattacaggcgtgagccaccacacctggcctcttgtttttattttttatcctttcggccaatctatatcttttaaatggagtatttaatccattggcatgcaaggttattattgatgaggacctccttctgtttttatgtttgttttctggtagttttgtgtatcctttgtttctcttttatttatttttgcaattggttggttttctgtaatgaaatggtttgaatcctttctctttctcctttgtatatcagttctaccagtgagttgaatagtttcatgtttttatgagtgtagtaattgtcttttcccttccatatgtaagattcccttgagcatttcttatatagccagtctagtggtgatgaattcccttagttcttgcttggctgaaagcaaagattttatttctcctttattcctgaaggatatctttgctgggtataatactctttgctgatagtttttttctttcagtactttgattatatcctattttctcctggcctgtaaggtttctgctgagaaatccactcaaactaatgggaattccctcatatgtgacttaattcttttctcttgcagttttagaattctttgtctttgacttttgataatttgactgtaatgtgcattgaagaggacttgtttaggttgaatctgtgtgggattatttgaactttctggaattggatatctgtctctctcccaaaacttgtaaagtcttcagctgttatttcattaaatattttttctgcatatttaatgaaatactagcttttttccccttcttttcttcttctggaatgcccataatgcaaatattttttcacttaatgatgtctcatatatcttggaggcctttttttgggtgtgtagtcgggggctgcctgtgttacttcaaaagacctgtcttcacattcagaaattccttcttctggctgatctagtctgtttactgatgctctcacttgcatttttttttttaatttttgagacaaagtctcactctgtcactcaggctggagtgcagtgatgcgattttggcttactgcaacctccacctcctgggttcaagcagttttcctgcctcagccttccaagtagctgggattacaggcacccaccagtatgccaagctaatttttgtattttttagtagagacaggggttcaccacattggccaggctggtcttgaacttttgacctcaagtgatctaccagtcttggcctcccaaaagtgctgggattataggagtcagccattgtgcccagcctcaattgtattttttatttcattaattgaatccttcagcttcaggatttctgtttgattcttttttatgatatctatttctttattgaatttcttatctaaatagtcaatttttaaaatttcattgtgttgtctatctatattctcttttttttgagacagagtctcgctctgtcacccaggctggaatgcagtggtgtgatctcagctcattgcaagctccgcctgccgggttcacaccattctcctgcctctgcctcccaagtagctgggactacaagcgcccgccaccacgcccagctaattttttgtatttttaatagagacggggtttcaccgtgttagccaggatggtctcgatctcctgacctygcgatccacctgcctcagcctcccaaagtgctgggattacaggtgtgagccaccacgcccagcccctgtctatctatattctcttatatctcactgagtttccttaagygtactattttgaattctttttctggtatttcatatagttccttatgattggaatcttactggagaattactgtgttcttctgaaggtgtcctgtttgcctgctttttctgcctatgtttttgttgttgttgtttgttgttttttgtttgtttttgcttacattaatttctatgcatttggtggaacaattgccccctccaattttctgaagtaggcttcatatggaaagacttatacatatagatgggtcttggggtgtcagtttggtggggtgccttggttttgggtctagattatcatgtagtatagtctccatgtagtttcttcagctgtaatctgcactactaacatttatgagtgtctcaggaatctaagatgagagagtttggcagtggtggtgtggctttgctgagagcgaagctttttctcagatcaaggtgcgagtatgcacagtgagtcagccaacttgaagtcttgctggggttggggccttggagttgttactctggctggtggcacaggcacctggttgctcagccagtctgaggttatgcctgccaggggtggcttacaaggctatttcttagacctaaggcatgggtgcacagctgttcagctggcctgagggcatgtctgtcaggggtatcccgggtggctgtttctcaggcctgggatgcagatgcatggcttctaagctgtcctgggtgtgtgtctgttcaagtttgctcctggagttgtttctctggcctaggacgtgggtggcttcttgggtggcctgggtgcatgtctggtagatgtggccaggacttgggtacacagccactcagtctgggagtgtgtctgccaggtgcagcccccagggctatttctcaggcctaggaagtggacatacagctactcagtcagcctgggggcatgctagccaggggcagcctgcagggctgtttcttaggcccaagacttacatgttggcagcttggaggcctaggggcaggtgagctaggagtagcccatgaatctgtttctcaggctctgattgcaggcatggggcctttgggcaagccagaggtgtctcagcaggagaggtgggtgctgcagggctatctctcaggtcctaggcttgtagctgctctacctgtttgggggacagcccaaagagttgcttgtcagctacttggtagccccgagtcctttcatgcttagcttaggggagagtgtgcagcagtttagctggctcagcagcgggttcaccctgggtaggactgctagactattcctccactggaagtgcaggcagtgggaattggtttccctgctgtgtaggaccagatttgcaacccatcctggacccaggctctgcacagctggggttatggcatcagccatctgtgggctgggtggaatgaagatgaaaccccagtgctggaggggagcaatggctactggtcccagagtaggatgcattccagaggtggctctaatttcaagatggcactgtgctgcagcagtgtggctcacaggataggtgggggttggggagtgcacaccttgtgttcataatccagagcagtgtagttgcataaattcccagcagctctccaaactggacttggggctggggatgactgtgggattcacctgtagtaaggactgtgggcatttgcagtggcaataggagctgatgagattcttctgcttaccattttcctgaaagggaaagtctctcctgtctccaaatcaatctgatccaggcatggcagacagtgccacagaggctagatgactctccgttgcttccaatcactgtaggtaccttctgggcttccaatcactataggtacctccccactcccctactgcactccagcactctctgggcaacactccagtgaaatcttagctctttattcattgccttggtccttgcttgtgtgtgtgtgtgtgtgtgtgtgtgtgtgtgtgtgtgtgtgtgtgtgtgtggagtatgggtgccaggtgtctctagtgagctatcttgctgacatcacctcattgtggttttaatatgcatttccctaatagctattcctttagttatttaattttagcaacatttgaaagttgttcttgatttttttcttaccctgctcagctatactgtgggtgtacctcctaagtatgtctttaattatctttctctttgtcctaattcctgtgctttatttcttcactattattaaaacagcctccaaactgctttctctgataccatttcctcagcagattccaatttgtttcccacactgccatcagaatgaattttctaaaatgttgatgtaatcatgtcactcccttgctaaaaagctttcaaagcttcccattgcctttaagataaagtctacaatctggatccagcatgttttatactatctattcttgccattcttttccccaccatcccgccctcctacaaacatacacactccacactcaccactgcacatttcctggcttgtgatccacctgcaattatttgaatacattagatcttccttcttttatacctttagacatgctgttacctctgtctgaaatgctcattcatctctgtttacaaactcttattcattctacctcttggaatctttttctgattctccataacagttaagcattgtgtgtgtgtgtgtgtgtgtgtgtgtgtgtaaaaatattgacatacatatgtgtctgtgaaaatattaggtttaatcacatgaaactgtcatttgtataagtcaaaatatgctttatatgaatcagcctaaaacatttttgtgcttgtttttgtgtctggcattcctcatccagcaagagactgtcctcttttttttaaaaggatggcaggccacttagtacacgtttattgatacgtggatggaaaaatagttyttaaagatcaaggctttcatttagagcaggggtccccacacccgggccacagaccagtaccagactgtggcctattaggaaccaggccacacagcaggtgagcagcaggcaagcaagcctcatggcctgtgctccgcctcctatcaaatcagcggtcgcattagattctcatagagcatggaccctattgtgaactgcacatgtgagggatccagattgcgtgctctttatgggaatctaatgccagatgacctgaggtagaataatttcaacctgaaaccatccrccaccccagtccatggaaaaattgtcttccatgaaaccggtccctggtgccaaaaagaytggggaccactgacttagtgaaaagttagcttgaaaatctataggttttctactttggaatcacatggtcctaaaggttgcttatttgcatggtgcaaaaaataacacaaaatcatcacaatatgtctcttaataaatacatctcaaatgtcatgaagtcacagattatctcccatatacagtttagtagtcattttcataatagtagacagcatcatggcttcaaggttcaaataaaataataaaagatactgattttgtttcatgaaaacattttgaaattcaaacaccatacactaaaatggtttagtgtgtgtgtatgtgtasaagcacacctctgagatattgyaggttttggtttcagactgctgcaataaagcaaatatcacaataaagtgagtcacacaaattttttggtttcccaatgcatataaaaggtatgtttatactatagcctattaggtatgcagtagcattatgtctaaaaaataatgtatatcccttaatttaaaaatactttattgttaaaaaatgctgacaaacatctgagccctcagtgagttgtaatgtttttgctgggggagggtcttgcctcaacagtggacttaagatatttagtcaaccatgctgtaaacagatgtgctgtcatcaaggctttgttgttctgtttatacagcacaggcagagtagatttagcataattcttaagggccctaggattttcagaatgatggatgagtgttggcttcagcttaaagtcacaagctatattagcctataacaagaagtcaacctgtccttcgaagcttagaagccagacattgacttctctttagctataaaagttcaagatggtatcttctactagaaggttgttctacagtgaaaatctgtttagtgtaaccatcttcaatgatcttagatagattttctggataatttgctgcagcttctacattagcgcttgttgctttaccttgcacttttatgttatggagatggtttctttccttaaacctcatgaaccaacctctgctagcttcaaacttttcttctgctgcttctttacctctctyggccttcatagaatttataagaattagggccttgctctggattaggctttggcttacagcaagcttgtccaaccctggcgcgtgggccgcatgcagcccagaatggctttgaatgccacacaacacaaattcataaacttcttaaaacattataagatttttttgtgatttttttttctcatcagctattgttagtgttagtgtattttatgtgtggcccaagacaattatttttccactgtggcccagggaagtcaaaagattggacatccctggcttagaggaagtggtggctggtttgaccttctatccagatcactaaaactttctccataaaagcaataaggctgtttcattttatcatttgtgtgttcactgaatagcacttttaatttcctttaacagtgcaagaggcctatcttacctttctgcatgccttcctcactaaacttaatcattttagcttttgctttaaagtgagaaagatgcagctctcccttttacttgaacacttaggggccattgtagggttatcaattgggctaatttcaatattgttgtgtctcagggaatagagaggccagaggagataggggaacggtcggtcaatggagcattcagaatatgcagatttatcgattaagttctctatcttacacagtcatggttcatggtgccccaaaacaattacaatagtaacatcaaagatcactgatcacagatcaccataaccgatagaataataatgaaaaagttcgaaatattgcaaggattaccaaaatgtgacacagaaacgtgaagtgagcacaggctgttggaaaaatggcaccaacagacacagggttgccacaagcctttagtaaaaacaatatctgcaaagtgcaataaaatgcataaaatgagatatgtctgtataatggttatagctatgtaaaaattgcctttgaatgtgggagataatatgtaataatgggtggctggcaagatggccgaataggaacagctctggtctgcagctcccagcgagatcaacacagaaggcgggtgatttctgcatttctggctgaggaacctggcttatctcattgggatgggttagacagtgggtgcagcccacagagggcaagccaaagcagggtggggtgtcgcctcaccggggaagtgcaagggattggggaactacccccctagccaagggaagccatgagggacggtgcactccagcccagatactatgctattcccatggtcttcacaacccacagatgaggaaattccctcacgtgcctacgccatcagggccctgagtttcaagcacaaaactgagtagctgtttgggcagacaccaaactgggtggctgtttgggcagacaccgagctagctgcaggagctttttttcataccccaatggtgcctggaacaccagcgagacagaaccgttcacccccctggaaagggggctgaagccagggagccaagctgtctagctcagcagatcccacccccacggagcccagcaagctaaaatccactggcttgaaattctcgctgccagcacagcagtctgaagtcgacctgggatgcttgagcttggtggagggagggatgcttgccattactgaggcttgagtaggtgtttttcccctcacagtgtaaacaaagccgcctggaagttcgaactaggtggagcccaccgcagctcagcaaagccactgtagacagactgcctctctagatttcttctctctgggcaggggaatctctaaaaaaaaaaggcagcagccccagtcagrgggttatggataaaacccccatctccctggaacagaggacctgggggaaggggtggctgtgggcacagcttcggcacacttaaacatccctgcctgccagctctgaagagagcagtggatctctaagcacagcatccgagctctgctaagggaggactgcctcctcaagtgagtccctaacccctgtgtctcctgacggggagacacctcccagtaggggtcaacagacacctcatacaggagagctccagccggcatctggcggatgcccctctgggacaaagcttccagaggaagaaacaggcagcaatctttactgttctgcagcctccgctggtgatacccagacaaacagggtctggagtgaacctccagcaaactccagcagacctgcagcagagaggcttgactgttagatggaaaattaacaaacagaaaggaatcgcatcaacatcaacaaaaaggatgtccacttagaaaccccatccgaaggtcacaacatcaaaggccaaaggtagatacatccacgaagatgaggaaaaaccagcacaaaaaggctgaaaattccaaaacccagaacgcctcttctactccaaaggatcacactcctcgccagcaagggaacaaaactggatggagaatgagtttgacaaatcgacagaattaggcttcagaaggtgggtaataacaaactcctccaagctaaaggaggatattctaactcaatgcaaggaagctaagaaccatgaaaaaaggttagaggaattactaactggaataagcagtttagagaagaacataagtgacctgattgagctgaaaaacatagcacgagaacttcaacaagcatacacaagtatcaatagccaaatcgatcaagtggaagaaaggatatcagagattgaagatcaacttaatgaaataaagtgtgaagacaagattagagaaaaaagattgaaaagaaacaaacgagcctccaagaaatatgggactatgtgaaaagaccaaacctacatttgattggtgtacctaaaagtgaaagggagaatgaaaccaagttggaaaacactcttcaggatattatccagtagaacttccccaacctagcaagacaggccaacattaaaattcaggaaataccgagaacaccacaaagatactactcgagaagagcaaccccaagacacataattgtcagattcaccaaggttgaaatgaaggaaaaaatgttaagagcagccagaaaagtcaggttaccaacaaaggaaagctcatcagattagcagcagatctctctgcagaaacactacacaccagaagagagtgggggccaatattcaacattcttaaaagaattttcaacccagaatttcatatccagcaaaactaagcttcattagtgaaggagaaataaaatcctttacagacaagcaaatgctgagagattttgtcaccaccaggcctgctttacaagagcccctgaaggaagcactaaacatggaaaggaaaaactggtacagccactgcaaaaacaaattgtaaagaccatcgacactatgaagaaactgcatcaactaaggggcaaaacaactagctagcatcataatgataggatcaaattcacacataacaatattaatcttcaatgtaaacaggctaaatgccccaattaaaagacacagactggcaaactggataaagattcaagacccattggcgtgctgtgtttaggagacccatcttatatgcaaagaaacacacgctcaaaataaagggctggaggaatatttaccaagcaaatggaaagcaaaaaaaaaaaaaaaaaaaaaaggcaggggttgcaatcctagtctctgataaaaacagactttaaaccaacaaagatcaaaagaaacaaagaagggcattacataatggtaaagggatcaatgcagaaagaagagataactatcctaaatatatatgcacccaatacaggagcacccagatccataaagcaagttcttagagacctacaaagagacatagactcccacacaataatagtgggaaactttaacaccccactgttcatattagatcaacaagaaagaaaattaaggatattcaggacttgaactcagctctggaccaagtggacctaatagacatctgcagaactctccacccaaatcaacagaatatatattcttctcggcaccacattgcaattatcctaaaattgaccacataattggaagtaaaatrctcctcagcaaatgcaaaataatggaaatcataacagtctctccaaccacagtgcaatcaaattagaactcaggattaagaaactcactcaaaactgcacaagtacatggaaactgaacaacctgctcttgagtgactgatgggtaaataacgaaattaaggcagaaataaagaagttctttgaaaccaataagaacaaagaaacaatgtaccagaatctctgggacacagctaaagcagtgtttagagggaaatttatagcactaaatgccctcaagagaaagcaggaaagatctaaaattgacaccctaacatcacaattaaaagaactagaggagcaagagcaaacaaattcaaaatctagcagaagacaagaaataactaagatcagagcagtctgaaggagatagagacacgaaaaacacttcaaaaaatcaatggtatccaggagttggtttttttgaaaagatcaataaaatagactgctagactaataaagaagaaaagaaagaatcaaatagacacaataaaaaatgataaaggggatattaccactgatcccacagaaatataaactaccatcagagaataccataaacacctctatgcaaataaactagaaaatctagaagaaatggataaattcctggacacataccccctcccaacactaaaccaggaagaagtcgaatccctgaatagaccaataacaagttctgaaattgaggcagtaattaatagcctaccaaccaaaaaaagtccaggacaagacagattcacagccaaattccaccagaggtaccaagaggacctggtaccattccttttgaaactattccaaacaatagaaaaagagggactcctccctaactcattttatgaggccagcatcatcctgataccaaagcctggcagagatacaacaagaaaacaaaacttcaggccaayatccctgatgaatatcgatgtgaaaatattcaataaaatattggcaaactgaatccaacagcatgtcaaaaagcttatccaccacgatcaagtcagcttcatccctggaatgcaaggatgattcaacatacagaaatcaatacccgtaatccatcacataaacagaaccaatgacaaaaaccacgtgagtatctcaatagatgcagaaaaggcctttgataaaagtcaayacccctttatgctaaaaactaaaaacaataaactaggtatcgatggaatgcatgtcaaaaatmataagagctatttatgacaaacccacagccaatatcatactgaatgggcaaaagctggaagcattccctttgaaaaccagcacaacacaaggatgccctctctcaccattcctattcaacatagtattggaggttctggccaggccaatcaggcaagagaaagaaataaaggttattcaaataggaagagaggaagtcaaattgtctctgtttgcagatgacatgattgtatatttagaaaaccccatcatctcagccccaaaactccttaagctgatagcaacttcagcaaagtctcaggatacaaaatcagtrtgcaaaaatcacaagcattcctatacaccaataacagacaaagagagccaaatcatgagtgaactcccattcacaactgctactaagagaataaaatacctaggaatacaactcacaagggatgtgaaggacctcttcaaggagaactacaaaccactgctcagggaaataagagaggacacaaacaaatggaagaacattccatgctcatggataggaagaatcaatatcttgaaaatggctatactgcccaaagtaatttagagattcaatgccatccccatcaggctaccattgactttcttcacagaattagaaaaatctactttaaactttatgtggaaccaaaaaagagcctgtgtagccaagacaatcctaaccaaaaggaacaaagctggaggcatcacgctacctgacttcaaactatactacaagactacagtaaccaaaacagcatggtactggtatcaaaacagacatatagaccaatggaacagaacagaggcctcagaaataactccacccatctacaaccatctgatctttgacaaacctgacaaaaacaagcaatggggaaaggatttcctatttaataaatggtgttgggaaaattggatagccatatgcagaaaactgaaactggaccccttccttacacctcatataaaaattaattcaagatggattaaagacatacacctaaaacgtaaagccataaaaaccctagaaagaaacctaggcaataccattcaggacacagatatgggcaaagacttcgtgactaaaacaccaaaagcaatggcaacaaaagccaaaactgacaaatgggatctaattaaaccaaagagcttctgcacagcaaaagaaactctcgtcagagtaaacaggcaacctacagaatgggagaaaatttttgcaatctattcatctgagaaagggctaatatccagaatctacaaggaacttaaacaaatttacaagaaaaaaaccaacaaccccatcaaaaagtgagtgaaggatatgaacagacagtcttcaaaataagacatttatgtggccaacaaacgtatgaaaaaaagctcatcatcactggtcattagagaaatgcaaatcaaaaagcacaatgagataccatctcatgccagttagaatggcgatcattaaaaagtcaggaaacaacagtgctggagaggatgtgaagaaataagaatgcttttacactattggtgggagtgtaaattagttcaaccattgtggaagacagtgtggtgattccccaaggatctagaactagaaataccatttgacccagcaatccaattactgggtatatacccaaaggattataaatcatgctactataaagacacatgcacacatatgtttattgcggcactgttcacaatagcaaagacttggaaccaacccaaattcccctcaatgatagactggataaagaaaatgtggcacatatataccgtggaatactatgcagccataagaaaggatgagctcatgtcctttgcagggccatggatgaagctggaaaccatcattctcagcaaactaacacaagaacagaaaaccaaacaccgcatgttctcataggtggaaattgaacaatgagaatacatggacacagggaggagaacatcacacactagggcctgtcggggtggggggctaagggagggataacattaggagaaatacctaatgtaaatgacaggttggtgggtgcaggaaaccagcatggcacttgtatacctatgtaacaaacctgcatattctgcacatgtatcccagaacttaaagtataattttaaaaatgtaataatgaacatttttttttttttgagacggagtctcactctgttgcccaggctggagtgcagtggtgcaatctcagctcactgcaagctccgcctcccgggttcacaccattctcctaatgaacagattgtttttagagtatttgattttgagtttattttaatattttcttaaaacaacaaaacaaacttattagtttgggctttacatcagtcaagtaataatgtctgaattgtcgttttagaaaagataaccatctaaatgtttggcatattttagataattatatgatgaagaactctatattcatttaaacaaaattacagttttagtcaatattttaaaattgtttatgatttttaaaacttaactttcctcactgtatatttaacaactttgccatagcattcaggcattacactgtcattggtattagtcaagttcagtgattttattcatttcaaattgaacttggtgttacaagttttattatagctattaccttcttttagctttataagttcttcaggtcattatttatataaattttatctggcttgtaaggtaacacaaacctcataaaacataaatttaaaaaaatgtttttttaatttgtgaaacacttatctattagctccacattaaaatttcttttctcccaaacttacactacgtcttgaattattcagacaagcaaagataagtaaggagtctaaggaatgtggtttggtttttacctttaaaacgtggacagtaatttggaagtgcagcttagttcaactccttttctaaataraattctgctccatttgcaactctgaacacgtaaattgaaggggtggctcccgtggccagtgcctgacctctgtgcacaccttggtctggcgtgacctcrcccacactgcacactgcagccatataaatcagatttttgacatgttataaaatgcaagtcacagctgctgttgtctgcggtattcaaaaacttttgaaacactgcatgtccaacaaaatttattttttgtgtgaatgtaagtttttattgaggrtaagtcctgtttgtttggaaaaaagaaacagtatgagtcagtgctttttaaaaatcaaatagatttaatgttctccttcctgcctgttctcgctcgtgtgtgtttctctcgattgcttgctcgctttctctgcctctcygcttgtctaagaaagagctgttggctttgagagaagaccttggtattacaactgtgttagtagattgagatttctgttagagtctttctgtttaggtcagaagtgttctttatagaacagaactgggagcttgtaatcataatgtaagtataaatgcttcacctcttcaaatatatgtttgaattcttttgtttctgttatagcaggaaacttcatatgtaagaatgtcttattagctacattgctttgccagatgccagacatttttgtgtgtgtgtggggttaacattttttttcttttttaaatttaattttaagttccgggatagatgtgcaggacgtgcaggtttgttacatagtgtgtttataacatgtgtgccatggtggtttgccgcacctatcagccctggacattttttagaagaaaggtttgcataggttggtaaatgtaatgtgcaatctatggtaaacttaaaagtgcttttataaaagttttaaaggttcagttcattcagttttacttactgtctcatcgttcatgtaaaattccatgtagtactctactatgttaacaatgtttacgaaaaaaagccttattagacttttctgcagagagatatttaagattaaattacattatttaggcaatgatttatattaagtacgttattgatcttttagttttgttcatattttttactgaaatgcaataggtatctaaaaatgctgtaactaaaatttgtccctagtatataaatgtctttattattttattttcaacatttaagaatattgctattagaatatttgacattttataatgcccttaaaagaagactattttccctgaattattactttttaaaccgttttaggtactgtttttcaaccctactctcttgaccaagaatgaaactatttacaaattaagatgccaacaggtaatttcttatatatttatatgtttttgtcaatatgtgtccatagcaatagaacaacaatcaaaaatgtatattaacacaaggctgtattattcccttccaacatcattggaagagatgtgaatatgaaattaatatttcaaatatgaaatatttggttttgagagaccttcctttgtgacataaagctattttattttagatatatgtgttttattggttttataacctgataaattctagcttgtcctatatctgaaatcagctcaaataataaggaaatagaagtcagaataaaagtagattcagaaataatgattcaggttagatgagttttctttattgataaaataaatgccaagtgttgagatatgtctgactataatccaattaaaacaaggacactaatcttagctgtgataaagttacattccaccctcagtggaaaaccatatatgatgacgcctttgatgctgatgtaatgttaattttattttttagccaaattattcctgaaaaattttataatcttgttgaaagttgtttgattacgaagaagcatggcattgtgtaaaaaagaaaaaaatctaaaagcattcattttggttgattttactttctttttcaccagttctctgtagttctgatttcgtctttacatttttatactcttagggctataatgtgatgctgaaacaggattttctcaattctaaagtagaacaaaagttttaaaatttgaaattctgattgtggagatatctgactcatagcaattatatcttagcaagtattgatatcttagtggcacataaatgctagataatttttaaaattaatatactaattttaatgtcaaattggagtcccagtgggagagtaatgccattttcttattctgattagatgattctgggtcatttcctagacagaaacaattaggaactaacaatgtacaagtttaaagcaatgtaatttcccctttaagsctggaagataagatattcaccaattttctcttcataaattactagtataatgactcaatgaatccttctgttattctaattttttctatacaatggctttggtggacagggattttttataaaaggtcttgggggtgaggctagaaggaaggagaggtaccaagggagaaagggaaggcagagagagaaagatagataaaggaaaggtcataaagaaggaagatgaggctgaggaaagaggaaasagagaaaagaagtcagagagaagtagaggtttattttcttaatattctgaaagatttggctgtatatcaagctatgacttagctttttaatttttctttgcaactttagatatgccttatggttagtaactgttacctaaaacactttgcaaatcaacaccttataagtttatttttggtttctgacatttagattgtcatataggaacatttaaagttaactttggaaataaaaagttaattatctaaatcctttaccagctgcaatttcagatattaatgtatttgagacctaatagggaaaacaagaatttaaataaattcttgggacagrgaaatgctaggtaatactgccaaatctctgtagtaagtgagaaaggccctgtttgttctaagatgctgatcacctccttttaatctaactaatatagatattccttatttctgttatataatgtctaaacccattatagttaatggccatatctttaggacataatttttctctcaaagacatagaagtcccagtctgtcaaataaggaatagaattaaatctttcattttgagaaaaaaaattcttcattctgattttcagaattgctacttcagtttaagatagttattcctattccttgttgcattaggaaaactttaatttgcttttctctattttatatatgtatgtgttctagatcacgaagagccctgtggtcccagtcacaagtcgttttgcctgaatggggggctttgttatgtgatacctactattcccagcccattttgtaggtgagtgaaatggactarggggagatgttaactttattttttattgtctactaacttctttgagaagtgataaaaagtaaacaaaaagtgtaagatgaaaagatgtgaggcatattcatatttatttagggaaaattatccttttaaaacaaaacaaaaacaaaataaaatagcacataaaaatctcactaatcaaggtgtttattctgaaaattgctaatggtagttcctagcctagacacatttttaaaaaataatcccttttagtgaactctttgattttagcaatttaaggaaggcagtctatgcttaatattactggcaaaacagctagggaatttgctaatcaaaaaaacctaatatgatatattttattttgagtttttagtacataaacacatgataactgagttggcaccaaaacttacactttatatgttaaaaagcaaaagaagggttaagtttttctaatggtggtagcaaataaaaaagaagggtatcttagccactattgttttaaaataatataattcactgtgggagtayagatacagccagtgacccataaaaaacttcaaaatagtacttctgtagcctgattcctatgagtttggttgaataggatttaaatgtatataataaacgtcttttagtatatgagttaacatcatagtactgccctatactgtggagctaacacccaagatctaaagatattttgtaacacatgtgaattactctttcttgttctttaactgaaatgagaagtatagaatctagatttaagatctagctacataaaaggatagaaaagtaaaatccataggaaaagttaaagatactgggatgtagtatggaggagaggaggcagagagaaataacctcacaattatctcaagaagtttttagggcttctcatatggggaatagtgcccaggtgtttttcttctctagtgaatatgaaaagggaagggaatggaggaacaaattaacaattacttaacactcatgatgtgcctcagcagtatactcttcttttttaatctatttactgagatataatttatgtatgataaactgcattcatttaaagtgcaaaatggattaattttgacaagtgtttgtacctgtgaaatcaccaccaccatcacatctagatatagaacatttccatagataatccccccaaattttgttgctgactgtgctcaacacttaattctcacaaacaccttagagaaaggaggcaggggagaccttagaaaataattttttaaaaaaggggaaaatgagaaattaagtgacatgccaaaggtcatatagctgggaagaagaaaggtgtcacctttgaatacaactcacaagtttcacttaactttataatatattcatactggattctttctaaggtgatatggcacgtagaatgtttaaaataaaacaagaatgcttatcagaagaagtacatttaggttgggcgcggtggctcacacctgtaatcccagcactttgggaggccaaggtgggcggatcacagggtcaggagatcgagaccaccctggctaacacggtgaaaccccatctctattaaaaatacaaaaaattagctgggcatgatggtgggcgcctgtagtcccagctactcgggaggctgaggcaggagaatggcatgaacctgggaggtggagcttgcagtgagccaagatcacaccgctgcactccagcttgggcgacagagcgagactccgtctcaaaaaaaaaaaaaaaaaaaagtgcgtttaataatttaaatatactaacattttgtgtcttgatcttgatgatggctgcatgggtataaagactatcctttctccattgaattgcctttgcccctttgtcaaaartcaattgatcatttatgtgcaggtctatttctggactattcttttctgttgatctatgtttcctgtcttttcaccaataccagtcttgataaacgtagctttataatgagcaaaatcaggtagcatgattccttaactttattcttcgactcaatgacgtttagccttattttctaataggcagtatttaatgttaaaaattttcaaatacatttctgttttatcctaaaaattttatagtttgttgttcagttttagatttaaacattttttcattatgatttcttctgtaacctataggtgttttcctatccttttatatttatatccgatttaatggcattgtggacagagtacttggtccgttaagctatgcacttaatatctatctgtatactagctatctgttatacctcactgaataagttgaaagaaagaactaagaatgctggaatttggagattcattaaaatggaaagaaacctaggttgtcatcctgcttttgtacgttggatagatgcgtttttagtgtattttcaaaaagttaccaatgatagagaatggccaagtttgctggcaacccacaccaggtgtaaaaatgtgtatagtttcttcctaatatcagaatgtaaaagtagtaattgggagtagctgaaaccatgccacatgggttcatgatggatagcaaggtcaccacattgcacaacagcaggaggctctgtggcttggcaccctctttgcaacgtgaatgtgtattctggagttgctaaacaccctggaaggaagtgaagtaggggagtggggtagggaacaaaagggcgactgagaaaaaaggataaaaaaaatagtgactgcaggttcagtaacattgaatggcagatatatttaaaatcatattttataaaaataaytgttttccaattatcttaggagcacacctctaatgtagccctgtaggctgtaatagcaatagctaagagtgataagctcattttccatcccacttcatactgttttctgtatttcctgtttctattatgacatctcaaccatcttgtcactgagaaaccccagacttatatttgactctttattgccctcttgtccagttgtcaaatcatatttctacctttgctgtatctctcatctctctagtcctttctgttcttactatcaatatactagctcagagtttcttaactccttgctttgtctatagaaatagtccctaaccaattttcccrgaggctaattctcatcatctgtccagctaaaacaaaaaaaaccttcagtgacagccctcacacctatccatctaccactcatgaaataataccttactttttagcctagctctttcagccttctaccatttggccctcaaactacctttgtggccatttcttccttggtctgcattctaactagagccattcactatttacgttagatatactttgtgttatgttgcctgccaactcctcctctttctcctcctcctcagtctacacgaaaatgaaaatgacaacaatgaagacctttatgatgatctacttccacttaatgaatagtaagaggtatattttctcttccttacaattctcttttctttccttttttttttttttttttttctgagacagagtctcactggctggagtacagtagggcgatctcggctcactgtaacctccaccccccaggttcaagtgattctcctgcctctcagcctcctgagtagctgagattacaggtgtgtgccacgacacccagctaaattttgtgtttttagtacaggcggggtttcgccattttagccaggctggtcttgaactcctgacctcaggtgatccacccacctcggcttcccaaagtgctgagattacaggtgtgagtcattgcacctggcccttttttttttttttttttaagagacggagtcttgctgtgttgcccaggctgaagtgcagkggcttgatcatagttcactgcaacctcaaactcctgggctcaagtgatcctcctgcctcagcctcccaagaagctgggactacaggcacacaacactgcacttggcaatttattttttgcagaggatggggttttgctgttgactaggctggtctcaaactcctggcatcaaactcctggccttaagtgatcctcccacctcagcttcccaaggtgctgggattacaggcatgagccacttcatccagcccccttatgagtttcttaataacattttcttttctctagtttgctttattataagaatatagtaatacataaaacatataaaatatgtgttaattgactgtttatgttattagtaaggcttccagtcaacagaaggctattagtagttaagttttgagggagtcaaaagttatatgtggatttttgactgcatgggggttggtgcccctaacccctatatcgttcaagggtcaactgtatttgtgcctttagatctaaaatgcctctagtcagcatatagttgcatcatgtgttttcgtccatttttctaatctcttttattagataatttaatctatttacatttaaagtaattactgataagaaggggcttttgtaattttgctatttattttctatatgccttatcacttttttgttattttctattttactgtcttttgtgtttaattgatttattcatagtaaaaaaaaattttttttttttttttttgagacggagtttcgctcttgttgcccaggctggagtgcaatggcgtgatctcggcccactgcaacctctgcctcctgcgttcaagtgattctcctgcctcagcctcctgagtagctgggattacaggcatggccaccatgcctggctaattttgtatttttagtagagacaagatttctccattttggtcaggctggtctcgaactcctgacctcaggtgatgtgcctgcctcagctccccaaagtgctgggattasaggtgtgagtcactgcacccggcctgtagtaaaatgtttaaattcctttctcatttccttttgtgtatattctataactattttctttgtgtttaccatggggattaaatttaaccttttaaagttataacactaatttgaatttataccagcttaacttcaatcacatataagaactctgcttctttgtagctctgtccccacttctttcacgtattgttacaaaattatatttttatatattgtgtgccacaaaacataaactaagaattcgtctcaatacattaatctcttaaattatgtagaagataaaaatggggttacaaactatttttatgataatactagcttttaaaattgttcatgtatttatttttatggatatctttatttcaccatgtaggactccctgagtttttcttgcagaacaggtcaagtgataatgaattttgtcagcttttatctcggaatgccttaaaaactcttagttttgaaggactgcttgttggatattggattcttggttccagttgttttgtttgtttatttagccatttgagtttatcagcctactatcttctggcttgcatagttttgatcagagaaatctgttgataatctcattgaggatcccttctctgtgaggagtcacttttcttgctgctttcaggattctctctttggcttttacaagtttgattatagcatgtctcattatgggtctctttgagttcatcttacttggagttcattaacctttttggatatttatattaatgtctttcatcaaatttgggaagttttaaacaattatttctttaaatattctttctatccttgtcttttttctctttttggaactctcacaataggtatgttggtccatttgatggtgtcccatgggacccttaggctctgttcactttctttaatcttttttctttctggtagaygactcaacagttgtcattatcttatgttcatctattttaacataacgttttaaaattataaatttccctctgagaattaatttaatagcagctcacgatttttgatgtgtcatattttcattttgtttaattcaaatgtttactaatatcctttgaaagttttctttgatctgttaattctatgaaagtgtattgctcaattttcagcatttgtggattttctggttatattttattattggtttcaagtttaattccattatagtgagagaatatactctttacaattttgttcctttgaaatttgttgagacttactttatggcccttcatggaatctattttggttgatgtttcatgcacatttgaaaaggagcagttgattggtatagcattctgtaaatttcaattaagtcacattggtaaataatgctatccaaacattctctttccagactgatattttgcccattattctatcacttactgagatatgtatattaacatcttcaagtaggatggtagattgcctgcttctccttcccccagttttactttatatattttgaagctatgttaattattacatgtacataagtttagacttctgatgtgctcttgtttaattgacccttttatcattacacaatgttctgctttatctttagtattacttcttgctgtaatgtctacctctctgctattaatattgctttctatttgttggtgttttacacagtgtatctgtttctatcctcttttaacctatctgtatctttaaagtgtatgtttaataaacatatagacaggttttttaaaaattcaatccgatagtctcttttaattgtatgatttagtcartttagtccatctgcatttaatgaacttactgatatggctaggtttaagtctaccatcttgctgatattttctcattgtcccatttgctcgttgaccagcattttcctctagcattccttctttcctgcccttttattggctatttaagtatcttttaagttcccactttattttcttcattatctcttgttatacctttctatattactctttgagtaattatcctagatattacagtatatattcttaayttattacagtctaccctcaattagtaygtttactcttcctgaacaatgcaagtatcttctaacagtttaaatccttagtcacttttttcccttggtactattgttgtgctgtcaaatatgtttagtgataagtccatttgcatttcacacagttttcgaaatagctgggtttaactttattctcttcttgttttctgcttattttgtctgttctttgctccttttttcatatgggagatttcatttatcctttctggcccaacccagcttttgattgagtggctaagtctttgttttctccactctgaaagttacgcactttggagcttttgagctaagctttgtatccccttgttccatacaggttcaaaatctgacaaaaatctggctgggaggaggatacttgttatgtgtttgttgtaggctcctcctacaagtttaaaatagataatatgttcacatttttcaaagatcaaaaccaaaaratacgttgatgtatatttctctcatttctatgtctgttaacatttttcctccctgtgtactaaaagaaagcagtaagcccttatctaaacttccagtacttctttttgcaaattcaaggaaatacaaatgcgtattttaacctcccattcttagtagaatagytcttaatatataatagtcattcaataagtatttgtcaaatgaagcaaagaacaaacattgtatacttgtgtggtcccatatggtagccaggagccatgtgtggctactgagcacttgaaatgtggctagtgtgactgagaactggagatgtgcaatgagtatcaaataatccttaaattttgaagacttaatgtgaaaaagtgaactatctcaataacttttatattgattacatgttgaaatgataatattttggatatattgaagtgaaaatatattactacaaataatttcacccttttcggtttttttcaatgtggctacaaaaattggggccaggcatggtagctcacgcctgtagtcccagcactttgggaggccaaggcaggagggaggaatgcttgaggccaggagtttgagaccagcctggacaacatagtaagacctcatctttaccaaacaaaacaaaacaaaaaaaataccaggtgtggtggcgtgtgctgacagtcccagctactcaggaggctaaagtgggaggattgcttgagtccaggacttcagtgctgcagtgaacatgatcatgccactgtactccagcctgggcaacagagcaaaaccctgtctctaaaaaaagataaaaataattaagaaaaatttaaaactagacattttatttctgttggggagtattgctatatgtactatcctgtatttcttttttcttaacaatatatcctggatatctgctcattttaatatatggcttcccaattcgtttttacaactagaaggtattctgtttgtgtgaatataccatcatgtatttagccaagcctctattaatgagtattgtacacacagtgcagaagtacacacagtgtgtaccactgtgcccagctaattttttaccttgcacataaatctgcacatgtatgaaattatacaattatatatcagtaaaataaagtcctggaagtgaaattgctgggttaaagataaatgcatttgtaacttcaatatatgttgccaaattgctatccatagagattatgttattttgaactcccaccaatatatttgggtacgtgtttttctataaccttgcaacagaattgtcaaactactatgtcaaacatagtatctcagtgttcttttaatttttattttcctagttatgaggaaagctgggcatagttcagttgtttaaatactaattaaaatctttttgataatgtatttgtttatatattgcttttatattagtaagattagccttttgtctataatatcaattatagataattatttatagcttatttttccttttacctagcttatgggatttagttttccatgcagttgttttctggttttactgcagtcaaatctatcaattttttttaaaagcccttcaagttcgagtcatagttttaaaaaagactttccagccaggtgcagtggctcatgcctgtaatcccaacactttaggaggccgaggtgggtggatcatctgaggtcaggagttccagaccagcctggccaacatggtgaaaccccgtttctactaaaaatataaaaagtagccaggtgtggtggcaggcacctgtaatcccagctactcaggagactgaggtgggagaatctcttgaatctgggaggcagaggttgcagtgagccgagatcatgctactgcactccaggctggcctcctgagtagctgggactacagatgtgtgccagtgtgcccagctaatttttttatttttaggtcttactatgttacccatactggtcttgaacttctggtttcaaatgatcctcccatctcggcctcccaaagtgctgggattataggtataagccactgtgccaagtctctatttggattatgtatatgttttaagatatagatccagatttatcttttttaatatggctactctcttagtctgtttctgctgctgtaacaatacttgagactggataatttatagacagtagaaatttatttctgacagttctgaaggctgggaagccaaagatcaaggcaccagcttttggtgtgtggtgagggccttcttgttgcaagctcacatagcagaaggggcaaatgctgtgtcctcacatagcagagggcagaagagcaaaaaagggccgaacactatgtcctcacatggcagagagtagaagagcataaaaaggcctaagctagtttcctttagcctttttataaggaactagtccattcatgagggtgaagaaagccccaactccttatgccagcacaatggagattatgtttcatcatgaatttttagaggggatacatagcacctacccagtctkcccaacattatcagtttatagatcataattcccattataatgtcagccctgtgagggcagaaatttttatctatatgtttactgctagaacagtacctgaaacatagtaagtactcaataaatatttattaaatgaatgaatgaattcccctgctgatttgagatgccaactttgttatatgtgaaactctatatgtattaattcttactggactccgttttcctttggtgtgtccatttattcttatgcccacagcagtctcttctaattgttgaatgtttatagtgagtttaatatgtggtaagtctagtttttgcggcactcccttgcaccctggctgtccttgctttttaatttttccatatgaactttagaatcagtccagaagaatataaaaaattaaattgataaattccctttaggaaagtttctttatgatgctgaatcttcttatccaggattgatatgtcttcccattagttcaaatccttttctgtacttcaagagtgtttttaacattatatatgttttgcatatttctgaattttttcccatagatttgattttttgttactggggtaaatctgtttccatatgtaaatttaataaatatgttatttctatgcttaaaacccttcagtgactctctgtctcactcagataaaagccagtggcctataaaaccttaatgatatggcccctattattgttctcacctcatatcctgcaactatctaattgctcaatctactgcagccaaattagcctctttgatgttccctgatgccaggaaagttccagacttaaggtgttggcctggcctttctgtcctgtgttgaatgctttctcccccaatatcctcatggctaactccccctcatccttttagtcttcactatcaatctttcaatgatgcctcctagaccactttttaaaaagtaaaacccattcttcgcctattccctctcttcctctcttaccatctaccaacatactatataatttactttacattgtatctccccaagctagaatgtaagtcccacagggaaagaaatttttattttttgttcactgagattttccgtgcatctagaacaagcatagagtaggttttcggtaagtatctgttgagtgaatgaatgccccactactttgttgacttctgttatcattataataatttttctgttaattctctcgggtttcacattatgtaggatagaatttgataaagcagagtgatctgaaacccaagtcaaactttgtatcttttatgaagcttttctgggtagaattagccattcagccctgtggcagaggctgttagtgtccaataactatgtggtcctctgtgtttgagcctcacatacagttagactgggtctatgtgactgggttctggacrgtagagtatgggcaaaagggatgcaagccagtcacaagtctggccctgaaaaaccaactcctgaaaaactccagctctcatttttcctgccttagtgaccttggaggccatgttctccaggtgtcagggccaagagatggagaagggctgcctgactggcattgggcattagacagtagtgtgagcaaggattaaactttcattgtatgaagtcaccagtatttgtaagtttgcaattaaaggcagctagtattaactttgttgactattatatgctcacactgtacccagacgtatttctatcttatatctctctctactgtacttagtgtttatgtgtctgttgttctctaatagaatctaagccccttgggactgaataattctcttgtctttgaattttctacatctagtatatatcatagaatttaataaactactcaaaaatgttwctcgagtgaatttttgagaaaaaccaagatggaaaaggatttggaaatttcaatcactaaaaaataggggtatttaataccaagcaaagaagggtaagaagatgatgagatgaaattctatgaagaatatctttgcaatatatatctttgcaatacagatttttaaatattaatggagttgaattagtatcaaaaaataaaaattttctcagagaaaattagatgaattatctcgtaaaaagttatttgtaattttgtacagaaatgttactgaaatgatttttgcccttatttagtttacatatttttttctctcattaaatgtataacatcagctctctggaaatctcaagcttttcttagtctactaagtattatagtgggaaaagtctcaaatggggagaagatcatgaaaaaaagccttaaaaatactattaaaataatttttctctcattgacacctacctcatcctttttacaaagtttctcaassaatatgtgttagaagagaattccaaatatagagctaattctggccatcaagtagtgatgtgtaatatggatatttatagatctttatgatataattcctataatacatttcaccgaaaacattcaaggtttgatctagaatcaaatttattttcatattctgacacagccatttcatctgattcctaccaagactataaacaaatgtagtaataataaatataatgttgggatctagtactatcattatgtagacgaatgatctaagcaagtcactagttgctataaaaataaatggttacaaatagaaatttggcactttttccaattttgtgaccaaatctcttctttgctactctaagaaattttatgtcaggaactattatctagtttcctgacctttcaaaagtgtgttcttttgtatctctttatttcactgtcttctatagctaaacacacatgctctattaaaaagcaaggctcatttgtttaataatgtgaataactgagcttcaaactcttgtagttaaaagattcatactactcaatgaagttggtatatctagggaataaatagccccaatgagtactgtgtgaccatggtattatcacaatctgaggtctcccctcagtgtagattgttaagagttaaatgaagtacattgtgagggatctcatctctcacagcagatacacattgattaggcttacagagctagtgtctaaagtaagcattcttatttatttattgagacgtggcctcgttatgttgcccaggctggatacttcaatttgttaatgtatgatgatatataactgacacaggcttgagttgatgtgagccaggcattctttttctctgtagactgacatgtatgggaagccaaatttgtaatcagaatattttaatggatatagagaaaacaagaaaacaacaagaattatataatatgaaagtctacctgtaattagtctgatgcatttatttccacaagagagataatctgacttagaactgtaatgcatgaagtcttctggctacaataccctctctacttaacagtgcttagataggcactgccgatgtttgcctctgtgcctctcctttctgtgagtgtcccttgccaaccaactcctcagactgacagctctttctttagatatgttaatgcatattcagctagtctctattatttaaaggaactttgctttattctactctgatccattgactttataattcaatttgcattatataatcttatttccttcagctctaagtattagacatcacatcagtttcccacttgtacttaatacacaacctaaatatagttgaggtgtgatatagtttggatatgtatcctctctccaaatctcatgttgaagtatgatccctagtgtttggggcgggggggcctagtgggaggtgtttggatcatgagggcagaccctttatgaatggcttggtgccctcctcatggtaatgagttcttgctctattagctaatgtgagatctgattgtttaaaagagtctgtggtcttccccttttctctcttgctccctctctcaccaggtgatacactggctccccctcaccttctgccatgattgtacacttcctgagtgctcaccagaagcagatgctggcaccatgcttcctgtatagcctccagaagcatgagccaagataaactgcttttctttctttctttctttctttttttttttgagacagggtctcactctggagtgagacgactcccatactggagtgcagtggtgcggtcatggcttactgcagcctctgcctccctggttcaagcaatcctcccacctcagcctcgggagtagctggaactagaggcacgtgccaccatgccctctaatttttaaatttattgtagagacagagtcttcctatgttgtccagactggacttgaacttcctatgttgtcaagactgggctcaagcaatcctcctcccttggcctcccaaagttctgggattacaggcataagccaccatgcccagcctctcttttctttataaattacccagcctcagatattcctttacagcaatgcaaatagactaagacaaggtgtattacaaatatattgttgtgttgcttattttctttaagtgtcttctactaggccctgactttcagaaatatgatccttgtggctaatataccattcttgtacttcagtcttagagaaagcacatagatttttaaattctgtaagatactttcaagcttgagcattatcaatataagttctgattaaaacaacttgctttgtgtacagctggagtagctcataatcaaatacgcatatacctcctttttacaaataataaactctgcacaagtataaacactatttgaagaaactggagaatgactaaaagcaggaagaaacaaaagtagttgacacctagaagaagggaatgtcactgggtgagtttcccattattatggcttgttgcctgaggacagcccctaatcaattcaacacatagtggtaaaatgggatggaaacatgcaggcagtcaccacagctggaaattgaatgtcctgaagagggccacagagggggagcctgagttctttatgtgctttatatgcccaaatatctgggtggccttgaatttgtatgcatagaggactccagatagcccaggtaaggctaagaaaagtgaatagacatttcacttgttgcagcagtaggagagatagagtttagagtttcagttaagccaaattatcctaataaaacaaaatatttgtactttaaaaaggaatgtaaccatctagaatctacaacatgtcactcgtaaggtctgggttagaattcaaaatgactagacatatgaagatagaaaaatgtcgtccatactgaagactaaagaaaatcagtggagtcagaccttgagatgagccaaatattgcaattagcagataataattttaaatcttaaggatttattctcaaggatataacagaaaatttgcttattatcagtgagtaaatgggaaaccccagcagagaaataagaaatatggaaaaataattaaatagaaattctagaattaaaaaataacatctgaaataaaaaatttctgagtgggcttaacagtggattggaaacagaagaaagagtaggtgtacttgaagctttgttgaaaatatctgtatgaaaaacagattttttttttttttgagagtgagtctcactctgtcacccaggctgagtgcagtggcacgatctcagctcactgcaacctccgcctcctgggttccagtgattctcctgcctcagcttcctgagtagctgtagctgggactataggcatgcagcctggctaatttttgaatttttagtagagtcgaggtttcaccatgctggccaggctggtcttgaactcctgacctcgtgatctgtccactgctgggattacaggtgtgagccacacatgtaattcgtgctcagccagaattttttttttttttttttttttttttttacagaatcctcagtgacttgtcaaatgatgttaaatgactgacatacttgtaattgggaacccagaaggagaaaagagaacacagcaggaaaaaaaaaaaaacaatatttaaagaaatgatggtccccaattttccaaatttagtgaaagccaaaatttcaggtttaagctcaacaaacaccaagcaaacttagacacatcatagtcaaatggcaggaggaaaaaaatataaagagaaaatcttgaaagcagtcagataaagtgacacattacatatggggaaatagcagtatgaatggcaactgatttcttatcagaaatcatggagaccaaaagatagtggaaggaaatatttaaagtgcttagagggaaaaactatgaacccagaactttgtatcttgcaaaaatatccttcaaggatgaagacaataataaaagcattacccataatagctaaaaagtggtaaaaaaaaaaagtgtccatcaactcatgaatgtataaataaaatgtagtatatatacacaatggaatatttgtcaataaagtactgttatatattactacaacatagatcacccatacaaacattatgctaagtcaaagaagccatttgcaaaataaccccaaatgtgtaattctgttacacattttaaatgtattacacatatttacatattagatgtccagaataggcaaatttatagagatagaaagtagattagtggtggggtggggaatggcgattgattgctcatggacgtggtgtttctttcaggggagatgaaaacattctaaaattagattttggtgatggttacacaaccctgtgaatatactaaaaacattgaattgtataccttaaatggatagattgtacggtatgtgaattatatcatataaataataaatctcaataaggctgtttaaaaatgaaggcaatataaagacattttcaggtacgaaaaaactaagataatttattacctgcaagcctatactagaagaaatgtaaaaggaaggtctccaagctgaggggaaataataccaaatggaaacttgagtccacagaaagggatgaagaactttggaaatagtaaaaatatgcgtaaatataaaactgtctcttaaatctcaacttaggtgaggtacataatgagtacctaaaccaaaaatagtgacattgttttgtggataatatggactgtagatgcaatacacatgacaactgtggcataaagggaagggaagtaaagggaacaatatagttgtaaaatgtctgcattgtatgtgaagtgatataatagtaaccctaagtagactgtgcagttcagaatgtgtactgtaaggcctagaataaccactaaaaatgtaatgcagagttggctaaaaggtttatagataatgagaatgaaattctaaaaacaatagttaaccaagaaaaggaaggttcagaaaataaatggaagaaagagaaacagtgggatggtagaccaacatacaaacatattaattttattaaatgtaaactaactaaacttgccaactaaagacagattgtgtattgaaagagagagtgagacagggaggggagggagtcatcaggaagacatgcaatcataaatggtacatatatgtacctaataacagagctttagaatcatgaaacatttggtagagggagaaacagataaatccactaattggagattttaacatccctctctcagtagttcatagaccaattagaccaaaaaaaaaaaaaattcactaaggacacagtgaatgaagaaycactgtcaaccacctcaacctaattgataatgatagaaaaacctatcctccaaaactgtatacattccattaaatgtacacgttatgttcaccaggacagaggttgggctataaaaaagtctcaataaattttatcattgaaaatttatagggcaaagatcagcaaactatgacccatgggctaaatcttgcccatcgcctgtttttgtatgatgttagtagtagttttacatttgtaagtatttttaaaaaatattttgacatagaaaatgtatataaaattcaaatttcagtgtttataattaaaattctataggaacaaaggcacactcattcatttgcatatcatcaatgcctgctttcacacaataaagttgagtagttgcaacagagactgtatggcccgcaaagcctaaaatatttgctatttggccctttcctttcacagaaaacatttttctaacccctgccttagagtacgttctcttaccatgataaaattatagcagaaataactaacaagatgtctagaaaaactcctaatatttggaaatggataccttgaaaagattatataaaaattaataaactcatagctagattaatagaatatatgaaaattaccggctgagtgtggtggctcgctgctgtaatcccagcactttgggaagctgaggtgggaggaacaatttaaggccaggagttccagaccagcctgggcaaccctgtctctacaacaaaatttgaaaaattagccaggcatggtgctgcatacctgtagtccttgctactcaggatgctgaagtgggaggatcacttgatcccagaagttagagggtacagtgggctatgattatgccactgcagctccaggctggatgacggagcatagaccctgtctcaaaaaaaaaaaaaacaaaaaaaaaaaacaattaccaactacagtaagaaaattaccaacatcagtaatgaaagagtacagatgaacctacagatatcagaagaattataatagaggcttctgcttcctgccttgatgaagtaattggaccagacttgctctcctctttaaaatgtctataaaaattgggaaaataaatgaaacacccttttttcagacagttgacaacaggcagtacgggacagtgatccctgagagaaggagaacaagcttagagatccctctaatcttccgggctcccttcctggaggtacgctctggaccgtggtgcagagagatgggtgcaccaagcggagtactctggtcttgctgagctgaggagaaagagatcagaggtcagggaggttgacatggctgaaatttgtggatgcactaccagagaagaggaagctgtgtaagagaaagagttccagaaatctgcacagagatcccttttgattatcttgtcagatgctacattagacaagtgtagtgtcaaactccatagtgctgcgcaaagaacttctgggaagctcgaaggtgaacaaccccagagctcaggcagggctgcgatgtgtttacattctgactagctagagtgaagtgtccttggtgaasacctagggtattcgcttgagatccaaagagtcactcttgaggattagagcgaaagtcggcctaaatgctactccatttgtaccctgtcaaagcttaaaaccaagccttaaaagaatcaagctgatttacaagtaacttcgtctcccaaagcaaagttcaatgctctttaaacaaagacaacaaaatctagcactcaaaaatgtaagattcatgttcagcaagcaatgcaaaattactagatacaaagaagcaggcaaatgtgattaggatgaaaaagtcaatcagtagaaacagacctacaaatgtcagcaatgatggaattagcaaacgagatttaaagcagttactataaatatgtaaagaatttaaaagaaaacctgaatgaaatggagagatttctagaagctgaaaaatgaaatatctgaaatgaaaagttgagtggatgggcttaacaaattagataccgcagaataaaatattaatgaattaatgccatagcaataaaaactttccaaaatagatttttttttttcagactaaggaacagagtcatagaggtctaacatgtatgtgttaaggtatctcagaaagatgagagggcagaaaaagcatttgaagaagtaatggccaaaaagtctcaggatcttacatattctaagacttttacagacaagcagtgactgagagcattcatcggtaggccacgctacatgaaatgttaaaggaagttcatcagcaaaagtaaactgaaaccagatggaaacagatctacatgaaggaatgaagaaagcttagaaatacaacattctttgcataagtccaaaacatccacattgctttgagttgaagcaggaacagtactataaactttaaaaattcactcagggctgggtgtgctggctcatgcctgtaatcaaatcactttgggaagccaagatgagaggattgcttgagctcaggtgttcaagaccagcctggacaacatagtgagaccccatctctacaaaaaaatttaaaaattagctgggcatgatggctgtgcctgtagtcccagctacgtgggaggctgagatgggaggatcacttgagtccaggagtttaaggctgcagtgagttatgatgacaccactgccactccggcctgggcacagagtgagaccttgtctcaaaaaaaaaaaaaaaaaaaaaaggaaggtgcaggattctagattctatttttgccaccctgtgggataaattcataccttcgttttattcctcagggtgtttgtggtcccatctctaaacccacttcctctgtctctttccaattgacttctccatgttgattcagatcagctctaatatctctagttccttggcatcatccattttatgccatttacacagagttaatatccagtgtgacatgtagaatataaagggctcttcattcagcaaagacctatgtgtatctatcaagagactcaggatatttcacattctaagcaactttgtcacctgagaaatttgtgaaatgtttaaacacaaaactaagaacattagaaggagttgtaggctggacgtggtggctcatgcctgtaatcccagcagtttgggaggccgaagtgggcagatcatttgaggtcaggagttcgagaccagcctgaccaaaatggtgaaaccctatctctcctaaaaaatataaaagttatcagggcatggtggcgcatgcctgtagtcccagctacttgggaggctgaggcaggagaatcacttgaacccgggaggtggaggttgcagtgagccgagatcgcgccactgcactccagcctgggtgacagagtgagactctgtctcaaaaagaaaaaaagagttgtataacagtcaacctctttgacgtcggcatcctctgacacatgctgtaactatagaaattctctcaactagcttctcaatcttcacaaactgttacaaagcttggttcacattctgagctactttgatatccaggataatgtctaggtaaatgtcaagtgtctgaaacttcttggtagtggagacactttgagaacattagaacacctgtctgtattgycatggctcttcaaacacgcttcctagatggcatctacagtgtatatcgaaaattcatgtgtaccttcctgcttttgattattgaagcatctagatagtgtttgaatgtcacagatgtcagcaccttgataacagtaacaggattattgtgagcctgagtaaggtgagcctaaaagctccttgctggcaacaggtcttagagtgctctttgaatagcacttaatcagtttggactactacaacaaaataccatagacaagatggcttaaacatcagaaacttctccgatttctggaggatgggaagtccaaggtcaaggtgctagctgattcagttggtggtgagggccctctttctggtttgcagatggacatcttcgtgctgcatacttacatggcagagagagggagagcggaagtaagtctttcctgtctcttataagggcactgatctcatcttgaccctcatgaccctcatgacccccaaaaggcccctcttcataataccatcacattggaggtatgatttcaacattcacatctgtaatgccagtatataatggtaaaattaaaatggaataattctaatcaagttagaaaaacatgaaataagttgctggttcataccaattattatattttccttgacaaaaattgtgaaaaccccttgctctgaagtgcattaaatcccttagccattctggcagctcctttgggagcagccttttactctgttacctccatgattcctggctctgtcatccttaatcatttttctccaaggcctcatctgagttagtgattgaaatatacttctttcctggggaccgcaaagctttcatagctcacttcctgctgttgtgatctgggggcctagggattgctttaggatttgaacaggatttggaggccaggcttttggtttctttggtaatgtaattcactcaaaaacattctaggctctagagatctccctgtttctactcagctccatatataagcaacacagctaaatatcaaaaataaatagttcttaaacttagattgagatcttttacattaatattctctcttatgtgttcatcccttccctttcagtttaatggcagggcaattcaagcccatctgaaactaggcttagtttgggagggccatatccttaatctgatttttgcctccaagatagttaccattgtctggcaaagaaataaaatacttgggacacaccaaaaaatgataatattcatatctcatctaattataatttttttaaattgataatttatatggtccaaaaatcaagtcataataaaaggtttatagtaaaaattgttatttccacccacttctaacatatatttgtgcatatataagccaataccaacttgaaatcttatgttctgtcagtttttacactgttttctaccttgctttttctcttcagaatatattttggagatcatttcatgtcaatccacagagtacttcactatagctacatagtattatattttatgcagataataggctgtatttaaccctactgatagacatttgggttgttacttatcttttgctaatacaaatacaacaattaaccttatatgtatgtcatattttagggtgtaagtgaatcccaagaatttggctgggtcaaagggtatatgcatattaattttggtagacattgccaaattgtcctkggtaggaatgtgaattcttaccagctgtatatgagagtatgtcatttcctagcagagtatgttgcctaactttgggtttttaccaatcagatagatgaaaacgttatctgatttggggtttttaccaagctgatagcagcatatgtggtctaattttgggttcttaccaatctgatagatgagaaatggtatctcactgttacttttaattcaatcttttgataggtgaggttgagccatatgtgtttccttttgtgtcaacagtttttccctagttgttctattaagttgtattcttatagtagccatcgtagaaattgtttatataataaagatactattaaaagctatattatctttttgactgagatatgagttgcaaacattctcttctagtttgtcacttgtcttgtgatttttttcttgataaattttggccataattaagttttattttttatttttacatacttaattttatcagtcttttatgggttttggatgttgacttataatttgattttttatattcaagatgtggagaatagagttgacagagcaggtcttagactgctatccttagaaaggcctccttgcgaagttggccgttgctggtgtttagaaacttagttggcatacagttctctatacttaaatgaaacttttcctaaatgataaggatgtctccgtatgcctgaactgtataagcattgtggtttatgctgaatacctgcttttcttttgggagtctggaattttggtatatgcgaggcagaagatacatatatgaacagtttccatgaaaaatcttggacactaagtctctgatgagcttccctagtagataacacttcacttaaattgtcacaattcattactagaggaattaggcttgttctgtgtgactccactaggagggaactcttcgaagcttgtgcctcatttccttcagacttcatcccatgtatcttttccctttgtagtttttgctttgtatctttttgctgtaataaatcattactgtgggtaaaactatgtrttgagtccattgagtcttcctgggagttataatggaacttacccttatttttttcccttttgtttaattaaagacttttttggcctggtgcagtggctcatgccggtaatcccagcattttgggatgctgaggcaagcagaccacttgaggtcaggagttcgagaccagcctggctaacatggtgaaacctagtctctactaaaaatacaaaaattagcctggcatggtgaggcgtgcctgtagtcacagctacatgggaggctgaagcacaagaatcacttgaacctgggaggtggaagttgcagtgaactgagattgcatcactgcattctagcctgggtgacagagcaaaactctgtctcaagacaaaacaaaacaaaacaaaacaaaaactgctttaaaaaaaattatttgccaattttttaaacaattttttttattatactttaagttctgggatacatgtacagaacatgcaggtttgttacataggtatacacgtgccatggtggtttgctgcacccatcaactcgtcatctacattaggtatttctcctaatgctattcctcccctagccccctgcctcccagtaggccctggtgtgtgatgttcccatgcctgtgtccgtgtgttcttattgttaaactcccacttatgagtgagaacatgcggtgtttggttttctgttcctgtgttagtttgctgagaatgatggtttccagcttcatccatgtccctgcaaaggacatgaactcattcttttttatggttgtgtagtgttccatggtgtatatgtgccacattttcttcatccagtctatcactgatggacatttgggttggttctaagtaaaaagaccccttttaaagggcagttttaggttcacagcaaaattgagaggacggtacagagacttccctgtatataccccctgccgtgacacatgcaaggcctcccccgttatcaacaccaccaaccagaatggtacattcattaccattgaggaacctgcatcaacacatcataatcaccaaagtccatagttcagggttcaccgatggtgttgtacattctatgggtctgtacaaatgtaatgacatgtatccaccattatrctatcataccaggtattttygctatcctaaaaatcctctgtgctctgcctgttcgtctctcccctgccrtgtattttttcaggaacttttatcatttttgtttttagatattggggtaacatttatattcataaattaacttaggatttagatgtttataagattgaatttatttcatctagaatgtgttttaaagctttcttcctatagatattgggataacatttatattcataaattaatttagaatttatatgtttataaagttgaatctatttagcctagaatatgttttagawtttccctcatataggttttacatatttcttaaatttattcttagttatttcatcattttgtttgtattgtgactggggcttttcctgcctatcttctaattattgtctgtatataagaaagctagtgatttctttatgttaatttcccctgctatcttattgagttatgttactatttgtaggagttttttattttattcctttgggttttcaagatrtataatcatatcatctataaatagcwatagttttacttatctccttctaatggctgtgccttttatttctgtatcttgtctaattgtggttaggaccttcagtacaatattaaataataggggtagcagtgagtgttttttactttttattgttttttaactttgatgggaatgtctttactttttccaggaaatctgatgctaatttttggctgggatggatatattttatcatgctaaggaagtaactatatttctattttattgagggtttttattagttttcagatctcaatgtctttgtttgtttctgtatctctgctgagacttaccatttctctgctaagactttttatgcattgtaaatatgttttgcttcattgaggatagttatattagcggcttgattcttgtctgtttgttccaatatctggttcgtcttgggtttggactcaatttattttctttctcttgagaacatttgattttttggttctttgtatacttggtgattttggattgtttctgggacattaggagttttagattatggatattctaaatgctattatttttctgataagcatggtttcctttgtttagtaagcaattttcttggctgggcttctactgcaaacatgttttcttatgtagaaggtccagtctgttcagatgttttgtttttagatggtctgttttaaatttgttctgagcctacctagttcaggtgtccgttagagatgtggggagacagcttgggcttggggatcccctctttggctcatgctcacccagaattctcctactctttcagcattcatggcttcatagcttcttttttctagttcctcagatcagaaagagttcttccatgcaaggcccccatagctgctgtactcactaggtggcttagccccaggctaaaagctgcagaagcaggaatttacttgtacttcctccaaactagcgtgacctcccctccagaatctgtctttatctcttcattctcctggaccttcaggtatttgcttttcatattttgtccaagtctttatagttttctgcagggagctagaagtggtggtcattctatagcatcttagctagtcatacccagaagtggaacctctcatattccacttattgttttaaatcaagaatggccattgaattttatcgaatgcttttttacagtctaaggacatgatcatgtttttttctctttaactatatctacatgatgaattgtattattagtcctgattttgaatcattcttgtatttctggagtatggcccacttactattcttttatggtctgctgattcttattgtattttattgaggatttttgtgttgacattcgtgagaatgacctacggttttcttattggtacaatctttgttaggttttgggatygacaatatccttatttcattgaaggagtttgaatatttttctccttttctaagttttagaatagtttagcattagaattatctaatgtttaaagtctggaagaattctctatgaagctgtctggatctaggttttcttagcaatagttcctaaatttgttttatggagaatgatctatttgaattttcttctctgtaaatcagtctgtattagattttctgtttctttgggggtgattttttttttgtaagttatatttttaagcaaaattttccaattcatccaggttttcaaatttattggtaaagaatttatcaaaatagcctcttttctgattttaaaacatattatccatttctgtggttaaatttcctctggcatatcttcacttatattttgtagtttggttatctattttgcataaaaacaaccctaaaaatcagtagcttcaaaaacgaccatttgacaggtatttgggctggtctcacctaggcagtgccactctacatggtgtcatcttgggtcactcacagggctgcattcagccttcaatagcaatttcctcattgtacttgcagctgctactagcagtttccttactgccccttaggcctccacctactgcttggtccaaaatccaatgccacaaatttttaagtttttagttacacaaacaccttacttctaggattatctgtttctgtgtaacatactaccccaaaactcagtggcttaaaatagcaaccatattataatttactcagaattcttgggaattcaagcaggtgatgctgggtggttgttctcctctacatggtattggcaagggttactcaggagctgtgttcagctgggtatttggcaggatctgaaacatttaaagtagattcaggtctctctccccagaggatagtcagacttcatacatggagaccaaaagggagtattccaatagacgacagtggaagctgttgatctgttaatgcctaactttaagaattatgaagcatcatctaccatattctccttgtcaaagcaagtcatagggccactgagtttcaaagggaggggaaatagaccccagcactcagtgagaggagtgacaaagaatttgtggccatctgcaattcaccaaatgtgctttctctcaagttcatttcatttcattttactgagaaccagctcttggatttatgtattttggtttcattctctttttctgtttctaactcatttatttcttcctttattaattccttctttctatttactttggaattattttatcactctaaaaaatctctttcccccacctttaccattttttatttttttttcttacagagctaatgaatgttagtgagtaataatagtagaaatcaatttattagaactgaatgaagtctctgagggatgtaggaggcaaagagtgatctggaacgtgagaccttgtcttgatatcactgcactagggtatcctaagtacctttaggactctgggctctggatgctatgtggcaacagaaaattgaaaagtgaagtgaaaggatgccaaagaaaactttgaaacactttaccctttggcttggagataccctagattacgcctgacattcatactgagtgtattcttccttatactttctgctgatttgctgtatttgattatacaggttgagtatcctttatcctaaatgcttgagatcagaagtagttcagattttagacttttggattagggatattcaacttgtatgaactaacatcagtaaaaaaaaaaaaaaaaatccccaaagaaaaaaatgtattcattttgaatttacccagtatttttaaacccaccaacattatttctgctttcactaatctctatttttgttttccctatctctggagtccagacattttggaaaaggtgaaagtttcttgtgtgctttgtaaaattccttgacatgctttcttttccatttatttttgttctgaaatgaacttttatactactgaacatggttcttgttcaattctagtttgtagacctttttaagccaaattctttctcatatatgtattttgaacatgctaaaagcttatcaggtgaaaaatagtaaaaacagtcaataaaagttaggtaatatttagatactgcatatatagccacaaacgtctttcaagaaaaaatgataaattagttgacttaccaataaaataattctgaaagtctcccatgtggcagctgtaggatacaaaagctaacaaagaaggttcagttaccatttgcagtacaatttcagatgaactctttgtaatttgtcttgttttaataagaattaattaaattgattgagaatgggcatatataggaggcaagaaatttatgtaatgaaagcaaaatttagtaaatttacttagacatacaaaaactaaacattaaaatacagtatattcagtttgattgacttcttattcaagttaagctcttaatataatatccagaaaataaaatgtatcatagttgggtgaacaatgaatgatcattgtttacaacattttttggggccagcattttactggtcttatgcaattcagttatgattaaagctggaaatgtaaccttttcaataaaatgtaaacttttataacagattttaattttagctattttgaccttgacaaataataattaaagggggcaccaagataaaattwtcttgtttgtrtgtttctcttcaaaacccatgtgttcaaataaatgtttattaaaacagcccaactacagaaaaagagaggtcaaaatccacccaatggattggagataagaaaagaacagtataaagagttttgctgatataaccacaggcaaatgctattagctgtctaatacacaaaaatggattaaagacttaaatataaaacctgaaactatgaaactattagaagaatgcatagggggaaatgctttaggacactgatctgggcaaagatttttttttagtaagacctcaaaagcacaggtaacaaaagcaaacatagataaatgggattacatcaggctagaaagcttctgctcagcaaaggaacagccaacagagtgaagagacaacctacagaattggacaaaatgtttgcaagctatccatctgacaagggattagtaatgagaatgtataaggaactccaacaattctgcaggaaaaaaaagcccaaataatctgatgaaaaaagtggagatatagctttgtgcagtggcagtattgtagccaatgaggtttatctgaggcgcaattattgctaattgaaaaaaatggacatgtaatctgaatagacatttcttaaaagaaggcatataaatggccaacagatgaaaaaaatgttcaacatcgctaaccataggggaaatgtaaatcaaaactacaatgagatatcatctcaccccagttaacacaactattatcagaaagacaaaaataataggtgctggtgagaatatagagaaaggggaatggtagtacactattgggaatgaaactagtacagccactatggaaaacagtatggaggttcctctaaaccctgaaaatagatccaccatatgatccagcaatcctgctgctgggtatatgtctcaaaaaataaaaggtatattaaagggatgtctgtactcccatgtttattgcagcactattcacaatagccaagataaataattaacctaagtgtccatcaacaggtgaatggataaagaaaatgtaggtatagacacaatagaatattattcagccataaaaaaaatgaagtcccgtcatgtgcagcaacatgaatggagccgtaggtcattatgttaagggaaataatctacgcatgagaagacaaatactgcatgctctcactaatatgtgaaagccaaaaaatattgatctcagggwggtagagagttgaatatggttaccagaggctgggaagggtactgggtggatgtggggaaaatgaagagaggttagtgaatgggtacaaaaatactgctagatttattgtatatttcaaaatagctagaagaggctgggcacggtagctcaygcctgtaatcccagcactttgggaggctgacgtgggcagatcacttgaggtcaggagttggagaccagcctggccaacatggtgaaatcccatctctactaaaaatacaaaaattagctgggcatggtggcaggcacctgtgatcccagctacttgggaggctgaggcaggagaatcacttgaacctgggaggcagaggttgtagtgagccgagatcacaccactgcactccagcctgggcaacagagtgagactccatttaaaaaaataaaataaaaataaaaagctggaagagaagattgggaatgttcccaaaagaaagaagtgataagatggccaaataggaacagctctggtctgcagctcccagcgagaccaatgcagaaggcaggtgatttctgcatttccaactgaagtacccggcttatctcactgggactggttagacagtcgatgcagcccacagagggtgagccgaagcagggtggggtgtcacctcacccaggaagcacaagggttgggggaattccctcccctagccaagggaagtgccaagggactgtgaggaatggtgcattctggcccagatgctatgcttttcccatggtctttgcaacccgcagaccaggagattccctcgggtgcctacaccaccagggccctggatttcaagcacaaaactgggtggttattttggcagacacagagctagctgcaggggtttttcataccccagtggcgcctgcaacaccagtgagacagaaccgttcactcccctggaaagggggctgaagccagggagccaagtggtctagctcagtggatcccacccccatggaggccagcaagctaaagtccactggcttgaaattctcgctgccagcacagcagtctgaagtcgacctgggatgctcagtcttggttgggggaggggcatctggaggcttgagtgggcagttttcccctcatagtgtaaacaaaactgctgggaagtttggacagggcagagcccaccacagtgccacaaagcggcggtacccagactgcctctctagattcctcctctctgggcagggcatctctgaaagaaaggcagcagccccagtcagggacttacagataaaactcctatctgcctgggacagagcacctgcaggaagggcagctgtgggcacagcttcaacagacttaaacgttcctgcctggtggctctgaagagagcagcagatctcccagcacagcactcaagctctgctaagggacagactgccacctcaagtgggtccctgacccccatgcctcctgactgggagacacctcccagcaggggtcaacagacatctcatacaggagacctctggctggcatctggcgggtacccctctaggatgaagcttccggaggaaggaacaggcagcaatctttgctgttctgcagcctccgctggtgatacacaggcaaacggggtctggagtggacctccagcaaactccagcagacctgcagcagaggagcctgactgttagaaggaaaactaacagaaaggaatagcatcaacaaaaagggtgtccacaaaaaaaccccagccgaaggtcaacagcatcaaagaccaaaggtagataaatccacgaagatgaggaaaaaccagtgcaaaaaggctgaaaattccaaaagccagaacgcctcttctcctccaaaggatcacaactccctgccagcaagggaacaaaactggatggagaatgagtttgacaaattgacagaagtaggcttcagaaggtgggtaataacaaactccttcaagctaaacgagcatgttctaacccaatacaaggaagctaagaaccttgaaaaaaggttagaggaactgctaactggaagaaccagtgtagagaagaacataagtgacctgatggagctgaaaaacatagcacgagaatttcgtaaagcatacacgggtatcaatagacaaatcgatcaagtggaagaaaggatatcagatgttgaagatcaattgatgaaataaagcatgaagacaagattagagaaaaaaatgaaaaggaacgaaatatgggactatgtgaaaagaccaaacctatgtttgattggtgtatctgaaagtgatagggtgaatggaaccaagttggaaaacactcttcaggatattatccaggagaatttccccaacctagcaagacaggccaacattcaaattcaggaaataccgagaataccacaagatactcctcaagaagagcaaccccaagacacataattgtcagattcaccaaggttgaaatgaaggaaagaatgtcaagggcagccagagagaaaggtcgggttacctacccacaaagggaagctcatcagactaacagcagatctctctgcagaaaccctacaagccagaagagagcgggggccaatatccaacattcttaaagaaaagaattttcaacccagaatttcatatctagccaaactaagcttcataagcaaaggagaaataaaatcctttacagacaagcaaatgctgagagactttgttaccaccaggcctgccttacaagagctcctgaaggaagcactaaacatggaaaggaaaaaccagtaccagccactgcaaaaacatgccagattgtaaagaccattgacactatgaagaaactgcatcaattaacaggcaaaataaccagctaacatcataatgacaggatcaaatccacacataacaatattaaccttaaatgtaaatgggctaaatgccccaattaaaagacacagactggcaaattggatagagtcaagactcactggtgtgctctattcaggagacccatctcacatgcaaagacacatataggctcaaaataaagggatggaggaatatttaccaagcaaatggaaagaaaaaaaagaaaggggttacaatcttagtctccgataaaacagcctttaaaccaacaaagatcaaaagaggcaaagaagggtattacataatggtaaagggatcaatgcagtaagaagagctaactatcctaaatatgtatgcacccaataaaagagcactcagattcataaagcaagttcttagagacatacaaaaagacttagactcccacacaataatagtgggagactttaacaccccactgtcaatattagatcaatgagacagaaaattaacaaggatattcagaacttgaactaagctctggaccaagcagacctaatagacgtctacagaactcttcatcccaaatcaaaagaatatacattcttctcagcaccacatcgcacttattctaaaattgactacataattggaagtaaaacactgctcagcaaatgcaaaagaatgaaaatcgtaacagtctctcagaccacagtgcaaccaaattagaatttaggattaagaaactcactcaaagccacacaactacatggaaactgaacaatctaatcctgaatgactactgggtagataacaaaattaaggcagaaataaagaagttatttgaaacaaatgagaacaaagacacaatataccagaatctctgggacacagcaaaagcagtgtttagagggcaatttatagcgctaaatgcacacaggagaaagcaagaaagatcaacaccctaacatcacaatgaaaagaacgaggaagcaagaacaaacacattcaaaagctagcagaagacaagaaataactaagatcagagcagaacagaaagagatagagacacgaaaaatccttcaaaaactccatgaatccaggagctggttttttgaaaagattaacaaaatagatagactgctagccagactaataaagaagaaaaagagaagaatcaaatagacacaataaaaatgataaaggggatatcaccactgatcccacagaaatacaaactaacatcagagaatactataaacacctctacacaaatgaactagaacatctagaagaaatggataaattccttaacacataccccctcccaacactaaaccaggaagaagtcgaatccctgaatagaccaataacaagttctgaaattgaggcagtaattaatagcctacccaccaaaaaaagcccaggaccagatgaattcacagccgaattctaccagaggtaccaagaggacctgataccattccttctgaaattatttcaagcaatagaaaaagagggactcctccctaaatcattttatgaggccagcatcatcttgataccaaaacctggcagagacacaataaaaaaagaaaatttcaggccagtatccctgatgaacatcgatatgaaaatcctcaataaaatactagcaaactgaatccagcagcacatcaaaaagcttatccaccacgatcaagtcagcttcatccctgggatgcaaggctggtttaacatatgcaaatcaatacacgtaatccatcacataaacagaaccaatgacaaaaaccacatgattctctcaacagatgcagaaaaggccttcaataaaattcaacaccccttcatgctaaaaactctcaatgagctaggtattgatggaatgtatctcaaaatagtaagagctatttatgacaaacccacagccaatatcatactggatgggcaaaagctggaagcattccctttgaaaaccagcacaagacaaggatgccctctctcactactcctactcaacatagtattggaagttctggccagggcaatcaggcaagagaaagaaataaagggtattcaaataggaagagaggaagtcaaattgtctctgggtttccagatgacatgattgtatatttagaaaaccctcagccccaaatctccttaagctgaaaaacaacttcagcaacgtctcaggatacaaaatcagtgtgcaaaaatcacaagtattcctatacaccaataacagacaaacagagagccaaatcatgagtgaattcccattcacaattgctactaagagaataaaatacctaggaatacaatttacaagggatgtgaaggacctcttcaaggagtactacaaaacactgctcaaggaaataagagaggacacaaacaaatggaagaacattccatgctcatggataggaagaatcaatatcttgaaaatggccacactgtccaaagtaatttagagattcaatgctatccctgtcaagctaccattgactttcttcacagaattagaaaaacctactttaaatttcatatggaaccaaaaaagagcctgtatagccaagacagtcctggacaagaagaacaaagctgaaggcatccccctacctgacttcaaactatactataaggctacagtaaccaaaacagcatggtactggtaccaaaacagatatatagaccaatggaacagaacagaggcctcagaaattatgccacacctctacaaccatcttatctttggcaaacctgacaaaaaataagtaagggggaaaggattctccacttcataaatgatgttgggaaaactggatagccataggcagaaaactgaaactggaccccttccttacaccttatacaaaaattaactcaagatgaattaaagacttaaacgtaagacctaaaaccataaaaaccctagaagaaaacctaggcaataccattcgggatgtaagcatgggcaaagacttcgtgactaaaacaccaaaagcaatggcaacaaaagccaaaattgacaaatgggatctaattaaactaaagagcttctgcacagcaaaagaaactatcatcagagtgaacaggcaacctacagaatgtgagaaaatttttgcaatctatccatctgacaaagggctaatatccagaatccataaggaacttaaacaaatttacaagaaaaaaaccaacaaccccatcaaaaagtgggcaaagaatatgaacagacatttatcaaaataagacatttatgtggccaacaaacatatgaaaaaaggctcatcatcactggtcattagagaaatgcaaatcaaaaccacaatgagataccatctcatgccatttagaatgacaatcattaaaaagtcaggaaacaacagatgctggagaagatatggagaaataggaatgcttttacactatttgtgggagtataaattagttcaaccattgtggaagacagtgtggggattcctcaagaatctagaactagaaatgccatttgacccagcaatcccattactgggtatatagccaaaggattataaatcattctactataaaggcacgtgcacacgtatrtttattgtggcactgttcacaattttactcttattatgaacttagattttttttaaatgtttcttagttttggtgagaagaatttgagtttagcacctttaaagcactagaagtccaatttcctttttctgggaattttaagaatattcaaattacataagaacttacttatctctgtaagtcaataagaacagagctccttgaatttaagagacattatactgtaataatatcctctatagataggatattatatctcacataatgagagggaaaggcctttctgaattttggacacatagagacagagcttacagcttcatgtctacaagttaggcacaagtcaagagtaaacacagaaacacaaaatctctctggtccaaaatcaaagaggtgttctccttcccagtgggcataacattttaattgatttgagcttaaagaaaatagacaaatttttttttaagtataaccagagtctctgtcatctcacccaatagggatagatctatatcaccttctacagagatcatgagatggtcaaactgtaaaaccaaaacccttattgtttttacagttaatgaggaactgattaatgagggaaccaatagatgtcacaactggcttaaaggagaattcaaaccacacacatatgtacaggtaatcaaacatgttgaaatgaatttacaaataggtatgaaactagtcggtatccacagggcaatctgttttattatactggacaaaattcatttgcattagcataagttttctacaatttacagagttgtaaaatagctcgaagrcaatgaaaatcacaggtatttatagaatcagataacccagaaaggtgcatttgacaggacacctggtcatctttttctattgtctgcttcagtctttctctggagaacaatccaggaagcaatccttgacttcttggcccacttagacacaaggtcagccaggccctaatctttcaacatttcagctggaacttacgagattctttgagcaagcatgggggcaaggagtttgtcttcacctatccctgcatccttagctaggtgaggccttttcttgctgtctcactttcctccatgcatcttgtgacccatccagaggatcacttcagagccaaacattgcacagtgtggaggtgggactctgatgggagaaggtttaacttggcaaagaattaccattggaataattatcgagagtgacctggtaaggtctggtttcaccagggccctccctgagggtcattcccaaccagtaactgcccatagagccacaggctcagacctgggacggtccctgctgcctaggccaaggcccagctctgtaccctgtccacaatagtagcacccccagtcttcgataggtggaattatcatttgtcaggtgataaaacaaagactgaaatctatttaagagaagcagtttaggagtacaaacatagaatatatgaaaagctagttatatgaaagtaaaatgataaaggttgagtttcacttataatttgaaaaccaacatttattgtgcttcttcattggacgtgttgtctcaattgtattttggtctctcagcaattttgctggaccttgctatgtgtttcactaaactcacttttcaaaaggagttgtcaggattttatgaattgttttattaaccccagaaatttttaaggctttcttaagatcaaatggttaagatagactggctcgtggcactcttattagataagagttctgcattttcatctgtaaatttagtagaaggttgtagttcaaagaaaaaagttcagaatgcctctgcaatattaattaaaacaaagtcctctttactttgacttttggcaccataccatatgcttttaaacatcaagaattagattgatctttagaaacaccttaagaatggaaatagcagccttgaagcttataataaaagaacagtttaaaatgcataaaacaactcctctgtttagctatgcattttgttaacactttttattttagtaaccttacttctgaaaaagattcttcattagtgttctcagcagtaacaactgatacatctttcttgacctcaccatgcttagaacgaaactttaaaagagtataaattttatttaaccctcacattttgccagatcactgttcttacartaagcacacatggcaggatatggtgatgaaactatgggaacgtacctgctctcttaggtctacttctctttacctgagtttgtcttactgatttgtgtcacatatccaagaatagaaactacctttcagaactaactcaggtttactgttcaaagaagctgaaggctaatgaaaggcaacgtatactctaaagatttttcattttcttcttattgctgcatactgaagttataccaaattatgcatttgcttccaaattttggttatccttttgattactgtctttatcatccattattttctttggaaggcagctggcaaatactccattatgtcatcagtaagagttcattttctatgtaggaataccacgcagagtaacaactgtgacttttgcccagctctaatacttaacttcttttgtcaggaagtgaactgatgctggcttctctttgtcttattccaagttgggcatgagattttccctgcattagaaggttgttgagacctgaagcctgggaaggtaagatgccagcatgaatactgtctgttgagaactgtggtttaattgagtgtctggtgatttaagagtgtaagtctttccagctgttcctggtttatggtcttgaacccttgaagttttaccaaaacatggacagtgaaacacttctacaatggaaaggcccattaacatattatttataatatttaaacataattgtatatttattgaaattgttacttaaaggaaaaatkgacacatagcaatttctatgtatagatactttgtatatacaagtctatatgtatcataaaataataaactaagaaaaacatatatgtactttttgtttgtagttttactttttcttctgattttttaatagacttttatttacttatttttgtytgctttgagacaggggtcttgctatgttgcccaggctggtctcaaactcctggcctcaagccatctacccacctcaacctcccaagtaactgagattacgcrctcagctgcatgccactgcacccagcactagactttttttttttttttttttttagatggagtttcgctctatcgccaaggctggagtgcagtggcacagtcttggctcactgcaacctctgcctcctgggttcaaatgatctcctccctcagcctcctgagtagctggaattacaggcacccaccaccatgcccagctaatttttgtatttttagtagagacggggtttcaccacgttggccaggatggtctcgaactcctgacctgacgtgatccgcccacctcagcctcccaaagtgctgggattacaggcgtgagccaccacacccagccttagactttattttttagatcagttttagatttcctccctgatcgttttttgaggccagcaaagtaaggagagtaaagactcgattttgttaatatggagaaagaagacaacattaagaaaatcaacaaattataaagttttgtctcagtactctcatgacccaaccagcattctatgggtgtttttcccaaaaagtctccattggaaaagactagcgaatgcacacactcagtaatgagggtcatgtttttacactactgttgcttactctcaccatttgttcgacatgcttcttcattcactgtgccttagctagttttagtaaataaaatgtttcaaattttcaatgacttacttaagctaagaaattatagtccttcacaatgaaattataaacaatatccttcctagtgacaaatatggattattctctatgaagacttatttatacacaacatgtagttcatttagatacaacttgtagttcatttcagcatataaattatctgggtaacagtcaatcttaaaagaatcagattttgcggccaggcacgttggctcacacctgtaatcccagcactttgggatgccgaggtgggcagatcacttgaggtcaggagttcgagacccacctggccaacatggtgaaaccccgtctctactaaaaatacaaaaattagctgggtgtggtggtgcacacctgtggtcccagctactcaggaggctgaagcaggagaatctcttgaactcagaaggcagaggttgcagtgagctgagatcacaccattccactccagcctgagcaacaaaagcaagactccatctcaaaaaaaaaaaaaaaaaaaaaatctaagattttgcttcataactggacttaaatttactaatacatttgatgtactaataatgatcagtttttaatggtgctaatgtcatataaatgtgacgttaaacaacaaaaattttgtgagattgaatgttagctaaatatctctacatattattaagaatctaatagaggctttaatgaagttacatttatagcactagctaataaaagatgcaaaggtcacaagctagtcttctctcacygtttctcggcctataaaaatctagtaggggtttcataggattttggcaacatttgtttgttgttatatggctgtagacttttttttttttttttttttttgagacggagtcttgctctgttgccaggctggagtgcagcggcgcgatctcagctcactgcaacttccgcctcccggattcaagcaattccctgcctcagcctcccgggtagctgggattacaggcgcctaccaccacgcctggctaatttttgtattttcagtagagatggggtttcaccatcttggccaggctggtcttgaactcctgaccttgtgatccacccaccttggcctcccacattgctggaattacaggtgtgagccaccgcgcccagctgacttattaaagggatccaagcccatgttgttttcttgaacatttctaatagtttcatttttgatttgttttttccatttttcatgagttgcaaattgaacwttgattgacacagagtatcaggtggaagccagatttgacgtatgccagtattagactttctctttccaggatagaccagcccaagtgaagtggcactgacattgcatctccctttggttagcgaagtcttttataatattgtaaacatggggtttttttctgagaaataatgatagcacatttattgatcaccatgctcttaaccttttctagttataatttttcttagttattttattccttgtaaacacacttgtatagtgtgtttcagtgttcaaagcactctagacattcttacttgattctgacaatagccctrtgtagttaaagcatgtgatgttattttgatttcacagtcttaagtgacttgcccaagatcacatagccaacaagcatggaaatagggtgaagaaaccagttttttccagttcacagtccagtaatgtttcttgaagctaaatggtgctctgtttgtttacatgactaaaaactgagttattttattcatgtgaaaggtctcctatgttgtaacaacttccttgaatgccacagaatcgaatgaatgtatttcatgtcaatgtactaaacgtagcttmtgtgtttgggagcagataattggtggtattcagccagaaaaccaatttgtataacttagattctgaatttcagaatttctcacctagtggagtatttgtacctgttccagcatccatcttcaattccaggaaaacatgggtgatcctttattgcttggtattcacctcattaggtggcacaactgtttgctaaaacagtttgtgcagaagtaaggtccagaagtaatttagcaagagagttacttacataaagactgagagctacgtagttctgggtaaatgctggtgcaacatgacctctttgtgttttgtataaatgctgtgctagtactaccagttgtctatatccacttaatccacccttacttttgaaggagtcgattaattctgtttgcctgaaatttgataattgtatcatcaatgaagtcataacattttcataaatgagctagagctttaaaagtagaatccttgtacacagtcattggtaggcagtgtttacttttttgtttggtaaatatctgaaattttaaaattcatttttaggttagccagtcctacttcctggatagtaatgtaatatttaaatttgtctttgcctttccctaggttctgttttgacctaacaatgataagattgtttatcctttgaatttgcttaaaattaccatcaggtttctactttcccacaagagcatgtgattgctttatcccagctgtaagataatagaacaacctagtgttgcttggtttactttgtatgcctttttctatttgcataaaccctgatctgattacaaacttgtatttacaccaktcccttgactccttccaactcaaagtatttattgtccagttaaaacatttatggtcatataagctggcttatctttttttctttgatttttttttgagtcagagtctcaccctgtcgcccaagctggagtgcagtggcccgatctcggctcactgcaagctccgcctcccgggttcacgccattctcctgcctcagcctgcaagtagctgggactgcaggcgcccgccaccatgcccagctaatttttttgtatttttagtaaagacagggtttcaccatgttagctaggatggtctcgatctcctgacctcatgatccacccgcctcggcctcccaaactgctgggattacaggcgggaggcactgcgtccggcctctttttttcttttttttatttggaatagcctctcactctgttgctctagctggagtgcagtggtgcaatcagggctcactatgccttgacctgggctcaagtgattctcccacctcagcctcctgagtagttgtgactacaggcgtgggccaccagccagctaatttttgttattttttgtagagacggtgtctctaccatgttgcccaggctggtctcaaactcctgggctcaagccatcctcctgcctcagcctcgcaaagtgctgggattacaggcatgagccactgtgcccggcctgaatttcaatcttacttaaactcaaacagccttaagaaatctgagtaatgagtttatagcttttaaaagagatcttccttatcaaaaataattatactatctcgtttcaggattacttatcaatggttctggttattttttctagaatggaaactgaaccctatctttaacattatttaaaaacttgagagttattttaaaagtatgacaggaattgctctcacagctaaaatttttccttaaaaaacctttagcagtcacaaataattgttacctacttaattctatttaaaaaaacaggaatgatagaagggttttattttatttttgttattttaaagatacttttgaaaaccgtttagcacccagtttcttttactctgtggaatgctgcccctttccttctgtgtttattttgtaatggcacatggatagattgtgatggtggtctctatgtcaactttctattggtgcgtgtgtgtgtgtgtgtttatgtgtgtttattccatttcccttttgggaagcaggaattggagctggaagagaaagaaacaaattattttcatctaatcttttttctcctcagcttatttaactgacttaaactatggaaaaattggtaatttatatttaaaatttataaattktgtttcccaccatatatattttttatttacatatatatgtatatatattttttgagacagggtcttgctctgtcacctaggctggactgcagtggcatgatcatagctcactgcaacctcaaagtcctaggcttaagcgatcttcccacctcagcctccagagtagctgggactacgggtacaaccatgcttggctaattttttttttttttttttttgagatggagtcttgctctgttgccaggctggatgtgcagtggcacgatctcagctcactgcaacctcygcctcccaggttcaagcaattctcttgcctcagcctcctgagtagctgtgactacaggcgtgcaccaccacacccagataatttttgtatttttagtagagatggggtttcaccatgttggccaggatggtctcaatatcttgacctcgtgatctgcccgcctcggcctcccaaagtgctgggattacaagcgtgagccaccatgcccggcctaattttttaattttttgtaaagacaaggtctcactgtattgcccagatagatcttgaactcctggccccaagtgatcctctctcctcagcctcccaaagtgctgggagtagaggcgtgagtcactgtgcctggccctccaaaatatttttactttcatttaagtttgctaccgatatcctatccttactttccctatgtccccttaatcttatctttatggtagtttaggagaatctagactgccgctttgcttaactgataccgccccgggaagctatcaccaatcacatcactgcctcacattgagtaggacttgaagttcatgaaacatctttaatatgctcatctaactcaaattgwtcctttgtgctatatcttgatgttcttttctcttatttgtttgtatactgctttattagactatcacattagttatcaaagctagtagttaattcacatgttgattttctaggcctgtatccttattagtctaaggtggaagaaacagagataaaatttctaaatacctacctaaactggaaaggaataaggaagataattaatttagtagaatcaacctttttattcttgacaaaatctggttaaaacaaactggttttacacacacatacacttttttacacagaattattgctgagtatattagttaatattaaagtgttttttattttaaatgctactatgttgaaattgatctggtgccaaacagtgtcattcttgttaatttatatcaatctctgtgttttataatcctttgaacatattaacaaggaaaaaggaatgattggtaataccaaatattatggttctttgttatatagttttagagagctacaggtaattggctataaaatatttggttggcagtggagaatatttttaaaattctatagataaaagtaataaggagtagagtagaactaccagatattcaaatatattataaagtaacagtattgaagcagtgtggcaaaggccccagattagatgtgtagatcattgaagaagaatagaaataaatgctgttatttatataaatctgacatatgttaaaggaggccctgttaaacactgggtaatggattgattatttaatgaatggggttggaataaccagttagcagttttaaggaaaaatgcatttagatcattatctataccagatacaacaaaaagtcaatttgtgataaagtgtggacatttatatgattgaaaatctacaagataaaaacactgaatactctataatttatctggagttcctaagcagttggaaaactggaaaaagaagatagtaaaaaattgtttyattataacaaatttgcatttgttttattgtaactgtakatctgtgagcattataggaaaacctgtctactccatgttcacaatctgaaaattagtctccttttttcttcacgtcatctggaaactgtttttcttccaaactagctaatgaaacacagaatgcaattctttatctaaaattttattctgtaggtgcgttgaaaactatacaggagctcgttgtgaagaggtttttctcccaggctccagcatccaaactaaaagtaacctgtttgaagcttttgtggcattggcggtcctagtaacacttatcattggagccttctacttcctttgcaggtaagtaaaatagaaacatgcttttgagaaaagtaatacataaagtagttattccactaaataattaatatgcccttagttctagatatttttccagatactgtattatgtttagttatctctttaatacagtttttgttactaatttcatttttgaaagaatcttaataagcagtctcaatttgttctttgttactgttgtcaatatttaccttgacttatctaaactactaaggtaaacccatactcactatagcaaatatgccaaaagcacctgaatatttgggttaggtgtatttaaagtaaattttgtatgtgaaagaaaaggaacaacttacgcaatactgtacatgttagcttaagacatatggttaatatgcagggtcagctatctagtgcccactattgtgctaggcataaagaatacaatagtgaacaaaatagacatgtttcccaacttcaaagatacttaaatcaatttggagagacagacaaaaaggcaattaatttggggaaactggtaactcacaagagagacaaaaaaaaaaactacttgcatgaagcaattatgcactgaagattactttcattcgttttgattttcaattgtttttgaaatkttgtaaaagtaaatatagaatttagtaagtccaggagttatttggcataactctcatcattaattaatatttatgaaactcacactgtattctatcatagatacttgtgaaaatggagctgaaggtaatcataaaagagagacaagtgggcttgagaagtttgtatactaagaaaggtaacatataggtaaaatagtatcttgttagatcctgatttcttaactactttacatcaaggaataattaaaaattggaggaaattggctttttaaaaatatgtggtattaaatagtttattccaaaacatatcatttaagcaatccagtagattttatttctcataattttagcatctgactacttcagatacaaaaatttaaatacaagcccattgtatcagattgcatttccgagggatggccatatgatatccctcattcccacatactcttctgtagtgtgaccttgccactcatccatcaagaggtagagtttattgctacagattccttgaatctaggcaggcaccgtgactgccttgatcatagactacttgggatgctgcctcatagaatcagccgccatgttgtaagaagcctaaacagcaggaagaaccagctccagctgaacttccagccaacagccagccttaactgctggccattttaatgagccatcccaggcattcagctcattcaaacctttagttgactcctgacttaactgccagtttactgcagctacacagagagcccaagcaaaagatgcccagctgtcaacccacagaatcatgagataaagtttttttatcccccaagtttggggtggtatgttatgcataagtagataaccagaacacccatctttggaattaggtttatgcttgactttaaatgtatctatgtttggaaagctgaataatgatctattctatccctctaaacattctgtcagtctaatatgctaaggggaagaccaatacctacttccctcattaaycactcttgtgccagtttggagatatagtktccatctgttattgattggataatgaattgtgtttaattaatgaattatgtttaattcattatcattaataagtcaggatagtctaagtttggctgcagtaactaccaaccctaatactttagtggcttaataaacagaagattatttctcacttattgtaggtaattagtatggattggcaagcagggctttactaatcatagtcacttaaggactcaaactgttggagcaaccaccatcttgagtgttgctggttgtcataacaaagggaaaagaaagctctggaaggtctcacacttaaattaaaatgatctgtcccagaagtgacacacatcactactgacataactcactagccagcaggagtttcatggtcctcctcaattataagaggtggctggacatggtagctcatgtctgtattcccaagtgagaggactgcttgagcccaggagtttgagaccagcctgggcaagatcacaagaccctgtctctacaaaatgaaaaataaaaaaaattagcagggcatggtggtacacatcwgtattcccaactactcgggaagcagaagcaggaggatcccccaaggccaggagtttgagatgcagtgagctgtgattatgccactgcactccaacctggaaagagaacaagacctctgtttcctatttwatatgaatagattaaatagataatatttatttatatatttatttacatatatttacaataagagacatataatatatccagctgtcaggaaatgcaattcaatcatatgctcataagataaagagccagaaatacatatctaatatagtgaccaaaggatttataagaatatctgctattccactgggaattgttgagagtgatttgtgtgatattaaatccatagaacttgggccaggtgctgtggctcatgcctgtaatcctgccaaggtgggaggactacttgagaccaggagtttaagaccagcctggacaacatagcaagaccccgtctgtacaaaacaatttttttttttaattatccaggtgtggtaacacatgcatgtagtcctagcygcttgggaggctgagatgggaagatcgcttgagcccaggaatgagaggctgcagttaagccatgactgcactactgcactcctgcctgggtgagagagcaagaccctgtctctaaaaaaaataaataaataaacaaattaatggaactttaatattgttgtagttgccccaaaatgaaattcctttgccaacccattgagtttgtgaagggcatagtatattgtaccccacaggtgttcaatgccccagagcagcaaagtttcagaaaggagaccttctaagctatagctgttctgcagacttgtgccagaacttagaaatatttctagtctgaagtaccctgtagyaggctaaacaataccttttgagtagaaagtataggtataatagaaggaaaagcgtatatatataagaacaagaagtggtgctgaatacaagagaaaagaaagctccaatcacaaacattatgtgggtctccatcctgaattcacactctctgaatgtctgggggtaaaaagctaagaatataaaataatctaggctggtaatgtcatcaggtggttgacagaaacaaatacaaatcaattcttgaagagcctacttttatcctttaccttgaaaagcgtctcacagtatgaaaagattaccaaacgtagaataaaagaggcacaatttattagaactagcagaaacagtaggtagtagggtaagatattcagaaatctgtatttattggaagaatcagacacatgatataaaataagtatgtttaatatgtatcaaaaaataagtgagaggtggccgggcacggtggctgatgcctgtaatcccagcactttgggaggccgaggagggcggatcacaaggtcaggagatcgagaccatcctggctaacatggtgaaaccccgtctctactaaaaatacaaaaaattagccgggcatggtggcgggtgcctgtagtcccagctactcgtgaggctgaggcaggagaatggcgtgaacctgggaggtggagcttgcagtgagctgagatcgcaccactgcactccagcctgggcaacagagcgagactctgtctcaaaaaaaataaaaaatagaaaataaaaattaagtgagaggcttagaaataagcaaatgtggcaaagactaaaacagatctccaatgaatcaaatataatttttaaaaattcagtacatatcttcaataaatttttaaaatttagtgtatgtctttaaacagcagattaaacacaataaaataattaatgaattggaaaatagataggaaaaaattacccagagggtaattctaagagaaaaagaaatggaaaatattgaagagaagtcaagaagcatggtgaccagagtgtgtgtgtctaccttatgtttagttggaattccagaagaaaaagactggggcagaggcagtatttgaaaaagtaaaggcagagaccttttcagaactgatgaaagttacccgtagatgttagaagcctaacaaatctcaagcaggataaataaaaataaatttacatatgggtgcaacatagtgaaattgtagaacaccagttctaaagagaacatcacaaaagcagaaaagaatggcagattatcgtcaaagatgcaacaattaaaccaacagctgacttctcagttgsaaagaagcaaaactagaagacagagcagtgatattttcaatatgctgagagaaaacagttaaccccaaatttctgtggcagtgaaaacatctctcaggaatgagggtaagatgaagacaacttttaataagcaaactttgagagagttatccctcagtaaaccttctgcctgaaggatatatgtcaggtaaaaggaagttgatcctatacggcgtgtgtgaagtgcaagaaagaacagaaagctattactatgtgaatatcaaaacaaatattgtataaattataacatagtattgtcctatgtatttttttaaaggaattaaaacacatgatagcaaataagcttaaagtgtactaaggtctttgtatggggggaggataaatatataagttaattttgaccttgatattttaagatgagtattaaaatgtctagggtaacacataatagaaaatcaaagtgtataattgccggattagcagaaggacaaaaatggaattaaaaataaccaattagttaaaaataaataaaaaagaaagctaaaaaacaggataaatagaaagtgtgtcacaagatctaggctgtcctgtagtgaccatgtgaacttggaaatgtgctttcaagaatgaaattgttttctgtaatagtttttggtccattagtggttgaaattgctttaaactgaggtccttttgaactttagtaactaattagtgccatcattgaaggaggtccaaaatgataccccactaatgctaaaatctgggctagaatcagtagtgtctccggaataggagcaagtatgcttttagaaaatacacatcattttgcaatggtaaaagtgattttgaattcattttcattaatgtaagctaaaactgcatatagacataytgcaaaaaatgaaatcaactgtacattccaaaatctataacataaatcataacctatattaactgatcaaatgactgaaaaacctgatgtactgttacctcaaaaatgtccaaaattactttttaaaatgccattactagaataattgactaaaggcaccccatgtcacataagggtcccaactgataatgaaagctaacttctttaaaaagagcacaaaaattacattaagatacaacagstttgctgttgtcttaaaggaaaaagaccaggtggcatcatcagcatctggtccccacagatgatctatgtgtactaatggatttgttaaataatggggaacagttttaaagcatcactgacaatttcaggtagttgtggaaagaaaatgaaccatcaaatagtcaagtttatactttcatttgatgtgttgtaaaaagggggaagaagggaaattaaaaaaaaaaactttctttctaggtcttctgacatgcttttcctattacacttccatttttgtgtttctctcctctttattgtcaggaaaggccactttcagagagccagttcagtccagtatgatatcaacctggtagagacgagcagtaccagtgcccaccacagtgagtaaactcaaaacaaatgcttattttaaaaccctagatgagactgttgttgttagatgtagggatttgtatttagatctatccagaaaaaaaaggttgagcctaaacttttctatgggttttttttttttttttggccaggtaccctttttcacataaaaatgaatttattatcagtatgacacaaatcacattttttcccaaagaaaacaatgttatctcaatatatgaaattctgatgtagctctaatgtgctacacagatataagggactggtttctcagaaatattttgaagtgagccagcatatggggaggaagaagagttttacctgtaaagatcagcaaatctttgggaaacttgtagacaaattgatgttttaaaattgtcttgagacttctggccaagatggagtaacaggcactggatttatttccttctacttaaaacaacaaaaaatggacaaaatatatggagcattaaaatttatgaagacaaaatatatgaagacattgctatcagtcatcaaaggaaccatgagccctgagagatggcaatagactagktaagccaatgattgccttagattactgcctggagagaatttccaggcttttgtgcaaggtgggggaccccaggctgagtttggctgactccgagttgagaagatggagctaagagtccaaaaagatcaaggtgactatattgtactgaggagagtcctggaaaaaagagaggtgtatgaagagagaactccagagattttcagttcaagtattcagctgagtactaatcagggcatgtgtgggaggaaaatacttgaggttgtggaaaaaatcacctgaaggattagaggtgcccagtattcacacagggccaggaaaagtgtctgttcccactgaggctggaaacctcattattcacggggcacggggtagagtacatagaaaggtgtttgcctgatagtggggaatactagccctagattaagcactgctacagttctgcctaataaactgtaaaagcatgagctgacagaatcaaattgtttccaaataactacatcctagatcaaagctcaacaatgctgaaaaatagctagtacccaacaggtgaaattaataatgtttcacatccaatacaattaccaacctccaaagaagcagaaaatgtgctcaaaatgagaaatattaagaaactgaaagccgggcatggtggctcatacctgtaatcccaacactttgggaggctgaggcagatggatcacttgaggtcaggagttcaagaccagcctggccaacgtggtgaaaccccatctctactaaaatacaaaaaaaaaaaccaatggtgggtgcctgtaatcccagctactcgggaggctgaggcaggagaatagcttgaaccacagaggcggaggttgcattgagccaagattgtgccactgcactccagcctgggcaacagagcaagattccgtctcaaaaaaaaaaaaaaagaaattgaaattgatacagatgctttaaataccaggcaagcacagttattataaatgtattacatagattcaaaagtcaagtagaaacatggaagatatatttttaaaggacccaaaccaaacttccagagatgaaaactagtgtctgagatmaaaaaaaaaamaacaaaaaaacaaaaactggatggtattaacagcagattacacaccatagaaaatattggtgaacttgaagatatagcagtagaactaagaaaaaaagaaatgcagaaagaaaatttttttaatgaaaagagcatcagtgaactgtgcgacaactgcaggtggcataatgttgagtccctgaaggagataagagagaggagggaacagaagaaataagagtcaaaaatttttgcagatttaataaaagcaatcaattcacacatataaaaatttcaacaaaggcctggcactctggctcacrcctgtaatcccagcattctgggaggctgaggcaggaggatcacttgaaccgaagagtttgagaccagcctgggaaacatagtgagacctcatctctacaaaaaagaacaaaattagctgggcatgatggtgcatatctgtagtcccagctacytgggaggtgggagaattgcttgagcccaggaggtcaaggctgcggtgagccaagattgtgcccctgcactccagcctgagtaacagagtagtaatacaccaagacacatcataatcaaattgctcagaaccagtgataaagtcttaaaggcagctagaaaaagacacattacagacagataacaaagctaaggatttcagcaggcatttttcagaaataacacaccttaaaagaatggagcaacatctgtaatgtattttaaaaagtaaacctataattctacatccagcaaaaatatctttcaaacacaaggcaaaataggcaaatcaatcttggaaaagatgaacaaagttaggagactcacacttcctaatttctaaacttattatgaagctgcagtaatcaaggcaaagtagtgctggcataaggatagacatatagatgaatggaatacaattgagagttcagacataccttcttacatttatagtaaatgcattttttaaagggtgccagacaattcagtggggggtaataatagtcttttcaacaaatggtgctggaaaaactggatatccactcacaaaagaatggatttaaacccctacataccatatataaaaattaactcaaaatggatcaaagatctaaatataagagctaaaaccatataactcttagtagaaaacataggtgtcaatcttcatgaccttggattaggcaatggattctgagttatgattctaaaagtacaagcaacaaaagaaaaaatacaaaaactggattcatcaacattaaaaacaaaaaacttttgtgcttccaaggataccctcaagaaagtgaaaagacaatctacttctgagagaaaatttttttaatcatacatatgagacttatacatatgatctgaaatacatatatgtagttgaatatataaacaatatttacaacttaatgaagaaacaactcattttaaaaatgagcaaaggattggaaaagagttctccaaataatatgtacaaatgactagtaatctcatgaaaagacaatcatcattagccatcaggaaatgacgatcaaaaccacaatgaaaccaagtgtggtggcatacttctgtagtcccagctattgggaggccgcagtggaggatcacttgagcccaggagtttgaggcyagcctgggtaacatagcaagaccccatctcttaaaaaaaaaaaaactttgaggagggcgaaaaaaaagaaaaaaaatgcacatgaatgttcgtagcacatagcagcattatttataatagccaaaaagtagaaattagtcaaatgtccatcagctgataaatggatatataaaatgtgttatattcctactatggaatattattcggcaggaaatagaaattaagtagtaatatatgctgcaacatggatggactttgaaaacaacatgctgaagtaaaggacccagtcataaaggaacacatattttataacatttatatgaaatgcccagaacaggcaaatctatagagacagacagtagattaatgtttgcctaggattggaggaaatggggggatgttggggagtgacggctaagggatgtgggctttctttttgggaatgaaagtgtcataaatttgattgtgctgatggttgtgcaactctgaatatactaaaagccattgaattgtacaatttaaatgagtgaattttatggtacgtgattgtatctcaaaaccataaaaaatcagtaactatttagaaaaaaatgaaggcaaaatagagattttccaggcatatgacagttgaaagaatttatcatcaccagaacctcactaaagtaaatgttaaaggaagtccttcaggcaaaaggacaatatcagatggaaatatggatttacataaagggaggaagagcaccagaaatgacaactatgtgggtaaatgtgtaagatctttctcgtattatttaaatctccttaagaaataaytgaccatttaatgaaatatcataacaacatartatgggacttacaacatacataaaagcaaaatgtataataagaaaatacaaagattgggagggtagcgagggaaataccccactgtaaggttcttatgctgaatgtcaagcagtacgtcatcacttgaagggaaactgtaataagtcaaaagtgtatgctagaaactctagagcaacctgtaaaaagtctaagtcacccagttaagatagagattgtaaaattggataaaaattaatgtgatatgctatctgcaagaaatatacattaagtataaagacacaagttaaaagcaaaaggatgaataaagatatgtcatgctggtgcaggtgtggtgtggctcatgccttgtaatcccagcactttgggaggccaaggggggcagaccacttgaggtcaggagttcaagatcagcctggccaacatggtgaaaccctgtctctactaaaaatacaaaaactagctgggcgtggtggcaggcgcctgtaatcccagctattcgggaggctgaggtaggagaaccgcttgaacccaggaggcagaggttgcagtaagctgagattgcaccaccgcactccagccagggcaacagagtgagactccgtctcaaaaaaaaaaaaaaaaaaaaaaaagaaaaaagaaaaagaaaagaagaacccacccagctctaccattactgtgatatctgaggctggagaaaataatgaaactgtccagactatcctcaagtttacagacagtgagaaatacccaaatgaagctcctttttatgaaacattcttggaaaatctagaagataatgtctcagacatttaaaaattcttagcattacaagctgaagaaatcttggcatggtgatgatctttagtgacagctgtgcaagaaaaattaaatgaaatggataaaaagcaaaagggaggaagacatatatctagaatataaaaagaactctttcaaatcaataataaaaagtcaatccaattaaaatttgggcaagaaacaaaaagaagcagaagaaaccatagagcaattattccatggcattcctgtttacaattaagcatttcttaagttgagaagccgtgtttgatactgaactcttggaaatcaaaaagaaccaaatcaaagaataarcaggaaaaaataagtgggaagcagctacttgaaacagatccaaatcttgacacatctgatatccagttcttggaggatgctggaaacaacggaggtaattgagtctttgtaccagtaaatggatgacctggagctgggggatgaggaggatgatccagactccaatcctgctgacccagagagtgactccactgaccagagggactgtccccatctgtagagaggctcgactgccacagcatcctggctatgctcagagggttttgattttcctttccttttctccaagaagaaattattttcaggagaatattcttctgatagatttcatcattggacttaataaacttatcttaaaatttcaaaaaagtccattgtattcctrtatatcagtgacaattagatatggaaatttaaaaaaattattaatgatagaatctcaatgtattaagtacataagcatacatcagacaaaaataygaaaggcctatgtattgaaaactaaaaaaaaaattgctgagagaaatgaagacctaaataaatggagagttatattttgttcatagatttggaagattcaatattgtaaggtgtcagttctcaaattgacctatatagatgcagtgctatcccagacaaaatcccaacaggtgtttttgtaaaaattgacaaggtggttctaaaattcccatggaaacgcaaaggacctagaatagagaaaataattttgaaaaagaagaacaaagttagaagcttcatactgggcatccagatagaccacaattgatttttgacaaagctgccaaggcaattcaatacagaaaggatagtcattccaacagatgatactggggcagtttggatattcacatgcaaaaacatgaattcagaccctttaccatgcacaaaaaaaattcaaaatgggtctaaatataagagctaaaactacaaaaaccttagaagaaaacataagagaaagtctttgtgacattgaattaggcaaagatttttagatacaatacaaaaagcacaatcgataaaaagaaaaaatttcataaattgggcttcatgtaaatttaaaacttttgtgcttcaaaggacaccattctaaaaatgaaaaggcaagacacaaactgggacaaaatatttgcaaatggatataaaagatggataaaggacatgtctagaatatataaggaactttttcaactcgataataaaaagacagcccatttaaagtttgggcaagatttttttttttttttgtcacccaggctggagtgcagtggcatgacctcagcatactgcaacctctgcctcctaggttcaatggattcttgtgtctcagcctcccgagtagctgggactacacacatgtgccactacacctggctagtgttttgtatttttcggtagagacggggtttggtgttggccaggctggtctcgaacttctggtctcatgtgatccacctgccttggccgctcggaatggacacatgatcttttttagggtaatggatttattctacaatgggattgtggtggtgattgcacaattctgtaaattttaaaattcattgaattgtagacttctttgtttgagacagggtctcgctctgttgcccaaggctctagcagtgcagggacgtgatcatagctcactgcaaccttgagctcctgcactcaagcagtcctcttgcctcagccttccaagtatttgagactacaggtgtgcaccactatgcctggctaatttttacattttttttgtagagacaaggtcttgctatgttgcccaggctagtctcaaactcctggtttcaagcagtcttcctgcctgggctcccaaagtgctgggattacaggcatgagccactgtgctcagctgaattacatactttaaaaaagtaaattttgtaagttgtagattatacctcagtaagttgtttttaaaagcccgtttttcaataagtggtgctgagaaaactggatatccacatgctaaggaatgaagttggacgcttacctatcaccatatacaaaaattaactagggccgggcgcagtgactcatgcctgtaatcccagcactttgggaggcccaggtgggcggatcacgaggtcaggagttcgagaccagcctggccagcatggtgaaatcccttctctactaaaaatacaaaacattatctgggcatggtggcacgtgcctgtagtcccagctactcaggaggctgaggcaggagaattgcttgaagccggcaggcggaggatgaagtgagccgaratcacgagattccatctcaataaataaataaataaataaataaataaataaataaagtggatcaaagacctaaacgtaagagctaaaattactaagagaagaaaacatagggggaatgcttcatgaaattggatttggcaatgattgctttatacaccaaaagcacaggcagccaaagaaawgttagacaaattggacatcaaaacttaaaattttggcacatcaaaagacactatcagcagagtgaaaaggcaatccatagaatgggagaaaaggttcacaaatcatgtatctggtaaggatttgatacccagaatatataaagaacttctaaaactcaattacaacaagtagaagaacctaattcaaaaacgggcaaaggatttgaatagacatttctccaaagaagatacacagatggccaataagcacatgaaaaaagatactcaacatcacaaattattggggaaatrcagatcaaaaccacaatgaggtaccactttcaacctttaggatggtgactactattgatacaaacaaacaaaaaaccagaaaccatgtgttggtgagaacacgtagaaattggaacccttgtgcattgttggtgggaatgtaaaattgtgcgaccactttaagaaaacaatatggcaagtcctcaaaaaaaaattaaacagaatttccatattatctagcaattccactcctgggtatacatctaaaagaaatgaaagaatggactcaaacagatatttgtatacctacactcatagtgttaatggctgttgtgagaccttggttcttgtcttttcagtttaaaagagtttaaacaagagacacaaaacagagatgcagcatatagcaatattattgcaaaggagaaagaatattttgaaagttaggtgcagaatagacaggacaccctgagagaggattcagggcaggctactcataaggatgagacagcaaagactggcactagggagactccctttctgggagtcttagattattactcatgaggaggtgggaagagctgttactagtaagcatgttttggctggtcctctgggtgcacatgccagtagctgtacgtgtttgttcacacatcatatatctcattagcatctgaaatctctcctcagggaagtgttttttacaattataatgagcaatgggccagtctgaggacaagtaaaatcaaaatgcacatgctccctacagggaaatttcctactggagatagctttgcttgaatgagctggactacaatgcgaatgctgggcttattgtgttgacagcacggtcgcccctgtaaccaagaacatggttacttccttgactacctctcctgcctcaatagcagcattacttacagtagccaaaaggtggaaacaacccaaatacccatcagtggatgaatagataaaatgtggtatatacctataatggaatattatttagctttaaaaaggaatgaaattctgaaacatgccacaacataggtgaatcctgaagacgtgctaagtgaaaaagccaaacacgaaaggtaagtattgtgtgattccacgtatacaaggcacctagaataggcaaattcactgagacagaaagtagaatggtggtcaccagggctgwcgggaggaatagggagttactgtttaatgggtagagtttcagtttacratgatgaaaaagttctggagggccaggcgcggtggctcacgcctataatcccagcactttgggaggctgaggcaggcggatcacgaggtcaggagatcgagaccatcctggctaacatgatgaaaccccgtctctactaaaaatacaaaaaaaattagccrggcgtggtggcgggcacctgtagtcccagctacttgggaggctgaggcaggaaaatggcgtgaacccgggaggyggagcttgcagtgagctgagatcgtgccactgcactccagcctgggcgacagagcgagacctcgtctcaaaaaaacaaaatcaaacaaaacaaacaaaaagttctggagatggtgtgatggttgcacacaatgtaaatgtacaataatgacccttcattggtggtttagcttttagcaatttcagttacccacagtcaactgtggtctgaaatataaacggaaagttccagaaataattcatgttttaaattgcgcacccttctaagcaacatgatgaaatctcccgctgacctactcaggatgtgaatcatctttttgcccaccacatccacactgtatatgccgcccacccattagctacttagtagccatctcattatcagagctcctgttgcagtatcacagtgcttgtgttcaaataacccttattttacttaataatggccccaaagtgcargagtagtgatgctgtcatattgttataattgttctactttattattagttattgctaatcttactgtgtccaatttataaactttatcataggtacaggaaaaatagtatatttaggttttgtgctgtctgtgatttcaggcatccactggggtcttggaatgtatcccccatggagaagaggggactactgtacttaatgctactgaacttaaaaatggttaaaatggtaaattttgttaagtatatttcacaataaaaagtcagtcagcctgaaagagatgccattattaaataatgctatcagttgatgtgttttattgtgctcagaattatcacttatcaggagggataatctgttcccatactttactcctgtacatgagtaaaagcatgtcttttgtttgttaggtttgtagatctttgctatatttgtaatgtctggagccacattaatttttaaagtgcttgatggttaaataaccatgaagaaattctcagagaatacaggagttcgagaccagcctggccaacatggtgaaaccctgtctctactaaaaatacaaaaatgaaccgggcatagtggcgggcgcctgtaatcccagctactcaggaggctaaggcaggacaatagcttgaacccgagcggaggttgcagtgagctgagattgtgcctctgcctgggtgacaaagtgagattccacaaaaaaaaaaaataaaaataaatgataaaaaatatatatatcagagaatggaaagattttaaatttatcgtggtgttaactggaaaggttaatgctaggggccaaatctgatataaacaagtttgggaatagaatcctgccattagatcttgaatgcacaagtaccatgcttgtaattcatcaacagcattttccccaaaaggtttgcctcttgatttttttcttttccccagaatgttcagtgacatggtaaggacttattttttagaatccacacacatataaaacagcttgactttataaagacatacttgttaaaaaaaaaagtattaaaaaaagtattaaattactgttgtttttttgtaagaaaaagacatcataacaaaggttaaaaacaggggtaaggtattaggctcagctgacaaaattagttcatttgaccgttttttcaaggttgaacaatctcagtcaataactgcaacaccataactataagcaaataaccacccccccacacacacacaaaagccttttactaaatgtgacaagatatgtcatgaaaataaagttagattctctgatgaggagagccgattatgaagactgggacttgcttaataatgttagctcatattatgaaaatcatagcataaaggtacattatatttttaaaacttattaatgaccttccttcaccaaggatgtcctcctgccaccacaccatcaagccttacttcatcgataggtttattcatgtcgccttgtgtgcttctggaatgtaagsctccccgggcaatctttccaatgtattcctagcataaatccacagcctgaagtcttagcatgcatttatattgttgttagacaccatccctactgcaataatgccctaatgctgacaacacaactctccaaatggaaagcagtgtaacagtatgatcatgcacaccacatgcctatgtgtgccaggtactatggttaatatttcaaatattttaactcctataaaccttaacaactgtatggagtaggtggtattattctcactctacaatgagaaaactgaggtttagggaggttaaacccatgtttttcttactgcatttccacagatatgggtgttagtctcaggacttgctggctacagagggaatttttgtctctaaatagtcccaattagccacaggttttattagtccttgtttccttggtattttcttgccatctattattgtcattgctgttacagtgactcactctagcaatcttttcccctcaaccacccttttctaacttgtatatctaagacaggtcaccaggcttgttagaactttgggtaagaggcagtgagcaaagacagtgaggggcggggggtgtgggcaggcatgcagggaactttatatgtgagacttgaatggggaatctgacakaactcagtgttctgaggagtcttgtcaggctgctggaaatttttgatattctaggttagtttacctcaacacatcctatcacaaacagaaggggttggcttatatatgtgaagaagataagagacatgtagataggtgtgcgtagtaagaaacattgcaatggagaaagcatcttaattcttacttatttttcacaggtcatgaacaacactgaagaaacgtcaaagtgaaccaaatcattgtttttattttacaaaggcagaaaatgaaacaccactaggtaaaagaattaaaaatctaatcctttatttcttaaataaaacgcttgtgtaactcgtatcatgaaccataatccattctgctgcaaggtgtgtgtgcttctgtaatgtgcatcagtccatcggcaactgctaagtagggggtgataccagtataattcgaagtcacattggttcaacatgactctccccagaaagctgatgtgctgaagcaaccagaggcaaatgttcacacacctagagagaaaccctaagggatatatgaagatcttatgaaaaaggatgaaaaccctttaaatgcaaggagtagctggcttagtggcttcaaaaccacctcattcctgctgttatctgagaagctgcaagtactgatgaaaaaactgagaagacatttcacctggcaattagaaaaaagcgctgactgatagatacctctgtatcattctttcaatattgatgaaaatgctttctactagaagtgactgatttcaaggatctgtctctcaaaggaagaaacaaaaacccaaaattttgactgcaaaagattgactaattctaggtgcaartamctggaaatttaggattgttattgtactacacaggtcacaaagttccaaacctatttcccttgtaatttttagtgcatgatttttcagaatgcagtttctatctttttaggtgcaatattaagaactgattaggtcagaacaatttagtttctccagttttttctacctaagttacatgggggaaaaaaaagcaatagtaactttaaggaagtatgaaaataaagtcttggagcagtggaaaggtctggggctggtaaatggcttaggcagaagggcatgcaccggccaaacctaacagcctgtctctgaactatgtcctcgtcaaggctgggatgcacgctggcttctctacacagtctggcccagtgtaagtgctgtgaattcagtgkgtcactagtgtcaccaattcattcatcacccatcattcactcatttcacaaacacatgagggtaagacattgagacagagtacacaaaatgaaaagctctcacataattttaatagactttattagaagttttagattttcagaaaaactgagcagatagtatagagttcccctatgcttccccccaccccaggcctttattattaacatcttgcactagtgtggtatatttgtttaaccaatattgacacatttttactttactttttgagacaaagtctcactctgtcatccaggctagctgaagcctgtaatttacatgaagggtcctctttttgttgtatgtctttatggattttgaccaatatataatgtcatgtatccmctattatagtattgtatacagtagtttcaccaccctaaaaatctctactccatgtatttacccctccctctytcccactgaacctytggcaaccagtctttactaactttgctttytccagaatgtcatatatttgaaatcatgtagtatgtagcctttcagactaacttytttcacttagcaatatacacttaaagttcctctatgtcttgtgactaaataccccaccccctgccctttttaaaaaaaaaaaaaaaagctaggccatatktttttttttttttttttttttkggkggttwaaaaatttactgkggcaaaatgtacgtaagatttaaattttaaccattttgaagttacagtttaaaggcattaaatacattcgttgtatgtaccagtcaccactatgcacctccggaactttttcatgatcccacactaatctctgkgccccttaaacaataaattcccattccctcctgcyccctgtgayaaaacgtaatctttgttctactttgtctctatgaatctcactagtctaggtacctcacatcagtggattcatatagtattgtccttttgtgatttacttaatgtctgaaaggttcatccatgatgtagtatgtaraaggatttcctttttatggctgaataatattccattgtatggatataacacattttgtctatccattcatctgttgggtatttgggttgtttctaccttttgactackgtgaataatgctgcagtgaacactggtatacaaatataccctcaagcctccgctttcaattattttgtgtatatacccagaaatgcaattgctgaatcaaatgacaattctatatttaattggaaaatcaccatactgttttctacagcagctgcataccactatatttccatcagtaataagagttccaatttctccacatccttgccaacacttgtgtgtttttttaattttaataagagctatcccagtgggtatgaagtggtatctcaatgtggttttgatttgcatttccttactgtttagtgatgctaagcattttttcctgtgctcactggctatctgcatgtcctctctggagatctatccaaatcctttgccattttttaaatcaggtttttacactgttgttgcattttgggagttttgtatgtattctggatgtttaatccttattaggtacgtgaactgcatattatttcctcccactccataggtaatctttttactctgttgatagtgttctttgatgcacaaaattttaatgaagtataatttgcctattttttctttcgttgtctgtgaatttggtgtcatatccaagaaaccactgccacatcctaagagttttatggttttagctctcacatttaggtctttggtccattttgagttaatttttgcaaatgagtgaggttgcaactttgttagccatgtggttatccagctttcccatcattatttgttgaaaaaactatccttkgaatagccttggcacccttgtcaaaaatcatttacctacatatgagagggtttatttctaggttctccagtctatcccattggtctatccrtctgcctttatgccagaatcacattgttttgattactgtagcattatagtaagttttaaactctgcaggtttaagtcctccaatttgttcttctttctcaagactgacttggctatttgggatcccttcagattccacatgaaattcaggatgggtttttctatttctgcaaaaaaaaaaaaaaaaatcctaggattctgatagagactgtagtgaatctgcacatcactttgagtagtactgacatattaacattagattttccaatccatgaacatgagatgtatttccgtttatttttatctttattgaagcaatgttttgtagttttcattgtacaagccatttaccaccttgggtaagctaatttctgtgcrttttattctttttgacgctatggtaaatgsgactgttcttgtaatttccttctcaggttgttcattgttagtgtataggaatgcaactgacttttgtgggttgactttgtatcctgctaccttactgaattaacagttttttttttttttggtgtggaatctttcgggttgtctaaagatcrtatcatttgtgaacatataggattttacttcttactttccaacttagatgtcttttctttttctagctcaggctagaactcctagtactgtgttgaataggaatggtgaaatgagcattgtcttgatcttagaggaaaagctttcaccactaagtatggtgtctaccgtgggcttttcatgtctggcttttattatgttcaggtagtttcctcttatccctcatttgttgagtgtttttaatcacaagaggctgctggattttgtcaaatgctttgtctgcatcaattgagatgatcatctggttctcgcttcgttctgttaatgtagtatattatattgatttttgtatgttgaacaatccttgcattccaggaattcattccatttggtcgtggtgtacaatccttttaatatgctgctaaattcagtttcctagtattgacaattgttgaatcagcgatcataaggaataactggtctgtaatcttttcttgtagtatctttgtctggcttcagcatcagaatgaattaggcagcgtccttcctcttcaatttttgggaaaagttagaagggattggggttatttcttcttatttggtagaattcacaaatgaaaaccatcaggtccagtgctttttttccaggagaattttgattactaattcaattaccttactggttatagttctattgagatttttaaatttttttcatagttcagcagtagtacgttttgcatttctaggactttgagcatttcatctagattgtcgaaggtattcttctataacccttttcatttttctagaatctagagtgctgttcccattttcatttattttagcaattgagtcttcctttttttcttagtctatctasgcataggctttccaactttatggtcttttaaagaacttgtagtttcactgatttttctctagtgtttctaatctttattcaatttattatatctgttctaatctttattatttccttccatctgctagctttggatttagtatgtttttccccctcaagctgcaaagtcaggttgttgacatgaggtcttttttgttttttaatgtaagcatttatgtctacaaatttcccttttagcagtgctttcactgcatcctataaattttggtatgttgcatttttctctttttaatttcccttgtgatttcttctttgacccattggttgagtgttttgtttaatttccacaagtttgtgaattttccaattttccttttgttactgatttctaactacatcctgttgtggttcaaaaatgcaccatatcttcttcacttctttgtgtgtgatatgtatcttttaaaactatgtaggcttgatttgttgtttctgctttcagtgatcccatctcaagtttgctgattctttcttctacctgcttatatctgctgctgaacccctgtagtgaaaatttcatttattatacttttctctgccagaatttttttataatgcctatctgttgatattctgattttgttcatttatcattttcctgatttctttaattctttgttcatgttttcctttagttctttgggcatatttgagttaaagtatatgtctagtttaatgtccttcattaggacaaggtcaattaattttgatcttttgaatgcgcattattttcctgttcctttgtatggtttgtgatttttttccttgagagttggatattcactattataatatggtaactctaggtatgagattctttcctttccccacggttttctggttcattgtttttttatttttaaaagctgtcatccatttgttttgagagttttccaaattatttttataaaagactattccttctgtgtgtgatcactgaagtctctcttccttttatgtcacgttcagctattttgacataaattcccttgaatgctaggagcaatcctagattttacaaatcagctttgtcccaggtaatccttcaatacttactttggcctgcttttgggcttagggaccagaccaaggtgaaagcttgggtcttagaactttccgggcaagtgttttccctgggcatgcatgtcgcattttaaatcccccctgtatatgtaactgttcttaatttcccaaagtcttaccccagattctcctctgggccttagttgttctattttatgtttacacccataacctcttgccccatgcacctgtggttctttgcagcttttgtaagcagtgcccaccctaccagttaggcaaaacaaasatgtgaccttgtgtcagtccttcaagtatccgcagacaggttagaaaaaaatgtacacagtaatttgcaaaaaaggtctagcatgttttctccagttcaagggaggggactgggcttctgctgctttaagactgccacaatgtagggagaggctcgggcaagagccactaaaaagtcacaatattttcctaccattctgcagatgattgggcattcttttggttgctgtaaacctttgactgttttccaaagctctaacaaggttcgttcagacagttgcttttttttttttttgagacagagtcttgctccattgcccaggctggagtgcagtggcacgatctcggctcactgcaagctccacctcccaggttcacaccattctcctgcctcagcctcccaagtagctaggactacaggtgcccgccaccatgcccagctaatttttttgtactttcagtagagatggggtttcactgtgttagccaggatggtctcgatctcctgacctcgtgatcygcccatctcggcctcccaaagtgctggaattacaggcgtgagccaccacgcccggcctcttttttttttttaatgttttgataggcaaacaaaagcttgcagcttcctagtccacccatttttgctgatgtcgctggggtcaattatgttttattcctccctataattttattacaagaccttgaatagagtatgtttattaagtatagtgattaaattttagtcataattagaaaaatgtcaatggtctcaaaattctcctcaatctgataatttgcatttaaaagcaacattaataaatatattttctttcaatttcttctaaattaatcaatcttccctgtttttactggctaacagtcactatatagcaaaaacttttataaatctgttttaagaaatgaaagtttccagctgggcacggtggctcacgcctgtaatcccagcactttgggaggctgaggcaggcagatcacctgaggttggagtctgaggccagcctgaccaacacagagaaaccccatctctactaaaaatacaaaattagccaggcatggtggcgcatgcctgtaatcccagctactagggaggctgaggcagcagaatcacttgaacccaggaggtggaggttgcaatgagtcgagattgtgccattatactccagcctgggcaacaagagcaaaactctctcaaaaaaaaaaaagtttccataccaaaatattaagtgatacttattggcttctgccagtttcctactttgtagtagcacatgttcttgtaacctgtcttcagttgtggcatagggtagaagttaaatatataaaacaaaaataacatattttgcaaatatttgattattcttccctatatagggtcaatattaaagtaactttctggtatcacattctttatatcgtattcactttgttcatttaacaaggatattattactaatgcttattttattattttaggattttcattaagccaactyatacccagtttctacaaatgaaaaccaagtcaatcatctaaaatttcatgatttcttcccatcaagaggatctggagtcttctgttcccattaaaactgaatttatggcagtgcaaacctgggccagactgggtataaaatgacaaaagcatatttatattcttaaaaatttctgcagattgcatagaaagttctcagatttgtggctgggcgcagtggctcatgcctgtaatcccagcactttgggaggccgaggcgggcggatcacaaggtcaggagatcgagaccatcttggctaacacggtgaaaccccgtctctactaaaaatacaaaaaattagccgggcgcggtggcgggcgcctgtagtcccagctactcgggaggctgaggcaggagaatggcgtgaacctgggaggcggagcttgcagtgagccaagattgtgccattgcaatccggcctgggctaaagagcgggactccgtctcaaaaaaaaagaaagttctcagatttgtaaaagtttatttctattgtaattctttgcatgttcactttgttaaatttgcaatataaaccagttgcacgtcttttgctatctggcctcgtaggttgagggttagggtttgctttaagcaaaactgagataactgtaatgtgaactggcctactagattgcccacttttatcagtctgcaagggtggatctatttctaggtcttaatttcaaggtttactttccctcttccttagattttacttggatcaaagggcatggaaatatattccttgcttaagccttatacaaaggaaactagccccagaaattattttgctttgaaagtatgtagatgaaataagtatttttaaatgtcttgattaaataaagtattctatgatctgatcgtcagctcagtatgtaggctaatggtacacctttacttctcttttttatgctcacatttttttcatgtgatcattttcagtttcacagaggactacaatgattgtcatctctaggaatttagtttgtttttagctaatactcctttaatgcttctaagacaagcctttcaaaattgtaataaatgagttacacagatttaactttggttaaattactatttcccttcctcacaggacttcagggcctctgagaggcagggaggatgacttttgttcttatcaatactactattgtttctattaggtcaacttttccctttttactttgcactaaggttacaaccatgtgactaaatgattttactgttcataacaagctccaaaggctcagctataaaaaggaatgctttaacaacatcaaatattgtatgaaattaccctgtatcagactctttgagaagcagcaaaacattttatatgagtattaatttgtttaaaataatccattcaattctaaggctcattttgttcatattttcagttttaaaaatcccttttcctctactattcaaccaattctggttaatatcagggacaataaagtttaaaaaatatttgccttatgggctatatgagcacattcaaggactaaaattttgaggtattttgataatagctaaatagcaagagctaaatataaatattcatagatgaaaagttttgacacatttttctttggacttgcctcaggaactaggatttagaataaccataaattaaaggactcttccaagcatttttatcatatatatataaatagcaagagaaaaatattttcagttttaaaaaaaggataaaagtgacaaaaaaggaaaagcaggaataatgctaatacatttggttttacttaccttgcaagtgttctactgtcctgttagaacaaaccactgactgttacaaaagtaacattagttacatcatactgtattagatggaatatgctaatttctctcttgtaaaacagtctggaggtagatagtccacgccacttatggtgtttcttcaatgaggtcgtacagggaccaggatccttctgttgtttttcttctacaatggtgtgttgcctcctcttcagggtccaagatggctcactaccagatccacattccaagcaacaggatggagaaaggggcaaataaatggtcatgccattttaaggacacaaaaaatcgtttcccctcacattccattgtccagaacacagtcatacctgcacaggagactgggaaatgtagtctttattctaggaggcatacccacttgaaaaatcaaaggttctatcattatgtgaaaagtaaagaatggatattgaaggaaaattggtgctctctgcacatctcttatttagatatttgtacagaaattcaaacttgaaaatcattctactgggaatatgacaggaatgactagctgacataccaactattctgggttttcatttataaaggattagtttacttcctttgttcatccaaaagcaatgaaatgcaaaacattacctgaatgagttccacgctatgttttattggtataaaaccaaaataagatgatgtaatactctggtctaccagttagttagctatttagacctaggtgaaaaaaaaatatttttaaggaaagaagaaaaatcttttacttataataaaatactgattagtcttgtcaatttatctgaccaaaacaaaaatagttctttaatttttatcaaataagtaaaaagtcaataataatattgttacttctgaaaaaattcataaaactgaaaggcagagaaaaatttctccagccatcagtatatttttctcctttattaagggagaaaaaaggtcttcatgattctgctaaaagacatcacctaacaacgcaaggggtagtcagggaatgtcttaaatctatatcctattgatgaatacccttttgctcttcctatgcaggaagactatttaaggtcatgttacacagcagctacatgatctggtgcaacacaactataatcagtttgcttctgcctgatgcaaaagctctcaactcctagtcagtgttatgtccaaagttgtccttcatctaatatattaaatactaccctcatgtgatcttagagcatcaatcaaagctacaaaaaagatatatctaaagttatttttgtttgaaatacacatggcccaagtttccattttctgaaaaaggcagaacccaaaagttacatattatgaaagccactttaattattatttagatgaccccagatgtatgagtgccattattgttgtatagctatgaaacagatcatcatcttttacctcattacatttcctcaatataaagttcccagtgactatccgatcacatccaatttctccatttccaaagaagccgaataagggaacactaggaaaaaactttctaaatgcatcagcctcaacattccccttggctctgtaatactgaaagcccctgccaacgcatgcaaacatgaagccaatggtgttatgctctggaatgttggccgctttgaggcgctgcatcgcagcctcagcagtcttctcatcactgacgtcctcgttgaggagcacagtggcactctggattcggtgtccactaaatgacagtccaaccacacccgaggcatcaatatccagagggttcctggaaaatttagaaaagtggcaatatctcatgaaacattaaaatttttaagtatagaagcaaaatcctcctgattcactgacgggaggctgctgcctttagcagcctatggttaatctgaggctcaccctcataggtgagtaaaatagggtcaaaaatcaaaattaatacataaaaaatgcacaaggcagatcaagagaagccaccatttttttcagtcacaaatacaaaggggcaatgcacatccataacgatttctgaaacccatatccggttattagaaagtacagtttccttacctttctgacttccttaaaaggaatgttataattttattaatatacacaaagatatccactaaacgaagccttctgctattgtttacattaacatctcttccccccgacttcagctgtcaaattctgaaagatgtatattaaaaatataataatggagggtgattttatttttttagagatagggttctctgttagctaggctgaagtgcagtggcacaatcatagctcactgcagcctcaaactcgtgggataaagcaatcctcctgcctgagtctctcaaggagctggggctacagatacatgccaccacacctggctaatctgtaaacattttgtagagatagggtctcactatgttgctcagactggtctcaaactcctgggctcaagcaatcctcctgcctcagcctcccaaagttctgggattacaggcatgagccactgcactcagaggataattttaaaaacctattaactctagaagttttagctttatgtctagtccactagaaaatatgattatgttatttttttgtcttgtttattgctttgagtctagagttcagcttaatttgatggtaaaaactcatgctttgtttttgtttatatttgcctggtttttttaaaaaatgaaatatccttacaaaagaaaatacaacattgataaaagtaataaagcataatatagtgaacatccactaggggataaacaagtattgtatcatgcttccaacatctgaatctataaaatgggcaagagtcactggattagtgagaaactaagacgcaaaaaggttaagtgactaaagtaataaggctagctagtagtaaaacaagtttgtgaggggcaaaatccgtcttctgaagtcctctgctgctcttaaaactttatcacatttcctctttggtacagaattgttaatatacattgtcaatcttgcctcaaagaattatacatcttccttttggggcactgggtcagttgggttatctggactttattaaaatggagccctcatttactcaatggtttctcttaaccactgacagagtatgaagaccacattaaaattaatgggtcatgtgaagagtaatgattggggtggggggtgtttctcttattaggtataaaaagtagatgatatacaaatagctacacttacaagctagcacctcagatgttataagtctgagtgaggtatctgcatttcaaaggtaaactgtatgttgaatcaccattgccctatccgtacacaatttaagttaatagcaaagacacaggaaaaattaggcaagaggggaaataacttagatagccaccaagaattcagtgtatgtatgcacaaaatccagtgtttgatatcctgcctgggattcaacgtacttggccttcctctcttcctcctccctggcagtccagggacctcaactttagctattttcccagatctagctcacagagataaccagaagagagactataactaggatgacttacattattcttatagatactgatctgcaacagtctgtccccatgtcaccactctaggatgcaaatattaaacagagtgggaaacaaatagtagtgtttacaagcattgagggtggggtagggtctgattttcctgctggaaacaaatgatatttatgtccacctaattgtttcaaactcaaaatgatatgtattttcattcaagatggaaaggaagtaatggctcccaagacagaagagcaaatatttttatctttgaaagcaaaagccttagtaacaaaaaagatccacaatttttaagcttgaaaaagcctttcaaaagatctaatacagaatttccaaaaaccagtacgacttgcaagacattctgtggaaaaaagttttgtgaccaaacagatttgggaactgtcacaggtaatgctattctccttccagatttccacagcactgggcatattagaagctctgagaagttttgccataaagatacactctaaccatgtgtttcctttaaaggaggaaactagaaaggaggtgacacattgaggtcacacagagtaccacatctgtcaaaggaaagatcaacaggcaatgtcaaattttaaggagaatgtgactcaaggaagttcttgaaggacaatatatataaaaatgtaattattcaaccgtaagcagaattatgttcagtaagccccttagccaatgtctactacaaaatggaatgaactattatcttaataattctttaaacacgttttttaaattgttaaccccaaagtgacaaaacctgagaccatttcccttcattcacagacgaaatcagaagcacacaagacatacttttcagaagtcagtgatgacaggttgtccacctggcctccagccaagatgatattcatatcactgaaagtgctgactacttgctgcagataattactggctcccaccttacagcaattataaccaaagacaaggaccacacgaagttcagggttatctaaaagacctgcagagaaatgaagagcaacagttaaagacagccttaaaacagaaattattttatacatgctgcaaaatgaaatgttactgaattgcactccaccttaagggcaatttagtggcttaagctatcaaattttccattttttattttttatcttattttatatcctcttcgatctctg

SEQ ID NO: 98070 - DNA, 44136 bp, Homo sapiens
acctttgaaacaaaggatcaaattatatacttggctttccactttctcttacctcagaactaaaggtattttagcacagatgccacccttacagttcctggtacatcaataccagcctggagatcacatccttatcaaaagctggaaggagccagcttgggaaggaccatacctagcactcctaactgaaacagcagcccgaacagccgaaaaggggtggacccatcataccccagtcaaaagagcatcaccatcttcagagtcatgggctattgttccagggccaatttctaccaacctaaagctacgaaaactttaaccctcttatactgccttgtcttctttcctctctctaccgtcagctattttatcattaatgtaactagatcaagctcacctcaatcacatttgatgtctgtcttgtcatatcctgtggggatctccaaaaccagaggcaactggccttctcagaaaaatatctctgcccttccaagataaattctaaatcctcacacaatgcttgcctaatcgaaactaaatccattacattctttgcagtttgggaatgggaagggtttgaggagaggttctgcccatcccggaatgacgtcctatggaataccgatcctcaagggtagacttccccaaaaagctgcatctctctacaaccctaccttcgtttcaaaggggaggccccctctaattgccaatatcaccaatgtaacccagtgcaaatttctattcttacctctacctccaccaatcctaatcccactttaagtagcttctacagcatgggagccgcaacattagggatagaccctacaggatctttcgaaatgcgcttcattgttcccccacccccttcatccccttctaaacaaacacccaatgacaaaaccaaagtgaccattgtagaggttaaagatctaaagcaaactctaccaattgaaacggtaccgagatgcaaatgcatggctggaatggattaaacattctgtccgctcgctaaacaaagcgattgttatgcttacgcacgtggtaagccagagccccagattgttccctttccactcggatcgtcctccagccaatcaggcattaagttgtatggcagctctcttccaagaccccacaacctggggcaataagctatgccaaactctctcgctgctgtttcctgaagtcccctgaagtccgacaccctgcgggtcagcccccgagggccatcaagcatccgtcttccaatgccaattttacctcgtgtctctcacagggggagaacttgaatttgcttggagacctaacgagatgcagtgagcttaagcccttccaggagcttaccaatcagtcgtcccttattcatccccaagcaaacgtatggtggtgttgtggtggaccattactgaatactctgccaagttacttggcgtggcacttgagctctaatccaattggctatctccctttcaccctggtatttcatccagaaaacatacataaaaacagaacatcataaaacaatggatgtccctcgtgactctcatgtttatatagatgccattggaatcccacgaggagtgccagatagatttaaggcccaaaatcaaatagctgcaagtttgaatccatgttgttctggtggtcaactctaaataaaaatgtagattgggccgggagtggtggcacacgcctgtaatcccagcatgttaggaggctgaggcgggtggatcacaagatcaggagtttgagaccagcctgaccaacatggtgacagcccccagctactcaggaggctgaaggagagtaggttgaacccaggaggtggaagttgcagtgaaccattgcaccattgcactccagcctgggcgacagagtgagactccatctcaaaaaaaacacaaaaaatgtaacccagcaacgattcattaattatactagggatgctattaagggaacagtttaacaattagggcccaccagtcaaacggcctgagaaaatacaatagcattagacatgatactagcggagaaaggtgtagtttgtgtcatgattggaacccagtgttgtactttcatccctaataatactgctcccgatggaaccataacaaaggcccaaggacttactgctttatccaatgagctagctagaaattctggaataaatgaccccttcacgattttaatggaaaaatagttccgcaaatggaaaggacttacgtcctcaatctcctgccatcagaataggtttgctcattcttgtaggatgctgtatcataccctgtatctgaggattaatacaaaagcttattttaacagctctcacccaccaaaatcttcctcaatcctccctcgcattattcagttaagcttctaatttcagaggaccaagaggaacaaaatcaagacacgctaaaacaagtctgaagagaaataattataaaaatcaaaagggggaaatcgttagatacaatggatttctcttcaaagttttaacttccttgttctttgttcttaaggtcaacttcctcataccttcctgctccgagttacccgttctataaacaacttctccggccaatctcaacctgtaacctgttccctatttggaaaagtccccctcactcctagcaaccagctctgtaaacaagtttcctgcccttcccacagctgtaacccacatgcctcctgtttaaaatagccaatcaggactagtttagattgcgctgtcgactccagccaatggggataggacacagaagcagggactacttgttaggaataaaaaccctttctctcttttgttaggtgtgctcttgccaggaatgccagcagcagcaccctacggcagaagtaaatttgccttgctgagaaatcttttgttcaagtgctcgttttctttggaactccaagctcttatttccaacaaagacctagtaataccaacaggccaatgtcagtcctaatgacttattctcccagttttatacccaacttggaaatgggtcctgaggttaggcccagttggacaaattttgcggtggggtttggcagatagaaagcagaaacctcacctgttacaaggcagactgaatcaagccaagatcaacacacactggtacacgtggctcccaacctatagaaagttaacaggtcaaaagaagccatctgaatgctggaaaaaatagagaaagcccagttcccatgaacaagcaatagtctctgataaagataagcagaaaacaaagataggagttattactggggccaatgcatcagacaaaactggccaatagtgtagagatcaacagggtcgatctgatggggaaagaagctgtatcatcagctgcaaaggccacatttgagtcgtacaagaagtagggtgacaaacccacactgaaaagcagctactaccccctccagagcctgtgtctactcagccagggaagacgtgttggcaccacttaccaattttatatgtatatatatattctacttccaacacccgcattcatcctggttcaatcaaagcctggttttggccaacaataaacctgaaatgaaaaaacagaaaaatgagctcccatcagctagatgcccaggggagctgggacaaaggagctgctcaagctggcatatcagacagaaactggcttagaaaagttagatcaacatagtcgatctgtcggggaaaaaagctaagtcatcatatatgccagcaggaagttcttgagtgaggagtaagatttgaaagccatgaggagtaagatttggttggtatgcttcatatttgcaaatttgcattcggtgtttgagcacttctgtgttgtatcctgtagctggcaataacttggtagccaaaccaaacacccctgtcttcagtgcttacactctgagtacaggcccatgatagaagccagtgtggctggaagagttgaggaagtagttggcatttactgagttgggaagtgaacaagtaccaagagattgcattttaacacaagttaccacaagttacctgacaaaagaacaatctggaacaataagcttcacatgtgttcccatgaagcccagactttgtaaacgcctcactcctggactctagcaaaaatattagttatgtagtcgggcactggtttgagtggctagttcaacagaaaaacacatttggctttccaaaatatgtcaataaatcatccctccacttggaaatttaagcgccccaacacacaggaagaatggaatccaaaaatatgtttaagtggcattaaaatgttaaacgcctcttcactaacaaggttctttcacttcaggcatttctcttaaacctgtttcttcaccagaaacctagttccaatatttaaactgtgagaataaaacattcagaacatgtttttcttttttttttttttttgagacggagtctggctctgttgccccgactgtagggcagtggcgcaatctcaactcactacaacctccgccgcccgggttcgggcaattctcctgcctcagccttgtgagttgctgggattacaggcgcgtaccaccacgcccagctaatttctgtatttttaatagagtcagggtttcaccatgttggccaggctggtctccaaatcttgacctcaggtgacccatctgccttggcctccccaagtgctggggttacaggcgtcagccacagcgcccggccgtcagaacacttttttaaatacctaataaatgctcgatagaaagtgctttgttaaatcccacgttttcctagaaaactaaagcttctcaaagcacgtgttttctacagtagacccataggagacaaagacttactcgtcaggagatcgaaggttgtagatgtctgcacgtggcttccttggaggtccagtggtgactccctcttccaaaatccattctgtacccgctggctgctctaacctgtgaaccaacaaataaagggcgttaaccgccatcttcccacggtcagaaacgaacaaggccgggccttttgaggccgatgtatcagaactaactggcaaaatataagacgtcagcattgtcgatctgatggggaaaaaagtgaagtcatcatttacaccagccaagggcttctcaggcccgtgcagaaggcagtggcttttccagctccagaaactcatttctcccacgcccttaaggcctatttggggtcagagacggagaagccacgagaaggagattagggctggccgcagagacgacggcacaaagaagggaagggaggaccagaggtctccaacgaagaacatggagtttccactcaccacacacaaaacgggaacttacgggcaggacaatagcgtatgaagcctgactgcaactaggagaagtaccacactccgagcaccgcagacgcgaaagaacgaatggcttcctgaacctcccttatataaccaaagatggctttcgcacctgcgcactggacccgaaacgctctctttcccgcccgctccgcgcgcgtcgctctgggaaatgtagtctcgagcagcacagcccgaggcgctctagtagttgtccaggccgcgtctagccccgcccccttccctctacacgccgggccacccgggcttgtccgcttcctcgccatgtcgcgcttcacacgcaccaaaccgctcgacgggttccccttcctctggggccggctgaggcccgcaaaggccttgggcgcagtcatctcccgccccccgcggtccgctcccctcagccgcgcccgcctgagcccgccggctccgccgccggggggagctgaggtgacgccctcctcgagggcggaggcgccggccgtgcctgggccaggccctcgtgctctccaccctgggcccccgcctcctccttctcctcctctgggccgcccgcccggctccgcccagggtctgcggggaacggaaaccgaaagtgcgcggcgccgggcggggccaccgacctgcctgggccgaagccccagcactcgccggcggcagtgaaaggacgcgccggagccgggtgagtggccccgcaactgcccctgcccctgattcttccttgcctcgccgcgaaccccgrcgcccgcgccgacccgccactgcctctgcccgtaagacctgtcaccctctcaagcccccarcgcacccgtcacccgctcagagcccctggcccctcagcgccccgtcgccccctcaatccccagacccccatcacccactcagagccttgtcacctctttggcccccagcggcatcagcacccactcagagcgcctctcagcgccccgtctccccctcagaccccagacctccatcgccyactcagcgccccgtcacccactcagcccctggcccatctcagcgccccgtcgccccttcggctcccctgtactctctttagtgtccccatcccctcagctggcccgtcgctctccccagcacccccgacaccgtcaccgcttctgccctcagcacttcgatctcctctgcccctacccctgtctgtgccctcccttctgccactcgcacccccctcattcctccggcctcacctcctgtcaccttatcaatccccctcttctacagagcacctcggcacccccttcagcctgctccctgcccccaccccgccgcctccgtcctcagcaagcaccccctggtgctcgctaccaccctctccccaaggcccccataaccccgccacctcacagccttggcgctccctgaccccataacatttccattagggaccgtgggctccctgggtcagggattccccaggaccctggagacttcccccaaacccagctctgcctccgacctcagcctcctgcgtcccactctggtgatgactagcccctctcattctgactccaggccagcttgatcatcactgattttcttcttcgtgccctttaggccttgattccccccaccaaaaaaaaacacttcagtctgttttcgatcccagcatttcctgttcatgtctactcctcccttccttcccttgccttttttttaacatctttttttcttttcttccgtttcttttaaattttctggagtttctattttagcatttttcaacaaggggaagaaggaattttcccctcggagaattgaaaataaacaaacaaactctaaatactgagcctgcgccaggagggctgggtttgataagatgagggaggggactcaccagagatattcccagggggaagaaaagagactcctttttcagatgaggaaaaaagctgcccctcatataatgccaaatgtagtcacagtttccaattatgaatattttagaactcagtgaagacagtctcaaaaatccctttgctgaggactctgagtcacccactctttccttagccccagcccacaccatgtgtatgagttgggttgagaagctcccttaaaggggcttcctcttcctcttacaggaccagtgtcaaaaatcaccaaggtagaagaatgaggaggaagaaagaatatcagatttctagctggtcctgaggaaacagcacctcgtagttgccaaacctcctggttattgaaacrtgtaatttctttctcttgattcagtagagcagagagcttaatcatttggctccattccaaagagtaggctaaggggataactgctcactaattatttataaactgtagggtactgcaagctattgggtactatataagtggcagatatgtaaatgccagataaggtggtgagcacatggttttggattaacaaaaatgtactcctttttgtcctggcaacaatattgtctgcttcttaggaaaggaaaatgaaacctagcaactgattaagtaacttggctaaaggcataaaccaaacagcagttttgaatgggaattgatgacattccctctaccccaagaaagtgccagggtaaaagaaaggggaattctatctcttgaaatcagctaaattgtgaatttaatattttatatcataattgggcatttgcagagtcgagcacttgtgctctagattaaaatctgtatttaacccttagttaacaaatcattaaaatgttaacaaaggcagaaggactggcttgatggtgtttgggtttttgctgctagatgctatgtttcgaggacactgataactcaacatgtgcagttttccagataacagaaagtaacgtgaaggaattcaggtgactcagacatggaggagagaagacctcatctggatgccaggcccaggaattcccataccaaccacagaggtaagcaaggtttcctacctaatgagaaggaaattctagtaataaragaaggaaatagggctctctataaatgagcaggcctacctaagattgtctgcatctctcaagtaaagaatgactatggctggatgcagtggctcaagcctataatcctagcattttgggagcctgaggcgggaggattgtttacgcccaggggattgagaccagcctgggcaacatggcaataggctttctctacaaaaaaatatataaattagccgggcttggtgctgcgtgcctgtagtcccagctacttaggctacttgggaggctgaagtgggaggatcccttgaacctcaggaaggggtgggtgtagaaggcagaggttgctctggactgtgatctggcctctgcactccagcctgggtgacagaaagaccttgtctcaaaaaaaaaaagaatgagttatttcttaattacttcatgaattactctgaaaaacagccaaccctccacttttcctaagagagctgatgaatgggtgcagttcactttaacaaaaacagtgatagagtttcagaaagggaaatgacgtttggtgtagagcagcatccaatagaaacaatgtaagccaagagcataagtttttattttttattttatttttttttttgagacagagtctcrctctttcrcccaggctggagtgcagtggcgcgatctctgctcactgcaagctccgcctcccgggttcacgccattctcctgcctcagcctcccaagtagctgggattacaggtgcccaccaccacgcccggctaattttttgtattttcagtagagacggggtttcaccgtgttagccaggatggtcttgatctcctgacctcgtgatccgcctgcctcggcctcccaaagtgctgggattacaggcgtgagccaccacgcccggcctagtttttattttmtagaaacatcattttaaaacgtaagaagaaasagatgaaatttatttatgtatttatttatttattttgagacggagtctcgctctgttgcccaggctggagtgcagtggtgcgatctcggttcactgcaacctccacctcccaggttcaagcgattctcctgcctcagcctcccaagtagctgggattacaggtgcctgccaccatgcccagctaattttcgtgtttttagtagagacagggtttcactatgttggaccagaatggtctcaaactcctaacctcaggtgatccacccaccttggcctcccaaagtgctagcattacaggcgtgagccactgtgcctggccttgaaatttattttttcaatttgatgacaatttaataaaatttaggaatttaataatgtcttatttaacccagtataaccaaaatgttatttgattataataattgactatagtttattatcatactttaataattcacatatatttatttccctcaaatactcattttaagatattatcaacataaaaatttttaatgtaatgcttaacagtctttggtactagctttcaaaatctcgtgtgttttacacgtcttaattcaaagtagttacatttcacaaacatagcagccacatgtggctaatggctttgtattggatagtgcagatcgtgaatcctagtcaccaaagctaaatyagttccaagaccatcactctactaaaggaattattctgcttgctcagcactttctaaaactaaacaaccaaatggattcctgcttttccataagtttgaaatgtgtcttccaaagagttttagctgtggaacaaatgaggaagaactatgggctcttgtgagctatgtgaatggtttgttttttgttttgagacagggtcttgctctgttgcccaggctggagtgccatggcatgatcttggcttactgcagccccgacctcccgggctcaagcaatcatcccacctcagcctcccaagtagctgggaccacargcgtgcaccatcacgtgtggctcatttttgtatttttagtagagacagggtttctccatgttgcccaggctggtctgaaactcctgagctcaagcgatctgcctgccttagcctcccaaagtgctgggattacaggcatgagccaccacacctggccatgaatgttgaaagaataagaaatgatacgattttccattcttccaagacatagagtcttctaatcagataaaaatattaaaagtagtactttcttctgattttggaggtagtttgaaaagtaaatatgtaagtaacaaytataaaaatttagagttcagttgtagatcatttatattttaccaaatattcctttatgttgtcacattaaagtctcggctgggcacggtggctgacacctgtaatcccagcactttgggaggccgaggcaggcggatcacgaggtcaggagattgagaccatcgaggctaacatggtgaaaccccatctctactaaaaacacaaaaaagtagccaggtgtgtcagcaggtacctgtagtcccagctactcaggaggctgagtcaggagaattgcttgaacccgggaggcggaggttgcagtgagccaagatcatgccactggactccagcctgggcgacagagccagactccctctcaaaaaataaaaaataaaaaataaaattctctacaaaatgcaaaacaaggaagagtgtgcataaatcratttagtatctgatgtmaggaaatggtataatcatctcaaatataacatgcatttgaagcttttacaacttttttatcaaatcattgtatacagtcgtattttatttgtttttaaaatcttcatgtcattctgctaagttaggtcagccccagaatcagttttagcaaaaaggaaagtgaaaaaaactggactttgggtatgttaggcttcctgtataagggttggtaattggtaagtactatgagggtgaagttcatgctacagaaaggaggaaaacttgagtttcatttttcagtttctttcatagtctgttagctcaaaaacatcttggtaaggaaaccccacctttctctttcccattcaaactgcatttgctgatgctggacagcattcaggtagtacttccctttgtaatattatttcacttgatgtctctgttggctgtgataattgtttagtggtagaaccagtggcccccttagaatcaataggatattcccaattaytgctactagtaataactaacatttattgagagtttttaatgtgtccagtactatactaagcactttataaacatttaatctttataaaatccccaccaggcacggtggcttacgcctgtaatcccagcacttccagcactttgggaggctgaggcgggtggatcacaatgtcaggagttcaagaccagcctggccaagatggtgaaaccccatctctactaaaaatataaaaattagccaggcgcggtggcaggtgtgtgtaatcccagctgctcgggagccgaggcaggagaatcacttgaacctaggaggcagaggttgcagtgagctgagatcgcaccactgcactccagcctgggagacagagcaagaytccrtctcaaaaaaaaaaaaaaagcagaaactgagacttagagaaattatacaacttggccaaggttatatagtaaggcagtggccaggccaatgtttgaaccaagtcagtttggcctttaaactcatgtyctgactgttatttggtactggcatgagattagaagcaatgagacatactgtatgtatttattctctaacacacatcaggtactcaataactgtttattccttttcccttttgcgtcctttgtaaaaataatattttcctaacctctacagcaacagtaattatctttcatttatcatatgacttggtagaaaccgtttttcttaccgtataaaacctgagctctttagttattttggaaaatgaaagcacgttcattgtcgttctgttgggtttccaacagaacttggttcttgtggttactcaatatttcattgtgtttaggccctgtggatggagagttaccaccaagagctagaaatcaggccaataacccaccagccaatgctctccgaggaggagccagccaccctggaaggcatcctagggccaacaaccatcctgctgcttactggcagagggaagagagatttagggccatgggcaggaacccacatcaaggaaggaggaaccaggaggggcatgccagcgacgaagctagagaccaaagacatgaccaggagaatgacaccaggtggagaaatggcaaccaggactgtaggaaccgcagaccaccatggtccaatgacaacttccagcagtggcggactccccaccagaagcctacagaacagccacagcaggcgaagaaactgggctacaagttcttagaaagtcttctgcagaaagacccttctgaggtggtcatcacacttgccacaagtttagggctgaaagagctcctttctcattcttccatgaaatctaacttccttgagctcatctgtcaggttcttcggaaggcttgtagctccaaaatggatcgccagagtgttctccatgtactgggcatattgaaaaactccaaatttctcaaagtctgcctgcctgcttatgtggtagggatgatcactgaacccatccctgacatccgaaaccagtatccagagcacataagcaacatcatctmcctcctccaggaccttgtaagtgtcttccctgccagctctgtgcaggaaacttccatgctggtttccctcctgccaacctctcttaatgctctgagagcctctggtgttgacatagaagaggaaacggagaagaacctggaaaaggtacagactatcattgaacatctgcaggaaaagaggcgagagggcactttgagagtggatacctacactctagtgcagcctgaggcagaagaccatgttgagagctaccgaaccatgcccatttaccctacctacaatgaagtgcacttggatgagaggcccttccttcgccccaatatcatttctggaaaatacgacagcactgctatctatctggatacccacttccggctcctgcgagaagatttcgtcagacctttacgggaaggtattttggaacttctccaaagctttgaagaccagggcctgaggaagagaaagtttgatgacatccgaatctactttgacaccaggattatcacccccatgtgttcatcatcaggcatagtctacaaggtgcagtttgacacaaaaccactgaagtttgttcgctggcagaattccaaacgattgctctatgggtctttggtatgcatgtccaaggacaacttcgagacatttctttttgccaccgtatctaacagggagcaggaagatctctgccgaggaattgtccagctctgcttcaatgagcaaagccarcagctgctagcagaggtccagccctctgactctttcctcatggtagagacaactgcatactttgaggcctacaggcacgtcctggaaggactccaggaggtccaggaggaagatgttcccttccagaggaatatcgtggagtgtaactctcatgtgaaggagccaaggtacttgctaatggggggcagataygactttacccccttaatagagaatccttcagccactggggaatttctaagaaatgtcgagggtttgagacatcccagaattaatgtcttagatcctggccagtggccctcaaaagaagccctgaagctggatgactcccagatggaagccttgcagtttgctctcacaagggaactggctattattcaaggacctcctggaacaggtaagacaaaattttttagagtacataagatctgctttgtaagataagcaagggacggagccttcactctaggtttctagaatgtcttcttatttacttattttattttccaacttttattttaggtttaggggtacatgtgcaggtttgttacatgtgtaaattgcatgttgcagaggtttggtgtacagattattttgtcatccaggtaatgagcatagtacctgataggtagttttttgttgtcgtcrttgtttttggagacagagtcttactctgtcacccaggctggagtgcagtggcacgattccggctcactgcgacctctgcctcctgggttcaagcaattctcctgcctcagcctcccaagtagctgggattataggcatgcaccaccacgcccagctaattttgtatttttagtagagacagggtttcaccatgttagacaggctgatctcgaactcccgacctcaggtgatccacctgccttggcctcccaaagtgctgggattacaggtgtgagccgctgcactcagcccttgataggtagtttttagatcctcaccctcctcccactctatcctgaagtaggccctggtgtctgttcccttctttgtgtccatgtgtattcaatgtttagctcccacttatgagtgagaacatgtggtatttaattttctgttcctgcattaatttgctttggakaatggcctccaactccatccactttgctgcaaaggacatgattttcttctttttcatagctgcatagtattccgtggtgtatatatgccacattttctttattcagtccaccattgttgggcatctaggttgagtccatatctttgctattgtgaatagtgctacaatgaacatgcatatgcatgtgtctttatgggagaatgatttatattccttcccattatatacccaataatgggactgctaggtcaaatggcatttctgttttaagctgtttgagaaatctccaaactactttccacagtggctgaactaatgtacattcccaccagcagtgtataaactttccctttgctctgcaacctcactagcatctgttattttttgacttttttttgactgtttattaatagccattctgactagtgtgagatggaatctcattgtggttttgatttgcatttctctaatgattagtgatgttgatgttgagcatttttttcctctgcttgttggccatgtgtatgtcttcttttgagaagtgtctgttcatgtcctttgctcattttttaatggggttgtttaattgcagatattagaccttagatggatccagagtttgcaaatattttgtctcattttgtaggttgtctgtttattctgttgatagtttcttttgctgtacagaagctctttagtttaattaggtaccacttgtcaatttttggttttgttgcaatagaatgtttagttaataacattcctcccgaaatgggcataaaatttgtttataaagtagctgctcatagggattttccaataggaacccattgtcatgcatagtaatagatacaagattgctagaggtcaaatgtagtgagatgtgtgatttctgctttatataattggttcaattttatattattttaaattaaatagtatcaaatatataatagcactatgtgtgaagcaacattttacttactttacataccttaactaattgcatcctcacaaccttgtgaaatagaagccattactaaaaccattatacagttggtcaggcacggtggctcacacctgtaatcccagcactttgggaggctgaggcgggtggatcacaaggtcaggagatcaagaccatcctggctaacacgacgaaaccctgtctctactaaaaaatatwaaaaaattagccgggcatggtggcaggcgcctgtagtcccagctactcgggaggctgaggcaggagaatggcgtgaacccaggaggcggagcttgcagtgagctgagatcgctccactgcactctagcctgggcaacagagcaagactccacctcaaaaaaaaaaaacaaaactgttatacrgatgaagaaagctaaggcaaagaagggttaaataacctcttaagaggtgggaagtatgtactgaagctcacacaaatgttaagtgacaagtttaggaattgaattcaggcagtctagctgtagaatcctggctcctatctgccacattgtacttgtcgtggaactataccttcccatacctttctccccakgtgccactctctaattctactctgggktcataactattattagaagtgggaatttacattaacagttaaaatagctactgctaaattactctccgaaaggaagtaccaaaagaaaacaaaaccccaaacaggaagaagtctttaaaaaacaccaatgaagtaatggcaactcatgatttaaaaaaaaaaaaaaaaaaactttatgtaacaaagctggacgtcttgacgagtacctgtagtaccaagtacttgggaggctgagatgggaggatcccttgaaaacaggtgttcaggctgcagtacacatagcccctgcactccagtctggacaacatagggccttaaaaaagaaggaagaaattgttacttatcctgctgtagtgaaatctttgattatcttatatcactccctccctcaactttgagatttttgaggacagtgtctaccttaccagcctgacacaatgtaagaatttagcaggccaggcatggtggctcacgcctgtaatcccagcactttgggaggccaaggcggacagatcacaagggtcaagagatcaagaccatcctgcccaacatggtgaaaccccatctatactaaaaatacaaaaattagctgggcatggtggcatgcgcctgtggtcccagctacttgggaggctgaggcaggagaatcacttgaacccrggaggcagaggttgcggtgagccaagatcacaccattgcattccagcctgggcaacaagagcgaaaytccatctcaaacaaaaagagagaatttagcagtttttagcctaattaattaattaatggccatttactaatgagcctataactcttattccaatgttgatttctacaagttttcccctcccatcacaaaagcaaatctaccatgtatataaaaagtatttctaatttgccacaagattggaaacaatatatacagcatcaatagaaaactggctaaaaaataccttaacagctgtaaaaaggaaaggggggggtgggggggatgggattctcctatgtattgatagagaatgaccttcaagatacattaagtgaaaaaaaatcaagatgtagaatggtaaaaatwgtctgttactattcatattttaaggagaaaaggggaagtctagaaaaagaatacacatttgtattgtttgtatatgcrtggatatactgtctctgtaaagttacaaaagaaactggtaacattggttgcttccacccagagaactgggtgacagagtgcaagagggacttttcacaatatacaatgtacgcttcttagattttaaactatcttaatgtattwtattaaatttaaaaaaagattttgctctgagtaattactttatttagaaaatgtctaaattgttaaattcctttttccttattttctaggcaaaacctatgtgggtctaaaaattgttcaggccctcctaaccaacgagtctgtttggcaaattagcctccagaagttccccatcttggttgtgtgttatactaatcatgctttggaccagtttctggaaggtaatacttataggcaaatttgttctctatcaagatgttgatgattgaaccatcagcaacttcagtagctttctattgctcttcaaacaaagtcaacagtccttatcattacttacatggccgtttgtgatctgtcccagctggactgtgaaccacagctcctacttcttaaccttgttctccctaactccagcaacactggttatcttcagttccttgaaagcctctacgtcctccattggcccatgccatcctctggcctggaatagttttttccctctccatcttgagcttattcaacctggccctactcaacctggccctactcattcttctggtcccactttaaatctctcttctcaggtggactttttctatagccccaaagtgaagtctcttttgcattttttatttttttataatctattttatgtatcgctaccctagatgaggattggtccttttcttgctgtattcacatatcctggcacatattaggcactcaaaaaatactaaataacattaatggatgaataaatatatgcttttcctttatttttattcttctatacctccctttcacctagataaatctttattcttagagtctgagtttaaatattagattcttaaaaatagatccctaccccacccagactaggtaatgtcccctgctaccagtactcactacatttattgctgccrtattaattatttaatgagtaacttcctgccagagacaaagaaatgataacaaatcagaaactgggcctatgtttctmctgctatatcttcagaacttggcacatgcctaaaacatatgagcaatcagtaaatctgcagagtgaaaaatatgtaacatatcctgggtgcttgctttgtgctgggccctagctaggagctttaaagattttctttcatttatccagactgtagccctatatgggagatattgccatctctaaatcacagacagagaaactgagactcaagtcacttgccccaggttacacagcaataagtggtagagctaagagttggatccctagttgtctgattccagaacctgtactcyttaagtgctacactttactgctctgcaggtcacatcttctcggggaccttctcactcattaatggggtaaatttcctttaagcacaagtttattctctaagggaccagactagatcccaaatacacacagctctcacctgagagaacctagcataagctcctctcaaccctgccatgctccactttgttccacaggcatctacaattgtcagaagaccagcattgtgcgggtgggtggaaggagcaacagtgaaatcctgaagcagttcaccctaagggagctgagraacaagcgggaattccgccgcaacctccccatgcacctccgaagggcctacatgagtgtaagtcccagctctgaaatatctggggtagttcaagagggacctaaacaagatagcagtggctttctgggtaggcagcccagggtagatttggaggctcctcaaagctctggaggacccaggttcctttcagcattctattctgccaatcccttggtatgacctttgccttcacaatccaagatggagaaaagacaaggaaacactgcccatccccaccctaccttaacgctccttcccccataccacccacagcacctctgtgtacagccaactgaccagggaaatgtcatcttttagctgggcagcaatgtgcccagtcaaaaatctgagttcttattactaaggaaaagagagagaacagatattgtgagccttgaagtctctcccacagtattcttggcctgtttgtttttctgttgtgtaggttgagcatctcaaattggaaaatccaaatccaaaactttctgagtgccaacattatttctttttttgagacagggtcttgctcagtcacccaggctggagtgcagtggcacaatctcggctcactgcaacctccacctcctaggttcaagcgattctcttgcctcagcctcctgagtagctgggattacaggcgcccgccatcacacctggctaatttttgtatttttagtagagacaagatttcaccatgttggccaggctggtctcgatctcttgacctcatggtccacccaccttggcctcccaaagtgctgggattacaggcgtgagccaccgcgcccggcccaacattatttcacattttggatttccagatttgcaatgctcaaccagtaagtataaacgcaaatattccaaaatctgaaacacttctagtcccaagcattttggataagggatattcaacctgccaccacgcctggctaatttttgcatttttagtagagacagtgttttgccatgttggccaggctggtcttgaactacagacctcaagtgatccacctgccttggcctcctaaaatgctggtattacaggcatgagccaccacactcaaccgatactagttctttggtttcaagaccacaataatgtgccttgggaaattggtttgttgaccagtctatttatttattctccctccttactgttcctgtcttagctttgctttccctcaaggtgaggactgagtttgggggatgatgatatttcctcatcatttctttccctctgttcttggaagatcatgacacagatgaaggagtcagagcaagagcttcatgaaggagccaagaccctggagtgcaccatgcgtggtgtcctacgggaacagtacctgcagaagtacatctcaccccagcactgggaaagtctcatgaatggaccagtgcaggtaggggtcatcctgggggacacaaatatgtctctggcctcagtactttgaggtagcctccaggagaagcatcagtccaaaactttacctgtttgataatctgatgctgccacaatgtgtaaagttcccttttgtgatgagaggcagctgaatatgctggtcaggaacaaaactcgaaccagcctgttgggttttagtctgagcttggctctggacaagttacttaattttctgtggctgtttccccttttataaaatggggataataataagcattaagttgaaccatatgaaattgccaacatctgtaatattgatttgcaaaaaaggcaatttcttacagatctttgttcttacaggattgttatttagatgagcaaggtgatatttgtaaacttattaatttagtaactgtactataagtgtttgttaaatgaaatgaagaaaatcataaccagaggcaaactagcacagatagagaacttgggrgttgatagatatagtcatgcagactgactgtgtgacttgggttcatgtgatcctcagcaatcaaacatggataataataatgcctaccttcaaaagatatggtaagaaataactgagacagtctctgtaaagtggcaggctaggaacccagtgaaatggtagctttgttaccattaggttgctgatttacaggattacaaaccaaaagcttacagaggtcattcaggtcttacaaataagtgaagcaatctagatttgaaatattaagaagcrgagaggactgtggcaaactagaacagatgtggtagcaacccagctccagccatttgttgccattcagtaataaacagtcattgctgccatagctcctgattttgtcaaaataggctggaaaatttttttaattcttttttttttttcttcttttttttttttttgagacagagttctcactctctcaccccaggctgcagtgcaatggcgcgatcttggcttactacaacctccgcctcccgggttcaagcgattctcttaccttggcctcttgagtagctaggattacaggcacctgccatcatgcctggctaatttttgtagagacagggtttcaccacattcgccaggctggtcttgaactcctgacctcaggtgacccgcccacctcggctctccaaagtgctgggattataggcatgagccaccgtgcccagccctttgatttttaaaattctatacaagtcatgttaaatgttccagttgcccaaggagatgccagttcacagcctctgaactttttttttttttaacaatatgatgtttcttttttaattttttttttaacttttaagttcaggggtacgtgtgcaggtttgttacgtaggtaaacttgtgtcatgaggccaagcgcgcagtggctcacgcctgtaatcccagcactttgggaggccgaggcaggcggatcacgaggtcaggagattgagacgatcctggctaacacgctgaaaccctgtctctactaaaaaaataaaaaaattagccgggcatggtggcgggcgcctgtagtcccagctactcaggaggctgaggcaggagaatggtgtgaacctgggaggcagagcttgcagtgagccgagatcgtgccactgcactccagcctgggcgacagagcaagactctgtctcaaaaaaaaaaaaaaacttgtgtcatggcggtttgttgtacatcacctagatattaagcctagtactcatcagttatttttcctgctcctctccctcctcccatcctccacccttcaataggccccagtgtgttgatcccctctatgtgaccatgtgttctcatcatttaacttataagtgagaacatgcagtatttggttttctgttcttgtgttagtttgctaaagataatgccctcaaactccattcaggtcctcgcaaaggacatgatctcattcttttttatggctgcatagtattccatggtatatatgtaccacgttttctttatccagtccttcattgatgcgcatttaggttgattagatgtctttgctgttgtgaatagtacagcctataaactttaagggaattacttttgattcttttttcttttgagatagggtcttgagcccaggctggagggcagtggcataatcatagctcactgcagcctcggcctcctgggctcaagcagtcctcccacctcagcctcctgggtaactgggattatatgtgcatgccatcacacccagcttttttgagacagaatcttgcttttgtcacccaggccggagtgtagtggcacaatctccactcactgcaacctctgcctcccgggttcaagcagttcttctgcctcaacctcctgagtagctgggactacaggcatgcaccactatgcctggctaatttttgtagttttaataaagacagggtttcaccatgttggccaggctggtctcaaactcgtgacctcaggtgatccgcctgcctcagcctcccaaagtgttgggattacaggcgcaagccaccacgcccagtcttttttttttctctctttttaaagacatagggtctcaccgtattgcccaggctggtcttgaatttctgggctcaggcagtcttcctgccttggccttccaaattgctgggattacaggcatgagctaccatgccccaatctgcttttgattctttgaggagacccagccttcacattggttgtcatagaatcctcacaaatgatcattcttctttccttaggatagtgaatggatttgcttccagcactggaagcattccatgatgctggagtggctaggtcttggtgtcggttctttcacgcaaagtgtttctccagcaggacctgagaatacaggtaagaagtgcatgtcttcctagaatcaaatcttaacgtagaatatagtaaataccagaacagtgagacttaaaaataattcccagaataaataaagagctatgagtcaatcagagaaagacaaatagcttaatataaggaaaagagataaaatactttttttttttttttttgagatggagtttcactcttgttgcccaggctggagtgcagtggcgtgatctcggctcactgcaacctccaccttccaggttcaagcgattctcctctcctgccttagcctcccaagtagctggcattacaggcaagtgccaccacgcgcagctaatgagataaaagacttttaacaggcacatcacaaaataggaaattgttcaatagatatatgaaaagtgctcattaaaaactagaggaattaaaaccacaatgagataactattacttacacaccagtttggcaacaattaaagtttgatataaccccatgttgatgagaatttgaagcaatggaaactctgatgcactgctgctggggatatttaaatttacataaccactttatcatagcagaaaatcagaaagaactcaaatgttcatcaacatttcttcaatggatggatcaattaagtcaactcagataatgaaatactgtacaacagtgaaaaggaatgaaacacagcatatacagtaacacatatgaatctcaaaaacatgctgaatgaaaaaggcaagttagccgggcatagtggcccatgcatgtaatcccagcactttgcaagtgcaaggcaggaggatcgtttcagcccagaagttggagaccagcctgggcaacataatgagaccctgtctttactaaaaaaaaaaaggaaaaagtttagctgggtgtggtggtgcatgcctgtagtcccagctacttaggtggctgaggcgagaggatggcttgagctcaggaggttgaggctgcagtgagccatgactgcaatgctgcactacagcctgagtgacagacatagtctcaaaaaaaaaaaaggcaagttatggaaacatatatactagacaatgtgttacttagatacagtataaatgtggtaacattattatcttttaaaaaggaaatgagtaatataaaattcgggttaggaaggctaacaaaggtcttcaaaaaatttgtcagttttctacttaaattgggtggaaggtacttgggtattcattttatatatttttattatcctttatattacatatttacattgtatgccctccattgtatatgtatttggtataagtaaaacctttatttatttattgtgtatttattttatttatttatttatttttttttttttttgagactgagtctcacagtctcactctgtccaccaggctgcagtgcaatggtgtgatctcggctcactgcaacctctgcctcctaggttcgagcaattctcctgcctcagcttcccaagtagctgggattacaggcacactcaccacacccagcttattttgtatttttagtaaagatggggtttccccatgttggccaggctggtctygagctcctgacctcaggtgatctgcccacctyggcctcccagagtgctgggattacaggcatgagccaccacgcccagccttatttatttatttttgagatggagtctcactctgttgcccaggctggagtgcaatggcacgatctcggctcactgcaacttccacctcctgggttcaagtgattctcctgcctcagcctcccaggtagctagaaatacaggcatgcgccaccacacttggctaatttttgtatttttagtaaagacagagtttcaccgtgttggccaggctggtctcgaactcctgacgtcaggtgatccacccacctcagcctcccagagtgctgggatacaggcataagccccacgcacagccaaaacctttctttaaaaggcatatattcgtatgattttttaacgtaaaacgtaacaaaaagtatataaggagaccttaagcctttcctaactctcctctcattccttttagtttctcttctcaaaaataatcacatagggctgggtgcagtggctcacacctgtaatcccagcactttgggaggccgaggcaggcctgaggtcgggagttcgagaccagcctgaccaacatggagaaaccctgtctctactaaaaatacaaaattagctgggcgtggtggtgcatgcctgtaatgccaactactcgggaggctgaggcaggagaatcgcttgaacccgggaggtggaggttgtggtgagccaagattgtgccattgcactccagcctgggcaacgagtgaaactccgtctcaaaaaaaaaaaaaaaatcacataaacccttgataatgtcttcatgcatctgagctcttgcaggtgccgtcttctgtcccttagcttcaagagtttccatctctggccaggcacggtggctcacgcctgtaatcccagcactttgggaagccaaggcgggcagatcacgaggtcaggagttcgagaccagcctgaccaacatggtgaaaccccatctctactaaaaatacaaaattagcctacaaaattagccaggcgtggtggtgggtgcatgtaatcccagctactcaggaggctgaggccggagaatcacttgaacccaggaggcagaggttgcaatgagccaagatcgcaccacygcactccaccctgggcaaaagagcgagattccatatcaaaaaaaaaaaaaaaaagagttttcatctctctcctgcctgtttctctctcttagcccaggcagaaggggatgaggaggaagaaggggaggaggagagttcgctgatagagatcgcagaggaagctgacctgattcaagcagaccgggtgattgaggaggaagaggtggtgaggccccagcggcggaagaaggragagagtggagcagaccaggagttggctaaaatgsttctggccatgaggctagaccaytgtggcactgggacagcagctggacaggagcaagccacaggagagtggcaggtaaactcacttccttgggttgaaacaggcctgagagtgttctgaccgcttgttttcccccacttctgatacagtatattcacttcaccattacaattagctaagtacctgtattacagcctacccctggtatgagatggctttagtgattcccaaggatataaatacgatggttcttcagagggcctctggcaagaaatgccaacttagaaagacaggaagcaggtagccaagtgcttctgtagaacttgtggaagaatgtagcacatatgagtcaggtcaaacacggtctcagtacttaatgccttcaggagtgttgttttctctatttcaaatgagtttgtgaacatgtactaagattttagaggattaaagtaagcaatgaagcgagacctccaggctggatggaatattcctccttcattcagcctggaatttgacacttctcttaaagccagaattgtatgaatgcccaggtgtcttcatgtagccttccctctgctccttttggtggagcctagtagtcctcactgtttaccatgcataactatgatgatcgaggattagatattcaaaataagaatttgtaaaccttaccaatgatttgagaactttcaagggcaactttggatgcagttttcatctgagtgctggctttgcacctgatctagttcagttcagtatcactatatgtggtgagcggagtcatgatctcaattcttagaagcacagattcagcatctctcccaggaggcatcaggaaaggttgatttgtttcattttgaagcagcgggaagatctttatttagtgacatctgtctgacttgcgagccttctaaaggctcatagcctcagactcagtgacggccagaagagagcactttctcataaacagtgctttccaccacttgttaaaggtactgtgttgatacgatggcagtaggaccgttttagcaggcactgtgccaagtcctgtgtgaagcaccagttgctaggcactggttgtacagcattcaacaagaaagtaccacccccatgactttcatggcatgcrttttaggaacaagaaacaggctatggtcaaagatgtttaatgataactagtgctagtactagtataaatgctttccacgtatttactcctgacaagccaacaatcctataaagagataccattattattcccattttatagaaggtgatactgagggacacagaggttaggtcatttaccttactaggtcccacaacctagtaagaggtagagtagggctttgaagccaggcaaactggctccagagtccttgtttagccactctacagtggaagagctgttgggagaatgtaagacacttgacattaatcagtgatgccagccctttttcttacgtgctgygacccctgccttgggcttaaaaccaagcctgcctctgctcagacagtaccctgcctggtattgatgtctgcagacccagcgcaaccagaaaaagaaaatgaaaaaaagagtgaaggatgagcttcgcaaactgaacrccatgactgcagccgaggccaacgagatcgaggatgtttggcasctggacctcagttctcgctggcagctttataggtactgtgttccacatcyagccaacccatgtagggagttcctcttctgttcctagaacattctccacctccaagaccttcaacgatgttaactaattattgattgagcaccaccactgagctgagtgatagggatacagccatgggatagaatagacactttgctctactttcatggagcttatagagtctatccagggtaacaaattaattattaccttcgtggagcctatggagtctatccagggtaacaaattaatcacgtaattccacaaataaaaagttacaaatgggtataaaaactcagaaagaaaagaacagagaggtaacaggcacaatgactcacacctgtaatctcaccactttgggaggctgaggctagaggatctcttgaggcccagggttcaagaccagcctgggcaacatagtgagacctcatctctacaggaaaaaaaaaaaagagtaggagaggccgggcgcagtagctcacgcctttaatgctagcacttcgggaggccgagacaggcggatcacaaggtcaggagattgagaccatcctggctaacacagtgaaaccccgtctctactaaaaacacaaaaaattagctgggcgtggtggcyggtgcctataatcccagctactcgggaggctgaggcaggagaatcgcttgaacccggaggtggaggttgtagtgagccaagatcacgccattgcactccagcctrggtgacagagcaagactccgtcttttaaaaaaaaaaaaaaaaaaagtagtagaaagccgttggaaagttttacagcgattagtgacatcatcagttttactaataaaataaatactctatggagaattagaggaggggagggaaattaggcagggatgctgcagctgggagaattcttcccaaagwttttaaagtctcttattttcttcccatagttaacctttgttctttatctcacccctttccttagctcctgactactctgcacatctttttgttgggcattttggattcttaggtccctgaatgtatctctctgtttgtcactatgctccaaggttcacttcatacactgggcacactgaagggcgttcttccaccttctcaaagagcatgtggctttctttccttggttcttcscattctccaggctctggctacagttgtaccaggctgacacccgccggaagatcctcagctatgaacgccagtaccgcacatcagcagaaagaatggccgagctgagactccaggaagacctgcacattcttaaagatgcccagrttgtaggaatgacaaccacaggtaagaaactgtggagaaatttgcctgttgcatctaagttcacttctggtgccagattatctaaggacaggtaaagaggagcttctttggtaggttagaggaaaataccatgaaaagctactgaaagcacccatattttgagaactcttggtgaaattcactcactttcgccaggcgcagtggctcacgcctataatcccaacactttgggaggccaaggcaggtggatcacctgaggtcataagtttgcaatcagcctggccaacatggtgaaatctcrtctctactaaaaatacaaaaattagctgggtgtagtggtgggtgcctgtaatcctggctactcgggaggctggggcacaagaatcacttgaacctgggaggtggaggttgcagtcagctgagatcgcaccactgcactccagcctgggtgacagagtgagactgtctcaaagaaaaaaaaaaaagaaaaaagaaattcactcactttctcctgctgggtttgaaactccaacagtgaccaacacrgttttaatgttctggagaccacccagaacactataaggaccagctgtcgctgatgcaggttcagggaagatacagaagtggattcccagaggcccagtggccctgtgggtcctgtgcctcagctcagaggagcctttctcttctttcctcacttgaggtgctgccaaataccgccagatcctacagaaggtggagccgaggattgtcatagtggaagaagctgcggaagtccttgaggcccataccattgccacattgagcaaagcttgccagcacctcattttgattggggaccaccagcaggtaaaacgagagtccccctagaagatgggctggctctccgtgggggtgagatcataaaggaagaccctggcctctgcttcaacagtcctcaagcttattagtagcttcttgtgattcctcttgtcttcacctcccacgttcagtctaagagcagatgctattagatttggggtatattttagtggcaacgtcatttatttcatccattccctctgctatttacctagtccaccatggcctcttgagtggactgtattgtaatagcatgctcctcagtctctctgcttccatttttgctaccttttaatgcactctacataaaggagccaaagtgaattttttttaaaaaaaggtagatagataatatcactttccagctgaaaaccctccagtggtgtcccattgcacttgcataaaaatcaagcttcttaaagtggcccacaaaggcttatgtgatcaggtttcagcttatttctctgacttcatcccatttgctcttggtgtcccactgtgtcctttccgctccccattatggatcttgcttttcaaatgactgaagaactggcaacttctgccatgctagtgtctactcagatgtcactgttcagaggcctagctagaaaaaacccaccatggggcactctgtcatatcacctttagttctactaatccttaacycttgtcattattaatccttaaactgtgagtatgtagaatagtgcctggcacatagtcaacacttgaaaaacatttgatggttggttggatggatggaagtatggatggttaaatgactttatcagtagagaatcctcagccatgtttctcttctcagctgcgccccagtgccaacgtgtatgatctggccaagaacttcaaccttgaggtgtccctttttgaacggctagtgaaagtaaacattccctttgtccgtctgaattaccaggtgagaagctgggcctctgttgttaccaaatgcccaggagaaagctcctgggaagctgccagttgycagcaaaagaggtctcatataaataaaaataatttaatactgaaatgamtctgtcaaccttacattttctgttttaaaacaccacaagatcaccgtgttgagtttttgttggacaaaggagctgtttatgttatgctttctccttatttttttcaaatgataatctctatctctctagattttctttcctttttttttttaagaaaaatagaggccaggtgcggtggmtcacacctgcaatcccagcactttgggaggccaaggtgggcagatcacctgaggtcaggagttcgagaccagcctggccaacatggtgaaagcctgtctcwactaaaaatgcaaaaattagccgggcatggtggtgggcacctgtaatcccagctactcaggaggctgaggcaggagaattgcttgaacctgggaggcggtggttgcagtgagccgagatcatgccactgtactccagcctggcaatagagctagattctgtctcagaaaaaaaaaaaagraaagaaaaatagaggccaggtgtggtggctcacaccttaatcctagcactttgggaggccaaggcgggcggatcccttgagttcaggagctcgtgaccagcctcgccaacatggcgaaacactgtctctgctaaaaatacaaaaaattagccaggcgtggtgcctcatgcctgtagtcccagctacttttggaaggctgaggcaggagaatcactagaacctgggaggcagaggttgcaatgagctgagattgcgccactgcaccccagccttggtgacacgtctcaaaaaaaaaaaaaaagaaagaaaaatagagatgagggctcactatgttgccaggctggtcttgaaatcctgacctgaagtgatcctcctgccttggcttcccaaagtgatgggattacagatacaagccatcacaactggccctccctaaattttctaacagcaaccttatctttaaagaaattgtccgtgtgtgctctgcccatgtttctaatgacatgcatgtgttttttcagcaccgtatgtgccctgaaattgcccgccttttgaccccccacatttaccaggatctggagaatcatccatctgttcttaagtatgagaagattaaggtgagtctgtcttacccgatctttcttggatggtgtcagcaacctaaaaaggctataatttcctcaagataaaaaagcttttcagcggccaggcgcggtggctcacacctgtaatcccagcactttgggaagctgaggtgggcagatcacttgaggtcagagttcgagaccagcctaactaacatggtgaaaccctgtctctactaaaatacaaaaactagctgagcatggtggcaagcacctgtaatcccagctactcagaaggctgaggtgggagaattgcttgaacccaggaggtggaggttgcagtgagctgagatcgtgccatgctactgcactccaggctgggcagcggagagagactccctgtcaaaaaaaaaaagaaagccttcagaagggagtagagccagctttttaaaagctggttactgggagaaaattgaaatacagaccagggttttttamtcccaaytctgcctgttagccatgtaaccttaagcaagttatataagaattctggccaggcgcggtggcttacgcctgtaatcccagagctttgtgaggccgaggcgggcgaatcacaaggtcaagggatcaagaccatcctggccaacatggtgaaatcccatctctactaaaaatacaaaaattagctgggtgcggtggcatgtgcctggctgggtgtggtggctcatgcctataatctcagcactttcggaggccaagatgggtggatcacctgaggtcaggagttkgagactagcctggccaacatgrtgaaaccccgtctctactaaaaatacaaaaattaactgggcatggtggtgggcgcctgtaatcccagctacttgggaggctgaggcgagaggatcgcttgaacctgggaagtggaggttgtggtgagccaacaagaccgtgccactgtacttcagcctacgcaacaagagtgaactctgtctcaaaaaaaaaaaattgtcagctgaggccaagagttcaaaaccaggctggggcacatagcaagactgtctcttttttwaaaataaataaataaattctgagtatcaggttcttctggacaataagaataatggctcctgccatatcccattactgtatggaaggaggtaatgtatataaagcagtcagcacagtggagtgctcagtaagttagctgctctgtcatyatcatcatcctcctcacagcactgcttgttctttcagctataatggttggattgtggatggctgttttattttctattttttttgagatggagtctcactctgtctgtcacccaggctggagtgcagtggcatgatctcggctcactgcaatctctgcatcctgggttcaaactattctcccatctcagcctcctgaatagctgggattataggcgcccactaccacgcccagctaatttttgtatttttagtagagacggggtttcaccatgtgggccaggctggtctcaaactcctgacctcaggtgatccacccacctcggcctctcaaagtgctgggattacagacgtgagccwctgtacccagccagcttttttaaatattaacatcaaacaagtatcttgaaaactgaaagagacataatcttttattttcataacttgctgtggccccaaaatgaagcacayaatgactaactaaagaactaaagatagtgatgttgagtggacaaaaagctttccaaggtctctctctggagcagagtaagtggccagtgcatgtcaagagaggaagaaaaaaacaagtgccatgagtgaaccttttaacatgtcacttcttttccctgtcagggggtgtcttccaaccttttctttgtagaacacaactttcctgaacaggaaatccaagagggcaaaagccatcagaaccagcatgaggctcactttgtggtagagctgtgcaagtacttcctgtgccaggaatacctgccttcccagatcaccatcctcactacctataccgggcagctcttctgyctgcgcaaactgatgcctgccaagacatttgctggcgtcagggtccatgttgtggacaaataccaaggggaagagaatgacatcatcctyctctcgctagtgcggagcaaccaagaaggcaaggtgggttttctgcagatatccaaccgcatctgtgtggccttgtcccgagccaagaagggaatgtactgcatcggaaacatgcagatgctggccaaggtgcccctgtggagcaagatcattcatacacttcgagagaacaatcaaataggccccatrctccggctctgctgccagaaccaccctgaaacccacaccttagtatccaaagcttctgacttccaaaaagtacccgaaggaggctgcagcctgccctgcgagttccgcctgrgctgtgggcatgtctgcacccgtgcctgccacccttatgactcttcacacaaggagttccaatgcatgaagccatgccagaaggtcatctgtcaggaagggcaccggtgtccccttgtttgcttccaggagtgtcagccttgtcaggtgaaggtgcccaaaaycattcctcggtgcggccatgaacaaatggtcccttgttccgtgcctgagtcagatttctgctgccaggagccttgctccaagtctctgagatgtgggcacagatgcagccacccatgtggtgaggactgtgtgcagytgtgttcagaaatggtcaccataaaactcaagtgtgggcacagtcaaccggtaaaatgtggtcatgtggaaggcctcctgtatggtggtctgctagtcaagtgtaccacaaagtgtggcactatcttggactgcgggcatccttgcccaggctcctgccacagctgcttcgaagggcgtttccatgaacgctgtcagcagccctgcaagcgcctgcttatctgctcacacaagtgccaggaaccatgcattggtgagtgcccaccctgccagcggacctgtcagaaccgctgtgtccacagccagtgcaagaagaaatgtggggagctgtgtagtccctgygtggaaccctgtgtctggcgctgccagcactaccagtgcaccaaactctgctctgagccctgcaaccgacccccatgctatgtgccttgtactaagctgctagtttgtggccacccctgcattggtctctgtggggagccatgccccaagaaatgccggatctgccacatggatgaggtcacccaaatattctttggctttgaggatgagcctgatgccygctttgtgcagctggaagactgcagccacatctttgaggtgcaagccctagaccgctacatgaatgaacagaaggatgatgaagtcgccatcagattgaaagtctgccctatctgccaggtgcccatccgcaaaaacctgaggtatggaactagcataaaacagcggctagaagagattgaaatcatcaaggaaaagatccagggctcagcaggggaaatagcaaccagccaggaacggcttaaggccctgctggagaggaagagcctcctccaccagctgcttcctgaagacttcctgatgttaaaggagaagctggcccagaaaaatctgtcagtgaaggacctgggtctggttgagaattacatcagcttctatgaccacctggccagcctgtgggattccctgaaaaagatgcatgtcttagaagagaaaagagtgaggactcgactagaacaggtccatgagtggctggccaagaagcgcttgagcttcactagccaggaactaagtgacctccgaagtgaaatccagaggctcacatacctggtgaaccttctgacccgctacaagatagcagagaagaaggtgaaagatagcatagcagtagaggtctatagtgtccagaatatccttgagaaaacatgtaagttcacccaagaggatgaacaacttgtgcaggaaaagatggaagctctgaaagccacccttccctgctctggcctgggcatctcagaggaagagcgagtgcagattgtcagtgccataggttatcctcgtggtcactggttcaagtgccgcaatggccatatctatgtgattggcgattgtgggggagccatggagaggggcacgtgtcctgactgtaaggaagtgattggtggcacaaatcatactctggaaagaagcaaccagcttgcttctgaaatggatggagcccagcatgctgcctggtctgacacggccaacaacctgatgaactttgaggagatccaggggatgatgtaggaagatggtacaccactgccttttgccctygccactgaatgactggggccagctccctaatgaaggaactgaagtttgttttttattatcatcctttttaggctgggcgcagtggcttacgcctgtaatcccagcactttgggaggccgaggcaggcggatcacgaggtcaggagttcgagaccagcctgaccaacatggcgaaaccccgtctctactaaaaatacaaaaattagctgggcgttatggcgggcgcctgtaatcccagctacttgggaggctgaggcagaagaatcgcttaaacccaggaggcggaggttgcagtgagctgagatcatgccattgcactccagtctgggcgacaggagcaagactctgtctcaaaaaaaaaaatcattctttttagtcttagcacctacttaaggatccacttttagggctcacccacatttgtttctagatttacccctgcgctagagtaagcactttatctccagaactgagagcaaagttaacaaatstcaccccttctctcctgcaaattagtggacagactccctggaacatgtttggggcttccacctagggccacctagtggtatctctgggtctttacttggtcagatgtttattctacattgttccccaggaacagagtatgagctcattgatgcagaccgattctaattgccaggccctaatttgcagactaactctcataataaacagaggcccatagttgtttatgaactgcttatcccttaaaggagcacaagaacccctccctgccctccttgggcaccctgcctccaggagatggaggcacgtgataagacaaaagactgcaccaactcaccctgacacagttacatagtcactgagagtggggaagatgggacagcccacatgctgcataagatgggccttatgcagcaggcccaggtcgtcattaaggagtgacccctttcctgtaacctgcactttgggatggtagaagtttctttacctgctgacaggtttggtggcactgctggttacccctgggccctgaatggagctaaaatcacatttggtaccagcagcacctatcccaagtgtgatccttcatcccaacactccctcttggagctgttccctgggtagagctagcatgccagcagcttytgcaggctccaaacccaggccagaagccagacccaggcctgctgcctgcatctgcattccctccttccagtgttccttagaacagacatttaggtatctcaggtcctttytaagtgtccctttcctatgtatgcatttcctttttttgtctttactatgcmctttagcttataaagccaattaaaaacratgattgagaaaatcagtggtccacgtgtatcctcaattttcagaagcaactcagccaaagacagtgaagacgggcacagggaaggcactgtctacagtgaggctgtgattttgtttttgtgatacaggatttttatttagctggtgaatgaatcatttttacccacggtaaaaagaacattttttcagcctgtacaaaagggtatacctgaagtttctttctccagaggcaaaccctgttaacttcctgagtcctcccagagagaacttatgcacatgcaatacacatcccttaggccaggcatggtggctcacatctgtaatcccagcactttgggaggccacactgggcagatggcctgagcccaggagttcaagaccagcctgggcaacagggcgaaaccatctccacaaaaaaaaaaatacaaaaataagccaggtgttgttgcttgcacttgtagtcctagctactccaaaggctgaggtaggaggatcacctgagcctggggaggtcgaggttgcagtgagcagtgaagccactgcactccagcctgggcaagagtgagaccctgcttcaaaaaaaggaaaaggaaaagaaaaagtacacagttctgcacttggcttttttagcctaataacctactttctgtaaaatccagtaagacagtagtctgaactgtactccatcacacagttgtgccatcattttctgaattggaccctctgttggtgacttaggtgcagcctgaatgaatagctttgaacacactctttagtatctagggtatgtgctactggataacttataatttttaagctgggggtagggtggtaagtactccctgaaattataacaaactatacagttttcccaggtggggccccacagctttcatctcattctgagtcagaaaaggatgagaaccgacgttcttacaggatcaaaactggtttttggccaggtacagtggttcaagcctgtaatcccagcactttgggaggctgaggtggtggatcacctgaggtcaggagttcaagaccagcctggccaacatggtgaaaccctgtctctcctaaaaatacaaaaattagccaggcatggtagcgggcacctgtaatcaccggtatttgggaggctgaggcaggagattcgcttgaacccgggaggtggaggttgcaatgagccaagatcgtgtcattgcactccagcctggaggacaagagactctggtttttgcagcaagtaactaatttatggtgtcaaggctccttctgtccttttcgggcttccatttctccagcagcatttccacagcacagcagcaagaggtaaggtgagggttcaagtagatgttggttgaaaacctgaattcccagctgtgcaactctggaaagttagtctttccaagcctctgtttattggaaaatgaggatatcactgcctgcctcacaggagtgcagtgagttgactggattctattcagcacacagaatatctggtgcatggttggcattcatgctaaagttctcccctgttgatgttttagaactaagagttatcatttagctatcttcttcagctatcatttagctcttagttctagagtatcaacagaagagaacttttctgttgttgttgtttttttttaagagacagggtcttgttatgttccccaggctagaagagaacttctaccaagaatttcctcactccataccctgttcctctacaagcataaagattatgcattccaactgtatgtggtgataccaagctagtagactgtgggcacatttgccattgaggaagagatagtaataagatatacacttggattggtttctcttttcccaaaaatacttccatttaatatagtcatatgaaagctaatcagcaagaagggagattgacagacatgcttaggaaaatagctacgtaccataccaccacaccaaagtgttgttttttgtttttgttttttttttaaacaaatggagaaaagacagaccagccaggatgacttcccacagggaagggatttaagggctgcccccatgaatttcttcaggccacgacagctacttcctcctcttgtatctgtaagaaaatcagagttaagaccagaatgaggatggagaagcttcttttccatgaaaggtttttatctctaatcccaaaacctatgcccctccaaaacagccagtatcacctggatttagatttaaagtttcctcctcgtctctggtggggcaagcccaactgtttcctttcttcaaaggaagggctgtgagagaagatgacatgctgaaatgagcaaactgttgaacaaatgggtgttgtctcacccccaccctccccagctcctacatgaagcagtagcatctctgggatgcatcattttcaggccctaagttctaagcctttatgtgtttccacctgataacgtgtttctggaagtcagggcccaattttaaaacaaggttggaagaggcccttcttaggtatataccactacttgggaagcttagtctgcccctgccccaaccttgggctggggaaaatggtgtgggacaacatattcctaagagcaagccaggattctctggggttctgcaggatggaacttgagatgaaagagttatcactcccctgaaggaaagctccatttctgaacccaacaatgtactatttcacctccaaggcaggaacagtgctaactgaacacccctctcctgttctcaccttgggatcctcaggtggctctgagaggggtggggggtggagaacagacaggtacccttgaatttacatagtataaagctataggtgtgcaaaaactggaaatggggaaggaggcagaagactcatagcttccattagaataccaagggctcgccgggcacggtggctcaagcctgtaatcccagcactttgggaggctgaggcgggtggatcaggaggtcaagagatcgagaccatcctggcaaacatggtgaaaccccatctctactaaaaatacaaaaattagttgggcatggtggcgtgcgcctatagtcccagcttcttgggagactgaggcaggagaattgcttgaacccaggaggtggagcttgcagtgagctaagatgcaccactgcactccaccctgggcgacagagcgagactccgtctcaaaaaaaaagaataccaagggctccatgatgacttaaaatcctacccagctcgatactgtttcagggccttcttgcttgtgttggtgagttcttcatcaaatacagatttcttcccctgcttttgcttcttggctgtgcacagagagaatgggttacatatggttgtctttggcccaagctcctaaatccccttaagttcaaggtaatgattccaagttcagtggatactctggcatccaaagactatcttcattctgtcctcaccagctcctccaagtagcagctggtgaggccttaggctccggagtcagaaaagctggcgttcaaatcctagttctcaccaaccacaaggtcactgcgccccttagaccgtggagggatagctgtacacattggtacatactaattactcaaataatgtgggctactgtcatcatccctcagattttctccctgacccaaagcacaggtttcagggaaaaccttgtacaagctcctttgggctccccattcacctaccaggacctctcactggctcctcctcgggcattgctcgggcccgcttggctctgcgattcctcttcgctagccgttcagcaaacatctgcgccttgaggatttcaaactgagacctttcctctgcctagggggagtggggaggtgtgagtgtggaacacaccaggccactctgacccaccccaccgagtgggcccaaactccaaaagggaggccactcactgtcatctcccccttttttttggcatccttcataaacttcttccttttcttctttcctcttaaggccaagtcaaattcctgcagagctttggcaactgggatgagaagaaagcataagatttcagggatgattttatctttttttaagcttacgataagaagtgcacgttttcaattggtaagttagcagattaaaatgaaaagcggcaagcacttcttggccgagtgcagtagctcgtgcctgtagtctcagcactttgggaggctgaggtgggtggatcacctgaggtcaggagtttgggatcagcatggccaacatggtgaaaccccgactactaaaaatacaaaaattagctgggcatggtggtgcacctgtaatcccagctactcgggaggctgaggtgagagaattgcttgaacttaggaaggggaggctgcagtgagctgagatcacgccactgcactccagcctgggcgacagagcgagaccctgcctcaaaaaaaaaaaagaaaagaaaagccgcaagcacttcttccactgattacctccatctcactaaataacatgcttttttgactatttctcaatccacttaagatactcattacaaacctcctgctatgaaggatgaagatttaggtcactttactactttacccaccaatacagttataactctatttttatcagaaatttaagttatatacacccttattttgtcccatcaaatatagacagcatttctaaaactgctggtataccctctaggagggaaattttgcaacctctaacaaaactagaaatacaaatatcctctgacccactattccacttttaggaattaatcctgcaagccaaatatacacttgcttaattgtaaaagggcatatgtgcaaggttattccctacatcacttgtttgtaatgacaaatgattattttttgggttttttgttgttggtggtggtggtttgagtcggggtctcattctgccgcccaggctgcagttcagtggcagaatcttagctcactgcaaccttgacctccccaggctcaggtgatcctcctacctcagcctctcaagtagttggactataggcatgcaccaccatgtctggctaattttttgatttttagtagagatggggttttgccatgctgcccaggctggatgacaaatgattgtaaacaacctcaatgtccctcaacaatctactcatatgatggaagaacatgaagccattaaaaaaaacaaaaagggggccgagtgcagtggctcacacctgtaatcccagcactttgggaggccaaggcaggcggatcacgaggtcaggagatcgagaccatcctggctaacacggtgaaatcccatctctactaaaaatacaaaaaattacccaggtgcggtggcaggcacctgtagtcccagctactcaggaggctgaggcaggagaatggggtgaacccaggaggcagagcttgcagtgagccgagattgcgccactgcactccagcctcagtgacagagcaagactccgtctgaaaacaaaaaacaaaaagggcagcatatgtgggcctatataaaacatatctctaagcttcaaaattaagtgaaaaggcgaggcatagaacaatgtgaacttataagtgttttgggtcttttttaaagggagatggagaggaaatctgtattaaatatctcctaacttttttaaaattatttttattgtggttatatatacacatataaaacaaaggctgccattttacccaatcttaagtatacaattcagtggcattacttacattcacaacattgtacaaccatcaccactatctgtttccaaaactcctatcaggaggctactcactgacatcattgaaaacagaagctctgcaaccactaataatttcctataaccccccttcccctagccctaagtaatctataatctatttctgtctctgtgaatttgcctagctagatatctcaggtaagtgaaatcagacagtatttgtccctttgtgtctggattatttcattcagcttaagattttcaaggttcatccttatggcatgtatcagaacttcatggctgaataa

SEQ ID NO: 98071 - DNA, 22533 bp, Homo sapiens
tttttttttttgtatggagatgagggggggtctcactatgttgctagggctggccttgaactcctggccttgaacaatcttcctagctaggcttcccaaagtgctaagattacaggcatgagcaccacacccagcctaattgttttttaatctttctgactacaaattgagaagctctcagtttggttttgttggggtttttttatttttttattttttttgagacggagtctcgctctgttgcccaggctggagtgctggagtacagtggcacgatctcggctcactgcaagctccgcctcctgggttcactccattctcctgcctcagcctcccgagtagctgggactacaggcgcctgccactacgcccggctaattttttgtattttttagtagagacagggtttcactgtgttagccaggatggtctcgatctcctgaccttgtgatccgcccgcctttgcctcccagagtgctgggattataggtgtgagccaccgcgcctggccagctctcagtttggttttaaaaaaaggacttcttgggcaggttgcagtggctcacacacacacctgtaatctcagcactttgggaggctgaggcaggtggatcacctgaggttgagagttcgagaccaggctgaccaacatggagaaaccctgtctctactaaaaatgcaaaattagccaggcgtggtggcacatgcctgtaatcccagctacttgggaggctgaggcaggagaattgcttgaacctgggaggtggaggttgtggtgagccgagattgctcatggcactcgagcctgggcaccaagagtgaaactctctctcaaaaaaaaaaaaaaaaagtacttctctaacacttctcatctccatttttagaaaagagtcagaaagtggatctcaggtcagggcctccttcaggcaacaacatctaggcaagatttaatgacgtttcattttcactacttacttatttactttatttatttatttagtctcgccctgtcgcccaggctggcatgcagtggcacaatctccgctcactgcaacctctgcctcctgggttcaagcaattctcctgcctcaatctcccgagtagctgggattacaggcgcctaccaccacatccggctaatttttgtatttttagtagtgtcggggtttcaccgtgttggccaggctggtcttgaactcctgacctcaggtgatctgcccacctcagcctcccaaagtgcggggattacaggtgtgagccaccgtgcctcaccttttatttttatggctagcttctctcggtggcaagtgagactttccacgtacggtagtgctatgaagttgtcttttaaaattacttaaaggatgggcacagtggctcatacctgtaatcccagtactttgggaggctgaggcaggagaacagcttaaggccaggagttcgagaccagcctgggcaacatggcaagaccctgtctctaaaaaaaagaaaaagaaaaagaaaaagaattagttgggcacttgtggtcccagctactcaggaggctgaggcagagaatcatgtgagcccacgagttcaaggctgcagtgagctatgatcacgccactgcactccagcctaggcgacagagcaagactccgtctcgataaacttatttaagaaaaaaaataggttcggctgggcgtagtggctcacacctgtaatcccaacactttgggaggctgaggcggcagatcacttgaggtcaggagttcaagaccagcctggccaacagtgaaaccccatctctactgaaaatgcaaaagttagccaggcatggtggtgggcacctgtaatcctagctactcaggaggctgaggcgggaggattgcttgaacctaggaggtggaggttgcagtgagctgagattgcaccactgcactccagcctgggcaacagagcaagactctgtctcaaaaaagaaaaaaaaaaagataaagaaaaaaaaataggttcatttaaagaaaaatgttaagaagaaaaggacacaagtggcatttttagataggacaagaatcagggaggtattggaatgactgaggtttggaaaacactgaacaagatgatcacgaagctccccgcctcccaggtctgagaacctgaatatggattaacctataatgccaagccaacaggtttaaaaggagagttaaccagtgttagatgttaaaggcaccctaacaccaaatccagatctttctctcacatttgttctgtggaactgacaatactctagccactcctggtcagttaggtttgcttactctgtcctcttgaagattcacagtgtatatcactattagggattaaatactttaacaataaagaaacttattgtattctcatttaactctgcattctcaaaacatattgcctgcaaaacctttatttagaaacagctattaacattccagggaactagttttctgcaggacacactttaggacaccagttttcttcaggacacactggtctatataataagcctttatgttcatctagtttacattttgtatccattatctcattgaccttgtaacatgcagccagatgggtgataatgacagtagttccattacccaagcatttaccctgtgcctcctgttgtaccaagcactctttacatctgtgatttcatttaatcatcacaacagcactgcaaggaaggtccttatctctgacagctgaggaagcaggctcaaagagggggaaaagggctcaaagacttgccgtaagtcacacagctggaaaacagcccagctgggatttaaactcaggttgatctgattccaaagcctgtgctcttcacccccacaagttgagtggggaattagggtccccattgtacacaggaggtgccttgcttctccagacacaggccggggcatacttggccatcctgctctatcttgtcatcccttcccatccaggtacccacagtcacccccattcctctcagcctctgaactattccttggtgtccccttccagtgtatgaacccagagttctgagacctttgccacttcagacttcatcattggccacacgtggtggtgcacagctgtagtcctagctacttgggaggctgaggtgggaggatagcttgagcccagttggaggttgtagtgagttatgactgcaccactgcactccagcctgagtgacagaacgagaccctgtctcaaaatttttttttttttttttttttttttttgagacggagtctcgctctgttgcccaggccggactgcagtggctcgatctcggctcactgcaaactctgcctcctgggttcacgccattctcctgcctcagcctcccaagtaactgggactacaggcgcctgccaccatgcccggctatttttttgtatttttagtagagacggggtttcaccgtgttatccaggatggtctcgtgacctcgtgatccgcccgcctcggcttcccaaagtgctgggattacaggcgtgagccaccacgcccggcctcaaaaatttttttaaaagactcaataatcggagtcggtccctgctgaaattggagtagtcaccccatgggtgtggcccttgcttactaacagcaacagaaaagggtggagaggcccagatgtgggactgggctccaggccccctcctgctgagtcagaggtggagaagggtggtgaagaggaggggagtgagagatggagagctgccactgacaggagtggccagctcagctggctttcaggcctggcctgaaaagggactggagcaggagtcgctgtgggcattaaaggagcagacctcattctccaagtcagtctctcaacagcaaggaaaacagcaagggactccaaggtcctccccaacattgctcttcatcctaacctccaccaaccctctaagtctagcccttagggacaaggtcgggtgcttgagaactgattgacctgtgcgttataaggacacagcaggccctagatgacaaacattttcaacccaaagttaaataatgatgacatagctaccatttcattgaccacgtcataatgccaggcacactgctaagggctttttgtccattgtctcatttaactcctgctgtaatcttctgcattttccccattgctataatgaggaaacggaagatgaccaaggttaaacaactcacccagagtcaaacaactggaaataagtgggagtcaagattggtctggatcgaaagcctatttccttaactaccagcccatgcaacttggatctcaagtttgacccagataacatctgtctctctgtatctcacatcttgctacaatttgcaaaaaccttgtgggctgggtggggaagtgcacacaccagttctcttagtctcaaaaccaggttaagaggaaggtccttaatccccacttcagtcagtctcaaggaaactaagtcttgtgtgaggatttgctcaagttacatcccctttctgacctcagtttccccatttgtaaacaaggtaaccatttataactacatagacccctcaggaagttggggtcttccctacttgctcctagccatacttctggactcacagcccaggggttctagaccctcactcaccacgtacttggagggcgggtccttgacaacgttagcgctggtcacttcgaagagcagccgctggggtgccaaggtgttccgggacttcttccagaaatcctgcagctgccgcgccaggagctgactgccccactgcccatcaggtggggggctccgttctgcagacacatgaccagtcatatcaatgggcctagggccagggtcgacatcaaccactgacgtggcctcactcatcctcccagtgtgaggcaggacttaccccctttttacagaaatggaaactgagggacagagaggcaccgaggagccaaacaccgtgcctggcagacagtaggggctaaattaatagctccaccctcaaaatatcgttaatacatcatttccattcggatcccaagccctgtacatttaatgcctgcagcaattctgagatgagagtgagttctcccacttgacacaagggaaaacttggctcagaggggggttaagactctctcaaggtcacacagccaagaggtggcccaggcgctttaagaagtgtgggagtttcagctggatcaacttagcgccctggatgctctgggaacgcggctgggatggaggcctaatcgagccccagggttcccgcctccgtcctcctgcactcgcctgcgtcttctcctgacgtcccatccccgaggggcagctggtcagggccagcctcctcgtcgtcctcgtcctcgtcgtcctcgtcgtcctcggcgctggtgaagctgagggtgccgctgagtcgggaggacaggccctcggcgtcgtcgtcctccagctctgagctctccggaaactgctcggcctctggactggccgccgcctccccggggccgtcgccggccaaggcgtgccgcagccggtgcaggagccgggaggccatggcaccctggggggagcgcgcgacgctgtgtaccggatcccggaggaggggtaccccagcccggcgcaggaggaggaggggcggggcccgaaccggagagggaggggcgcggtgaggccccaccccctggcagtccgaggtcttgcgaaccaggggacccagccagcatcgctttccccccaacccactcagcctaggaccgcgttcctccccggaggggctcaggaccctcccgatgtctcttgcgccgcctcgtgcgcctctacctcctgcgtcccacggtgcattcaggggcgcgccgcgccccaggggtccgggtgcagccccccgcagcccatggaggtcggccgggttctgcagggctccgccgggctcaggccgctcagagcgccgctcgggcagcttcctgccgccgccccgcctcctgccccgcccgctcgcccgagccgcccgagaatcccgggcccttggctccaggagggacttgggaagcctgggtcggcctgagggagtcccaggcctgccgcagagtcatcccagtccggccaggcgcgtaccctccttgaatcctcccaccccacccacgtcatctccaatctgtcccactcatttccacccaacgctctttaacttcacaaagtaattatgcaatagtagggaggccatgtctcccgagagaaaacgaagggccaggagaagatgcgtgatttgggttggttggaatctgacctcgctgagcctaggttttctcatatgtaaaacaggaacaatactgctaaaactaattttgcagctcttgtaagaacgctcgtcccgtgcctggcatagagcaaaggctgacgaaatgatcacttacataatgattattgtttctacagtgttcacaggcttgcacaatctgatttgaacctcacacatgggaagtaggcaaacagggaaactgaggaccagagagggtgagttacttggcttaaccacacagcttgccagaggtttctttctttctttctctctctctctttctttctttctctctytctctttctttctttctttctcttttgagatggagtctcactctgtcacctaggctggagtgcagtggcaccatctctgcttactgcaacctccgcctccctgggctcaggtcatccctcccacctcagcctccccagtagctaggaatagaggcgttcgccaccacacccagctaatttttgtattttttgtagagatgggatttggccatgttgcccaggctggtctcgaattcctgggctcaagtgatccacctgcctctgcctccctcagaggtttctgagtatggggcctggagcccaggtcccctgctgcatactgcccttttcctgtgcagcaggcctgataatctcagtggctccccagctttgttttatcttttatccgcagggcagctgcaggtcaagaaaaagttattgtggcttcctgtcacaaagcctaggtatcagttgttagggcagattttgatagttatacaatacaataaataaaatcaaaatctctccaaagtagctcctaccctttctgagtggcacaggagagaagggtgggggaaaatgccttgggataagcagaaggtatttcagctccctgccctcccatgtgagcagaaaggctggggttcttattttctgagggtccactttctacatcctgctctaggcactttactgtcacatctctccctcacagcgtcctggggaagaggctgtaactggacattaatggtccattttcaagatgaagaaactgaggcaaagtgacttccccaagatccacatctgggaaatagaggggctgggattttaagcctaagtttgtgcaattttatttatttatttatttatttttagagagggagacagagtcttgctctgtcgcccaggctggagtacagtgatgcaatcttggctcactgtaacctctgcctcccaggttcaagcaattctcctgcctcagcctcctgagtggctgggactacaggcatgtgccaccatgcggctaatttttgtatttttagtagaggtggggtttcaccatattggccaggctgatctggaacacctggcctcaagtgatccacctgcctctacctcccaaagtgctgggattacaggcgtgagccactgtgcctggccagtttgcacaatttcaaacctcgaattactcttcatttggcttatgggcaagatattgggacaaaaaaggcatacttcattcattaattcaacactcactcattcaccaaccattggttaaaaaataacttgtccttcggtatatgccttacatgtctgggcacaaagctggtcttcatgaaaccatgggttgttagagcaggagggcccctcagaaatctggcctatcacctccattttacagataggtagtctgaggcttagtgaggggaagggcttatgctgggtcatawaaacagtcagaactaggagatctgaaggttgcgcattctccactattattatttcttcttctttttgcttccttcttcctcctcctgcttcttcttccttttttatttatttttatttattttattttttttgagacagagtcttactccatcacccaggctggagtccaatggcacactcttggctcactacaacctccatctcctgggttcaagcgattttcctgcctcaagtaatcccaagtagctggaattacaagtaatcccaagtagctggaattacaggcatgtgccaccacacccggctaatttttgtatttttagtagagatggggtttcaccatgttggccaggctggtctcgaactgctgacctcaaatgatccacctgcctcagcctcccaaagtgctgggattagagacatgagccaccgtgcccggcctcttctttcagagacagagtctcactctgttgtgaggctggagtgcaggggtgcgatcatagctcactgcagcctcaaactcctgggctcaagtgattctcccacctcagcctcccaagtatctgggactacagatatgtgcccaccatgcctggctagtattttattttttgtaaaggtggggttgcatgttgcccaggctgatcttgaactcttggcctgaagagatcctcctacctctgyctcccaatgtgctgggattacaagtatgagctaccacccaccattctttgttttattttaattttttaattggagacagcgtctcgccatgttgcccaggctggtattgaactcctgggctcaagagatccacctgcctcagcttcccaatgtgctaggattaaaagtgtgagccactgcccccattcttaaattctgtatggatatctccctacagcctccctgagaaatggtcatctagctcctgtttgggtatactcagtgatacrgagctcattacctcctgaggccacctgttcccattattgttcaactatgactattaggaagttcccccttatattgaactaaataccatccagttcagttattcttatgtagaatataatatctgttgaacacctgctacatagcaagtgctgagcactgggaaatgtgatgatctgtagaacatagaatgggttgtgagcataaggtatgctcagtgctatgattgaggaaactactrgagaccaccttggactccctggtctggacacagtgggggaaggatccccgaggaagtgatgttagagcttagaaagatgatagggaagtagacagatgaagagaggaaagatgggagtttctggcagaaaaaaacagcatgtgcaaaggcttgaaggttcatagaaggtggtgtttagagtagtctttttttttttttttttttttttgagatgcagtctccttttgtcgcccaggctggagagcagtggcatgatcttggctcagtgcaaccttcgcctgccaggttcaagtgattcttctgcctcagcttcccaagtagctgggactacaggcgcccaccaccacacccagcagcaattttttgtatttttagtagagacagggtttcaccatgctggccaggatggtctcgaactcctgacctcgtgatctgccagcctgcacctcccaaaatgctgggattacaggcatgagccaccgtgcccagcctagagcagtattttaaagtctgatcagagcagacagcaacatgatgtggagggaaggagtgagattagaagggccaatgggaccttgcttggctacattaagcaatttgggccttacctattcccttgaataaacaaaagaacaaaggctgggctcagtggctcatgcctgtaatcctagcactttaggaggctgaggcaggcggatcacttgaggtcaggagtttgagaccagcctggccaacatgatgaaactttttttttttttgagacggggtcttgctctgttgcccaggctggagtgcagtggtgtgatctcggctcactgcaagctctgcctcccaggttcacaccattctcctgcctcagcctcagcctcccaagtagctgggactacaggcgcccaccaccatgcccggctaatttttttgtatttttagtagagatggggtttcactgtgttagccaggatggtctcgatctcctgacctcgtgatccgcccatctcagcctcccaaagtggtgggattacaggcctgagccaccgtgcccggtcgatgaaaccttgtctctacaaaaagtaaaaaatttgccgggtgtggtagctcacacctgtaatcccagtgctttgggaggctgaggtgggcggatcacctgaggttgggagtttgagaccagcttgaccaacatggagaaaccctgtctctactaaaaatacaaaattagccgggcatggtggctcatgcctgtaattccggctactcgggaggctgaggcaggagaattgcttgaacccaagaggcggaggttgtggtgagccgagattgcaccattgtactccagcctgggcaacaagagcaaaactctgtctcaaaaaaaaaaaaaaaaaaaaaccaaaaacaaaaattagctgggcgtagtggtatgtgcctgtaatcctagctactcagaaggctgaggcatgagaatcacttgaacctaggaggcggagggtgcagtgagccgagattgtgccactgcattccagcctgggtgacagagtgagagtctgtctcaaaaacaaaaccccaaaaaaccaaaaaacaataaaaactaaattggaatcccatgggtctccctcaccctttggcaccctgcctgcctgggggaggccttatttagcttggcccagccctgctgagctttccttgggaatgtctatatataggggaagggggcagcccagttgccactgtccatctgcattccttggtgtccagcccccctttcctggccccagagcctgctatcggttgtcttggtgctctttctgtccacgtagccactgtctacaagccttgcctrctccccagtgcccagcctgcaccttgtggattctcaggytgggctccctctggacttggtctgcccacccctttactccccagatgaccagatttcttcactgagctctaggaaggggccagctgtccttttaccacttaaagaaccttcccctgcctactccttacttcaaaaaaagtgaatccaaacaccctttccctggagaaggtaactttcagagaaggatctttgctttcaatgattatttctcctccaaatgcacatcctcctctcctccatccctccatacatttttccatctggacaggtgccccaaggactgtctgtcccaacttccctccagtcaggattaataataagaatcatcaacatgggtgggcatggtgcctcatgactgtaattctagcactttgggaaaccaaggtggaaggatcccctgagcytaggagttcgagaccagcctgggcaacatggtgaaaccccatctctataaaaatacaaaaaaaaaaaaagccaggggtggtggtgcacctctagtcccagctactcgggaggctgaagtgggaggatcacttgagcccaggagatagaggctgcagtgagctataatagcaccactgcacatcagccttggtgacagagtgagtatagacctttataatttacaaagctctgcagtcaagtggggataatmgttgctacctcataggaggagcactagatgagatcatgttaaaatgcttagcacagtgtgtggcacgtcatggggttcagtaaacagtggcctacctgtcactttctcctcctatcccctgccccttaccatggttcaaagacgggacattcctcttgccaagcaccaacgctgtgtacccagcacaagctaggtgacttatacccgggttcccatttaccatggtctctctgtgagggagaccccacagacaggtccaatcccacagatgaagaaatggctcagagaggcactgctaccggcccaaggtcacacaactcgcagaggctggccttggatcttgggttttggacttcaaggcttgtactctccccattttaccatgctgcctcaccctttactactctgatcatccttaccatcttggagccagtgtgcttcctcggtcggggggactccaaggcagtggaacagggcaggccttcctcacaagaatctaggacgtcaaggcctgccacctgcttggaggcttaaatttctctgcaagggcccttggctaaattaggtaatgggttcagactgtgggaggggtgggrctcgctgaccccaggatctgattgggcagggtctccagtgctggggagcagggaggtgggaggggagggtgcccctacaaatcccgggggctagagcaggccaggtcatctttgggtggtggagtgcaaaggaggcgacctgcaacagaggagtcccggtcaccagcaaccatggtaaggacaagaggggactttgtgcctttactcacgggagcactctggacccctttcaggccaggcctgggtgctctgtggggcagtaacttggatgtttgaggttggagcatggaggttcctggaacccaggtgtcttggaggaaggcctttgacttttcttgaaaggggagggctgggatattccagagattgatccttaaggcttgctgactgcctactcacttctggaaacttccagcagtgtcattcatagacctgtgaagagctcttagcttgtttccttcacacagtggggactctgaggggtcagagtgagtcacccagcaggccagtggcaggggtgagccagaagcctggccaaaccctcctatcatcatggagagaagaaagcctcctccagaagacgggaggccggcagggcgtggggcctgctcagatgcagggctctgggagccctgaggatgatgggaaggggcagaagatgacagaccagagttagagagactccgctctcctagagagggcttctgatttggagctgttgttttggtctgagatccccctccccacttcacttcaaggagtaactagatcccagaggccagctgctgttgcccatgcctgactaaaaatagcctgccctcctggcatagggaaagaggaggagaggaaggagggggagaaggaggagcactggtggccagcyggctgaagagctccttggaagcctcaccctgtcctcactgccagcctcaatccaaagcctctgacccagatggcctggcttggatatgacgtggaaacccctgcagaaatctcactttcatgtcaaggcctccatcacattcggccccccatgaggggccttttctccaatgactgaatcctaagaaggaagctgacrgcctccgactctgccagttctctgaggggcgggatgatgtgtcttttatctcttctttgtggttccagtgcctgatctgtggcctgacatgcagcaagtactcaataactttgtgttgcattattatttatttgagaacaaacattttattgagcaactattaaagtaccgggcaccattaggagctgcagaaaactggmaaatagtgctggaatggtgctagccctttacaaagccctttcacacccctgatatctcatccctgaaaagctacagagaaaagatgaaggcacgctaattgacgtgcctaaggtcactggggggtggggggggttcccgacttggccttcaattgacaagtgagaaggccttgggcttaacttgttgtctcctctcttttgctcaaaactggggtcacaggctgcgcgcggtggctcacgcctgtaatcccatcactttgggaagctgaggcaggcagatcgcctaaggtagggggttcgagaccagcctgaccaacatggagaaacctcatctctactaaaaatacaaaattagcygggcgttgtggtgcatgcctgtaatcccagctactcgggaggctgagggagaagaatcgcttgaaccccggaggtgggggttgcggttgtggcgagctgagatcgtgccattacactgcagcctaggcaacaagagcaaaactccgtctcaaaacaaaacaaaacaaacaaacaaaaaaaactggggtcaggccgggcatggtggctcacgcctgtaatcccagcactttgggaagccgaggtgggcggatcacctgatgtgaggagttcaagaccagcctggccaacatggtaaaacctcgtctctactaaaaatacaaaaattagctgggcgtgttggcgcatgcctgtaatcccagctactcgagaggctgagggaggagaatcgcttgaacccaggaggtggaggttgcagtgagccgagatcacgccattgcactccagcctgggcgacagggcgagactgtcacaaaaacaaaaagcaaaaacaaaaactggggtcagaagctgggcacagtggctcaagcctgtaatcctagcactttgggaggccgaggtggcaggatcacttgaacccaggagttcaaaaccagcctgggtaatatagtgggaccccatctctacaaaaaattttaaaaattaggcgtggtgtatgctatagtcccagctactcaggaggctgaagtgggacgattgcttgagcccaggaggttgaggctgcagtgagctatgatcacactactgcactccagcatgtgtgacagarcgagacaaaacaaaactgtgattgggtgctgtgcgggcacacaattatgtgacaagtttgaagttgttcttctggagaaccaagggcgctgacagagtgggggttgggaagaatggctttgaggtgaggaactgctctggggctgcctcttcagctcagactttctctgtgtctcctgcagacggaccagcaggctgaggccaggtcctacctcagcgaagagatgatcgctggtgagtgaggcgcggcaggctgggggctgggtggatgtatgctggggacatgttggcctctaggcagggtgggggttggggggggggtaggtgtgaggctgacagtccagcaggcctcacctctgccctctgccctccctcgcagagttcaaggctgcctttgacatgtttgatgctgatggtggtggggacatcagcgtcaaggagttgggcacggtgatgaggatgctgggccagacacccaccaaggaggagctggacgccatcatcgaggaggtggatgaggacggtgagcgrrtgtccctcggaggcaggggatggtggggagaggcggcagcggctgggctcaggctcagtctgccacctgctgcccgcaggcagcggcaccatcgacttcgaggagttcttggtcatkatggtgcgccagatgaaagaggacgcgaaagggaagagcgaggaggagctggccgagtgcttccgcatcttcgacaggtgcgctgggggcccgggagccgagggaggggctyagcagtcagaacccggccggcagcgctggaagcttccccrtgttgggagtgcggaagcggggcgtcsagtgtggtggccagggcagctcgccccggccctgagccytgccctgtccctcggaccygaaggaatgcagacggctacatcgacccggaggagctggctgagattttcagggcctccggggagcacgtgackgacgaggagatcgaatctctgatgaaagacggcgacaagaacaacgacggccgcattgacttcgacggtgagggccaacgggagcttgggaagagcgggtgggagccccagaggacggcgggcactggtgcctggctccggtgcagtgtccttggccttgtgggctgggctgggcgtaacttcaccaagttccccatagtctcctgggggcaggtatagaagcgctccacgactctgtgcagtttatcaattaatgaccaggcaggggggcgtggtggctcaggactgtaaaatcctagaactttgggaggatgaggtgggaggattgcttgaggccaagagttcgagaccagcctgggcaacatagtgagaccctgtctttacaaaaaataaaataaaataaaaaggcaggtgtggtggcacacctgtggtcccagttgctccsggggctgaggtaagaggatcgcttgagcctaggagatcaaggctgcaatgagttatgattgtgccactgcactctagcctgggtgacagaccttggcgaccttggcaacagagtgagactctgtctcaacaaaaacaaaaacaaaaagtcatcccctctgtgtggctggagccctggcctggcctctgcgtccccagtgggacccctgaccctctccctctcctttccctcagagttcctgaagatgatggagggcgtgcagtaaggagtggacagtcgcctctaccaagatcgcgtgtccctagggtgtgggagactccgccctgccgggtccccaccagggaggcgcgrccccttgtgggtctttgtctggaaggaataaaagcaaatgttccaaaactcgtggcctgaatgaggggagagccgaggacagcaggtcgcaagggctgtggtccagggcgccatcccggctggcaccacccggagcacccttggggatccccgggagaggctgtctgagcggcgggatgtggaagggagctgggccctggagcccgaggcggcggctgcgagtgctcgatggcgctgactcgctctgcaggtttgcagccggctcctgacagctggcgctgggcgtgcacagcttggcggacaggcagtggtggctccaggaggctgcaggggcttggagttgagtcagggtgagccggcggactgcggaggggtcctgagacggcaggtagggtgagggggtgggagaggctagaaccctggggagccgggaagctccctcacttccccaccatccttttctggaacgtttgcgtcttagatgttgtcgtagctgccaccttctgcaggctccctagctggggagaggggaagtaggtgcccatccatgccaggcagcattgtttctgctcgaccttttacttcttctgttcttccaagtgcttactcctcaaattgtactggtggttgtaggggagggtggaggcacccactaaggagattctgatctcatcatttgaccccagatccctgcctccacctggtctctgccagtgcgctctacagagggccatcagcagcagcgagctaaaatatctgacttggccactgccctgttgaaagtagttcaaggctcctcactgcttctacaatgagatccaaattccttccctccctccctccctccctctctttcttcccatagtcctcacagggctgcagccacactgggcaatgtattcctgatatggacctggggtgcattttcaagcccttggtactttgcacatgctgtttgccctccctggaatgcccttgtccttcttataagctggcagattcttcaacctacaagacccagctcaactaccatctcctcccttgaaccttgccctcactggctatttgctgccatagcaattcgtatacaacaggtatcagatggcagctaattaagtgtaggggtagtttagctttagagacagaatgcctgtgtgtgagtgctcactgcctgtgacaagctaaaccactctgtgccacagtttcctcatctgtaaaatggggatagtgatagtaaacacggggttgtgagaagaagttagtgtgtgcaaagtgcttacagcagtgcctggcacatagcaagcatttttttttttaacagagtttcgctcttgtcatccaggctggagtgcagtggcgcgatctcagctcactgcaacctccgcctcctgggttcgagcaattcttctgcctcagcctcctgagtagctgggattaccggtgtccaccaccatgcctggctaatttttgtatttttagtagagaccaggtttcgccatgttggccaggctggtcttgaactcctgatctcaggtgatccgcctgcctcagcctcccaaagtgctgggattacaggcatgagccaccacatctggccttctgttttgttttttaaatgagacagggtctcgctctgttgcccaggctggagtgcagtaggtgatcacagctcactgtagccttgacctcccgggctcaagcgatcctcctgtctcagcctcccgagtagctgggactataaatgggtgacccctccccactagtttttgttatttttagcagagatggggtctcactatgttgcccaggctggtctcaaactcttgagctcaaagaatcctctcaccttggcctcccaaagtgttgggattataggcatgagccatcgtgcccagcctctattgtcaccttactcattgctttagttcttcctctccatctgtctttttctcttcctcttttgtcctattcatgtttttctgtttttatttccagccaggatcagtgctggggtttggtaatcattactatttactgagtgcctactgtatactatgtcttacagacattgtctcattcactcacataacatccctagaggcagatgttgttatctccattttacagttggaaaactaaggcctagggaggtgaagtacacaggcacccagataataacctaggtagtatcgccatgtgctatgtggtgtgcacgggaacaaggctcttaattctgatgccatctacctgttattggttctacctggatgtcttttttttttttttttgaaatatatacatattttaaaatagagatggaggctgggtgctgtggctcatgcctgtaatcccagcactttggaagccgaggcaggcggatcacttgaggccaggagtttgagaccagcctggccaacatggaaaaacctcctctgtactaagaatgtaaaaattagccagacacatgcctgtaatcttagctacttgggaggctgaggcaggagaatcgctggaacccaagaggtggaagttgcagtgagccaagattgcgccactgcactccagcttgggtgacagagtgagactctgtcttaaaaaataacataagccaggcgtggtggctcatgcctgtaaacttagcactttgggaggccaaagcgggtggatcacctgaggtcgggagtttgagaccagcctgaccaacatggagaaaccccgtctctaccaaaaatacaaaattagccaggtgtggtggcacatgtctgtaattccagctacttgggaggctgaggcaggagaatcgcttgaatgcgggagccagaggttgcagtgagcagagatcgtagcattgcactctagcctgggcaacaagagtgaaactccgtctcaaaaaataaatttaaaaaaaaaaaatctgatcacgtcactgccctgctcaaggcttcattagctggctgttgcctcaagataaagtccaagttttttttttttttttttttaaggactgaatctccctatcacacaggctgaagtgcagtggcacaattatagctcactgcagcctcgaactcctaggtgcaagtgatcctcccttctcagcccctagttattttattttttgtagagatggagtctcactttgttaccaaggctagcccaagtaccttaatatggccttccagcctatcatgacctgacatctatgcgacttccccatcctgtattattttttttttttgagacagagttttgtgcttgtcagccaggctggagagcagtggcgtgatctcggctcactgcaacccccgcctcccgagttcaagcgattctcctacctcagcctcctgagtagttgagactacaggtgcctgccaccatgcccggctaatttttatatttttagtagagatggggtttcatcatgttggtcagggtggtcttgaattcctgagctcaggtgatctgcccgccttagccttgcaaagtgctgggattataagcgtgagccaccacgcctagctctgtattcctctccttacatactcctgaacttcttgctatccaaggaatgtgcatctccctcagggctcaatttccttctccaaaaacctttccctgaccctcctattctattgggtgctccacctgtgaacttacatagcaatatgtgagttcagcaccaacatttattcagtgcttactatgtgccaggcattgttctaaggtccttccactgtcttatgaggtaggtaccagtattttcattttacggagaggttaaatgtaactgcctacatgtttacgggcaacatggaggtggagccaggatcctgaaacagttctgcttacctggtctgagcttttctttttcttttttttttttttgagatggagtcttgctcttgttgcctagactggagtgcaatggacgatctcggctcactgcaatctccgcctcccaggttcaagcgattctcctgccgtagcctcccgagtagctgggattacaggcactcgccaccatgcctggccaattttttgtatttttagtagaaacggggtttcactatgttggtcaggctggtctcaaactcctgacctcaggtgatccacccgctttggcctcccaaagtgctgggattacaggcatgagccaccgtgcccagactggtctgagcttaataactgggctgtatggcacttattccgcagtccccgctgttgatgggcctgtctgtcccccaaattccagcctctttaagggcagagctgtattttccctgttttgtccccagccccaagcagagggcctttgtcttgtaggaattcaataaaatgggaatcataataaccagaaattcaaatacttcctgaccaggcttctttctgttgcaagtgccagaaatctaaatcaaacggacttaaaccaaaaagggatttgttagtttatcgaactgggatggcaaagcatgaactggaggccagagtctcagttaatgtcatctctccgactcccagctgtttgtctctacttggctttcttccgtctgcagcgggctcccccagcagctgagactgactcccttctcttttagcaaccccattagtaaaataactttactctctcccagtgattaattccagacaacaccagttgaatctgaactacagtttagacctgtgactggcccaaggcaggccatgtggccatctaaggtaccaaacaccgtgaccaaggaccacatggcagatgaaaacacatccaccacagttagtattcgaaacatttcttttagagataaggtcttactctgctgcctaggctggagtgataagcttactataaccttgaatttctggccccaagtgatcctcccaccttggcctcccaagatgttgagattgctgatgtgaaccaccaggcccggccaagatttatttatttttcttttaaaatttattatttgagatgggggtctcactgtgttgcccagactggtcttgaattcttaagttcaagcaatcaatcctcctgcctccgcctcccagagtgctaggattacagggagtgagccaccacacccggccctggccagcatatattgactaatttagtgccaggttctgagctctggttttctccagtatccgctaacctagtgattttcaaccgtgggagaccttcagaacctggagggcagtttggggtcaagaatttgcctaacaagttccgggtgatgctgctgctgctggaaggaccacattctaagaacattgctctaaattttgttcttaagcagaccgcagcaatgacatcacttggaaactatttagaaaccaaaataaataaacagactggatcttaggctccacttcacacctacagaaaagaatttaacaagatcccaagtgtatttgtatgaatgttagattaagaaaaaacccaagaggagagacctaagagcacaattatagacatgaagggacccaacttccaatcccaaacccctcccgcttcaggcttgcacaaccaaccagctgctaacagacctgaaggagttgggtgcaaggttggagcacatctggatgctgcttatctaccttggagatcttcctgaagggctttgtgggggccctatcacttcaacctactcttccacctgccgacccttgtggggacccagctggtcagcaggggtgtttcctcctaggggctcaaagactggagccttcatcaggccaggggaaagaggcagcccaaggggctgggggctccctgggggatatgcagcaggaggcgactgtgcccccttggaggtggagctccaccggggacctgggctagagcctggagaccagagctcagacctgagtcctgccagggaaggggcttttttcctggctgtctccccaggccctggacctgcttagggtgacctaagcattcttcttcaggacagaacatgggtggctgtgtgttgggatcccccccccaacacacacgcttgttccttctacagctataggagtaggtttcagcctaaggtct

SEQ ID NO: 98072 - DNA, 31506 bp, Homo sapiens
agctttctttccatttctcaaatgtggcaagctcctagtcatcttaaggcctctgtgtgtgcttctctctctccctggaatgtccatcgcacccttcacctggctaacttcaaatcgctctccaggttgcagcttaaatgtcactccacacatgccatcctcaaccacccaaaccaatgtgagttctcagccgggcacggtggctcacgccagcccttgggaggccaaggcaggtggatcacttgaggccaggagtgtgagaccaacccagccaacatggtgagaccccatctctcctaaaaatacaaaaattagccaggtggggtggcatgtgcctgtaatcccagctactcgggaggctgaggcaggagaattgcttgagcccagaaggtaggtggaggttgtagtgaaacaagatcgtgccactgcactccagcctgagcaacagagcaagactgtcaaaaaaataaaaacaaaaataaaagtgagttctccgctttactctgtctctcagcaccctttaattttccttccctgtccttatcagagtttgaaattatatatttatttacatgcttatttgttaaacctctttctctgccatgagactatgagctccatgaaagcgggcatgggatctaccgtattttccacaatataccaggagcccgtcactggatctcgcaaacagtacacattcaataaatacttgttgaagaaatgaatgcataaatggataattaggtcactgggactctgcaaaagggagaatgaatctctttcaaatacctctctaccaggaccagaatgaaaaagaatctgtttcccacaggagacagccccgccgtgtgtgtacatagggaacataagaatctcaggagcaggccaggcatggtggctcacgcctgtaatcccagtactttgggaggctgaggtgggtggatcacgaggtcaggagattgagaccatcctggctaacatgacgaaaacccgtctctactaaaaatacaaaaaattagccgggtgtggtggcacatgcctgtagtcccagataatagggaggctgaggcaggagaattgcttgaacctgggaggcagaggttgcagtgagccaagatcacaccactgcactctagcctgggagacagagcaagactctctctcaaaaaaaaaaaaaaaaaaaaaaaaagaatctcgggagcaaatgagtggggaaatgtgtgccaccttccataggcatcaagattcttttttttttttctgtctctgcagattctcaggataagattttttaacagagaatattgcaactgattatgggaactgggaattacccagtggttttcttttttcttttttttttttttttttttttttttgagacagagtctcgctctgtcacccaggctggagtgcagtggcataatctcggcccactgcaagctccgccttctgggttcacgccattctcctgcttcagcctcctaagtagctgggactacaggcacccgccaccacgcccggctactttttttgtatttttagtagagacggagtttcgccgtgttagccaggatggtctcgatctcctgacctcgtgatccgcccgccttggcctcccaaagtgctgggattccaggcatgagccaccacacctggctactcaaccgttttcaaagcagtctgcaaatgagggtaagttgaggctgcccttctggcaccctccctctgcctgcccaggctacataccacaaatgattatggcttgtgcaccctttgtatatctttatttttttaaggtcttagaatatagcagcaaagtaaaaccaacaagctgatatgtgcatatttgagaaataaacaagcagaccaaacagaccatgaggtgtggggacagcgtttcttacccagcttctgtttagagattgggactacacagctcttgttgcagccaagcgtgcagcatttctttacacctggacatgtctcatcagtgatgcaccttttcaaacaggattgtttccgaataaccctagggcaatctcttttcctccctgtagcaaaaagggagacagcaaagaaaagagaaaataggccgagcgccatggctcacacctgtaatcccagcactttgggaggccaaggcgggtggatcacctgaggtagggagttcgagaacagcctggccaacatggagaaaccccatctctactaaaaatacaaaattagtcgggggtggtggcacatgcctgtaaatcccagctacttgggaggctgaggcaggagaatcacttgaacccgggaggcagaggttgcggtgagccgagatcacgccactgcattctagtctgagcaacaagagcgaaactccgtctcaaaaaaaaaagagagagagagagagaaaatagtgcctggcaacacccacgggcacagcagaagggaaaaacagaaaaaggaagtcctgagatttatttaagcctctcaaccctggtgctaagacaaagagacaataataacaacaatagtaatagcaaatatttactgtaacatttactgacgtttaccttgtgccatgaacatcttatttgatcctcacaattatccccattttatagatgaggaaactgaggctaaaagcttaagatttataaagagctaaggcttaaggcttaaaaaggtctgcttggctctagggtctactctcttaatcattatcttacacagccttccctttacaactcttccctccagccttcacaggaacttcgagtccaaagtaaaagacatagataatcgatggtgcgctctttcctgatggaaggcaaacaactgggggcactgaataattaaaggaggagggaccctaaaagagtaaagaagaagtactctaggcaagggagacttccagaggcaacctagaaggtgggaagctctctacttccatctatcccagaggcaatgtcagagagtatgcccagattttgcccctcatgccaacatacccttaggaatgtctcggcagatccgaccacagcctgtggtgcagcacttctgttcagccggacacaattcatcgccctggcacagctctttgcatgggttcttatcgggagggcattctccctcttttgctgcaaaagatactatttgagtttggggtaactagccaggcctcagaaatggggaatggaccttcagcccctccaggcatctctatccaaaatatttctgcaccactgcactctagcctgggtgacagaatgagaccctgtctcttaaaaaaaaaaaaaattctggctgggcacgatggctcatgcctgtaatcccagcactttgggaggccgaggcgggcggatcatgaggtcaggagatcgagatcatcctggctaacacagtgaaaccccatctctactaaaaatacaaaaaattagctgggcgtggcggcgggcacctgtagtcccagctactcgggaggctgaggcaggagaatggcgtgaacctgggaggtggagtttgcagtgagctgagatcacgccactgcactccagcctgggtgacagagtgagactccatctcaaaaaaaaaaaaaaaaattctgcaaccaccttcccctcctcatacacaaatactaacatatatccaccactgctaaaggagcagccatcctgcagataacgagagagaaagggtgggatgatcctgttctcatttaatgagttctagggaaaagctagaacctctagtaagcccaactggaagtcctatctccttgtccagagagggtaaagaaagccaggaagaatgacccaggccatcctgagaatctattcatccagtcctgtcctatagagatgatcatctccacttacaagcaaccttgctctgggagaaggcaggggatgacttctcctctcctctagtcactttctgttactgttggccagggatcccaaatgatagctcaccatgttctcctgcagttatccaggattccagggacccaagagcaagaagtgccttcagaagaaagaggcagcttaacatcatgatgatgctgagagttgggacaagagctcagttcaggctagaggtgtacaccttgcccagagtatcagctgaggtatgagcaggactagggatggccccaaacccagtcccaaaaccttccctttcacaatactccccaagaatatcttctcctgacaagaagaagagggattggctgctggagtgtgggaaaattcctggcactaccaaaggggacctgtgatgggaggatcaaattctgtaagcaatatacacaatattcctggatgatgagaaacctagtgggtggctggaaaaatggaggggtggccattggaaaaagaatcaaagagagccctaaagggcattggaaggacatggctttagcccaaataacagagggagggattcacgacactacttaatggccaaagctaataacataaccaagcataataaaattgtggctcctgttcatcctagcaaccaagaaaatacagaatggaacagaccactcagaaactatcaaataggccaaggcgggcagatcacctgaggtcaggagtttgagaccagcctggccaacatggcgaaaccctgtctctactaaaaatacaaaaatcagctgggcatgctggtgcatgcctgtaatcccagctacgtgggaggctgaggcaggagaatagcttgaacccaggaggcagaggttgcagtgagtggagatcatgccactgcactccagcttgggtaacagagtgagactctgtctcaaaaaaaaaaaaaagagagaaaagaaactatcaaaaacctacagaaaagcagtagttgagtttgttaagaactaatgaaaagcaccaaacacctacatctttgtccctctaacccacacaggccattcttggactgtatgaagtctagctggcagaacccaagagaagttgctatgtatgactcaaatagtctgcccacatatacctcctttatttcttttttctccatttctttttttctttatctgtcctggtcatgcctttggttagctgtgatacctaatggtgtccactggcactgcttagtcctatgggcaggtacaaggtaaaacctccttaataggatcaaaaagtttggagccaggaagtcgcccttatggttagaaggctgatgttggctcatggagataattaacatttgatgatgacctcatatgtgcctaatatgctttttttttttttttttttttttttttgagacagagtctccctctgtcccccaggctggaatgcagtggcgcgatctcggcataattaacatttgatgatgacctaacatgtgcctaatgtgctttttttttttttttttttgagacagtctccctctgtcgcccaggctggagtgcagtggcgtgatctcggctcactgcaacctccgcctcctgggttcaagagactctcctgcctcagcctcccgagtagctgggattacaggtgcccaccaccacgcccggctaatttttatatttttagtagagacggggtttcgccatgttggccaggctggtctcgaactcctgatggcaagtgatcctcccgcctcggcctcccaaagtgctgggattacaggcgtgagccaccgcccctggccgagcatattaaaatctagttttcaaaaactgaactgcaggcgccactgtaccaaacgcttccctctgctccccaaccccagcctacagaaaactggtcccttcctcctaccccgcagtcatccccaggccttggcccagcgggaaacatcccttgactgaaccgccactgaacacccacactgcacaatcgaggcgcagccctcccgagaggaagccccaacgacctccacctacaaggcctctaagtgtaactgtcctgggcgaggcgcggcggttcggttcccatggtaaccccgcagctccagcgtcgcgcttccgggcggacgagcagcgcgctccagtgacgtcacggcgccactttccggccggtgacagagtccagcggagttgtgggggccggrggcgccatgggagccactggcgacgccgagcagccgcggggaccyagcggggccgagaggggcggcttggagctgggggatgcgggcgcagcggggcagctggttcttacggtgagggcgcccccggtgaggtctgggctcaggccgggcacggcctcggggctcctgggaccctggcccgcgggcgagagaacgcggaggctggagctgcagagggggttggcgttttcgcagcccgacgacctggatttaaattctggtgccgccctcctagctaggtgacgtgggccatctctgtcaaccccctgagtcccaggatcctcttctataaaatggaaatgattagtacctgtctcataaaacttgttgtgggatgggaagataaaggcgggtacaacgccccggacatcacctgacacagagttgaccctcggtaaatactgcttcccttcctcctgccgtgccagaaggcagggtcgggacttttaaggcaggaaacttcctcagttcctcttttgtggaggaggccttacaactatcgtcccaccccaaggcgggagagatggtgacggatctgagaagcagggatgtccaggtttaacttcatacccaccctccacctccaccccaccccagtgtcacaggccgcagtgacatttgttccgttggtccccacagaacccttggaacataatgataaagcaccggcaggtgcagcggaggggccgccgctcacagatgacaacaaggtaaggctggccctgcatggggcttatatcccagccactggcttgcatggcagatttgggatccccagtgcacaaggctatggagatctacagccggtagaaagagcacaggactgaggaagaggagactccgattctgtaactctgtgtgatcttgarctagtcaagtcacttccttctctgaactcacgtacaaaatggggaagggcacaggagatgggttgtggaataaacaatacctaagatccctcacattcactggctctgtggttgagggctctaaagaggtcagttagcatggagtttaagagaacaggctctggagtcagacaactgtgttctcatcaacagactctgatgagcccgttttctcaactataaagagggattaatagtatgcatgtcagggaagggagagagcacaaggtgggcctttgggatgctgatagtggtgaaatggatgttcactataattactcattaaagtgtatagacttttctgtataagtattatatttcataaaaacactttgggccgggcgcggtggctcacgcctgtaatcccarcactttgggaggctgaggtgggtggatcacctgaggtcgggacttccagaacagcctgaccaacatggagaaaccccgtctctactaaaaataacaaaaaattggccgggcgcggtggctcacgcctgtaatcccagcactttgggagtctgaggcgggcagatcacctgaggttgggagttcgagaccagcctgaccaaaatggagaaacccggtctctactaaaaatacaaaaattagccgggcgtggtggtgcacacctgtaatcccagctactaaggaggctgaggcaggagaattgcttgaacccaggaggcagaggttgcagtgagccaaaaccacgccactgcactccagcctgggcaacagagtgagactccgtctcaaaaaaaaaaactttgaaaataatatgcacttcacagagttattatgagaaagaaataaagtcatgcctctgtgatttgcacaaaatctgagcatgtagctagttttcaataaaagctgtctagtattgttaaggaattctatgtccataattaactggggaggctgggaaagaatatgtttgggacatgccccctcaccctgtctccctcctgaatgcagtttcacagatcctgccatctccatggatctcctccgagctgtcctgcagcccagcatcaacgaggaratccagactgtcttcaacaagtacatgaaggtgagagggacacaggataaaaaataacaggagaaagactcatgaggakcccagtccttgcctgcatcaccagtctgtctctttcctacatacagatatctaaagttttcctttcttgttgtttttgttttgttttgttttgtgtttttgagacagattctcactctgtcacccaggctggagtgcagtggcacaatatcgattcaccgcaacctccacttcccaggttccagcgattctcatgcctcagcctccctagtggctgggattacaggtgcccaccaccttgcagggctaatttttgtatttttagtagagacggggtttcactgttggccaggctggtctcgaactcctgacctcaaatgatttgcctgccttggcctcccaaagtgctgggattataggtgtgagccagggcacctggtcagttttcaaatttttaatcccccaagaattttattccctccttgagggtaattcagataccttttttttwwaaaatctgcccttgtcacgcacgtggttttttttgctgacctcttataaggatgaagtgacttaaatgtactgtgctgagcactgtgctccagacataacaagtgtccaataagtattcttattagttgtttaataatataaccattattggggccatgcacagtggctcacacctgcaaccccagcactttgggaggccgaggcaggatcacttgaggccaggagtttgagaacagcctgggcaacacagtgggacctcatctctactaaaaaaaaaaaaaaattttttttttttttttttgagacagagtctcactctgtcgccaggctggagtgcagtggcacggtcttggctcactgcaacctccgcctcctgggttcaagcagttctctgccccagcctcccaagtagctgggattacaggcatccgccaccacgcccagctaattttttgtatttttagtagagacggggtttcaccgtgttagccaggatggtctcgatctcctgacctcgtgatccgccyacctcggcctcgcaaagtgctgggattacaggtgtgagccaccgcgcccgtcctgattttttgcactatttacacctcaatctgttgggcacccccacgattatatccgtaagarggggaataaagggaggaggtcaagcctgaaatgtgaatctaaatctggctgatcccaaagccctgctcataatcacttttcccttctgtatgaagctaggataaagacttattttatattcagtttccttcaggttgatgcacattaacaggactctgaccttgtcctctgttgtgctcccctagttcttccagaaggcagcactgaacgtgcgagacaatgttggggaggaggtggacgcagagcagctgatccaggaagcctgtcggagctgcctggagcaggtgagaccaaaggggacaagagatgcaggcacaaggtttagctctcgagcctctgataagaaatgcgatcttaagccggacrtggtggctcacacatgtaatcccagcactgtgggaggccaaggtgggcagatcactcaaggccaggagtttgagaccagcttgggcaacgtggctaaaccccatctctacaaacaatacgaaaattagctgggcatggtggtgcacgcctataatcctagctgcttgggagccataggcacgagaatcgcttgaacctgggagacagaggttgcggtgagccgagatgrcaccactacactccagcctgggtgaaagagcaagattctgtctcaaaaacaaacaaaaaaagaaatgtgatcttgtcatcagtggtattttggggaatgcccagcaagccacatattgagataggcttgaggctgttgctgacagggaaaggaagggaagtagctactatatgtcaggtaccaggataaatgcattatttttttttatgtctcagaagaaactatgtacagaagatatcttttaattactattttatagatgaagaaattgtgacttagcaaactcatagaagcagagagtagaatggcagtagctggaggggagaagtggggggatgttaatcaaagggtacaaacttttagttataagatgaacaagttctgggcaatctgatgtacagcatgrtgactatagtttatctctattgtttacttgaaatttgctaagaccatagatcttaagtgtccacacacaaaatggtagtggtggatgtgttgattgatttcattgtggtaatcatttcactatgtatatctatgtcarttcatcacattgtacaccttgaatatataccatttctgtttatcaattatacatcawtagagctagaaaaaaatttttaaaagcaaagcaaaaaaaaaaaaagaaatggcttaagacacataataattagaatagctaagatctgtctcacccctgcaggtgcgtggtggatcaagttatcatggccccatttggtatcatggggatgagcaccctgctgcctccctgcctctctggtgtggtcaggaagcatgacatcaggtctataaatgactgttcccaagatagtagagaacctgtttacatgtgtcagctgctgttattaggaggaattgttgccatcaccattttatagggagacatcaggaaaggtcgccaatagtcgctggctcactttctcacctcctattcattctcttcactttgttttcgcttcagtccccactacttcactggaacccctcttgtcggggtcgctagtaacttccgtgttgtcaaaccctctggtccctaactgtcctcaacttactcagcttctcagtgacatctgtcacaatggatcatttcgcgtttcttggaatgctcctctgttggctagagtgccttgactttgctccaacctcattgcctactcttctctctcaccccccgcctctaactgttggtgccttcccaagttcagtcctcaaaccccttctctttcatggctcactgttttcataggtgttttcatctagtcctgtggcttggaagccaattcagccgctcataattcacacatttatatctcagtccagagttacattcaccgttacccagttccaatccactcttctcayagcagccagactgatctccgtaaagatgaattagatcatgtcactccccattttaaaaacgcttcagtgactttcctgttgcagggagaataaagtcttaatgccttaccatgatcctgctgggaaaactggctagccatatgtagaaagccgaaactggatcccttccttacaccttatacaaaaattaattcaagatggattaaagacttaaatgttagacctaaaaccataaaaaccctagaagaaaacctaggcaataccattcaggacataggcatgggcaaggacttcatgactaaaacaccaaaaggaatggcaacaaaagccaaaattgacaaatgggatctaattaaactaaagagcttctgcacagcaaaagaaatgaccatcagagtgaacaggcaacctacagaatgggagaaaatttttgcaatctactcatctgacaaagggctaatacccagaatctacaatgaactctaacaaatttacaagaaaaaaacaagcaaccccatcaacaagtggccaaaggacatgaacagacactcctcaaaagaagacatttatgcagccaaaagacacatgaaaaaatgctcatcatcactggccatcagagaaatgcaaatcaaaaccacaatgagataccatcttacaccagttagaatggtgatcattaaaaagtcaggaaacaacaggtgctggagaggatgtggagaaataggaacacttttacactgttggtgggaccgtaaactagttcaaccattgtggaagtcagtgtggcgattcctcagggatctagaactagaaataccatttgacccagccatcccattactgggtatatacccaaaggaatataaatcatgctgctataaagacacatgcacacatatgtttattgtggcactattcacaatagcaaagacttggaaccaacccaaatgtccaacaatgatagactggattaagaaaatgtggcacatatataccatggaatactatgcagccataaaaagtgatgagttcatgtcctttttagggacatggatgaagctggaaaccatcattctcagcaaactatcacaaggacaaaaaaccaaacaccgcatgttctcactcatgggtgggaattgaacaatgagaacacatggacacaggaaagggaacatcagacaccggggcctgtcgtggggttgggggaggggggagggatagcattaggagatatacctaatgttaaatgacgagttactgggtgcagcacaccaacaaggcacatgtatacatatgtaacaaacctgcatgttgtgcacatgtaccctaaaacttaaagtataatttaaaaaaaaatgccttaccatgacccacagagcctaccctcgactggcttctgcctgcttctttaacttcatttcatctcacctcttttttattgactrtactctggctgttctgaactcctttctgctcctccagcacaagcttaggccatttcacttgctgttcttagtacctrgggtactctacccttaactctataaagccggctccttcttttcttcagatcttagtttaaatatcagagaggtcttcccctcgcactcctacctctgctaaaatcttgagctttacaagrgttgaggcctaatcttgttcaccactgtattcccagccctggaatatgactcttagtatgtgtacagagtttgctgaattattgagtaaatgaaggaacaaacaaatgataaatgaacaaacaagcttcctgctctaatagaacttaacagcctacttaagcagacaggtgtgaattagattaccaacaaatgtgtgcataattacacattgagacttgatcacccttcactggaaagggacaaagtttggaggagaagagcatgaatccaattatggattagcagctttgagccatccaagcatagacatggggcagactatttggtatataagtctagagctcagaggataaccttttgtctacagttgaattatggaatcgtggtttatagatgttaattgaagctgtgagaataggtgagagcagatagaatatgtaatgagagaggatagggaaaagaaccagattgagaaggaaaagccagcaaagaaggctaagaaagaacggccagagaagtagaaggaacacaggaagtgtggccacaggagcctgtagaaaagagtgtttccagaagggggagccctcagcactgtcaaatgccactggcagaggtcgggtgaacccaattctccacctgctgcaccatctcccctctgcccattccatccttttctttgtcaaatgagccaggtgttcccacctttgagcttctgcactcctccctgctgctgaaacacttctgcccagctttttttacagcctccttcacatctcaactcagaggccacctyctgagcaaggccttccctggccattcccgcaaagtagcccttcccctctggtggttctctgtcacatctgcctgggtttttttctttttttctcacagcatctatcatgatccacagttaccttgtttgtttctgtgcttattatccagatcacccacaaactataagctccacaagagcttgtcctagttactgctgtgtccacagcacttaggtcccaggtactcagtatttattaaaagaaaaacagcaggccaggcgcactggctcacgcctgtaatcccaacactttgggaggctgaggcgggcagatcacgaggtcagaagtgtgagactagcctagccaacgtgataaaaccccatctctactaaaaataccaaaaaaaaaaaaaaaaaaattagctgggtgtggttgcacgcctgtaatcccagctactcaggaggcagaggcaggagaattgcttgaacctgggaggcggagattgcagacagccgagatcgcaccactgtactccagtctgggcaacagagcaagattccatgtcaaaaaaaaaaagaaaaaagaaaaacagcagcttactgaggagtatgtgttatactaatgtatttagtttgaaaaaacatacagtatgtatttacatgggaaaagcaaggaagaatttacattgaaacattaatagtagtttatgtaatgagattccaggtttttcttattttgcttttttacattttttaatttttccagccatgatcattaattcaagtttttttaaaaatagatatctatttctatgcatataaatatatatatgtgtgtggctgggcgtggtggctcatgcctgtaatcgcagcactttgggaggccaaggcaggtggatcacctgaggttaagagttcgagaccagcctggccaacatggtgaaaccccgtttctaataaaaatacaaaaattagctgggcatggtggtgggcacctgtaatctcagctgcctgggaggctgaggcaggagaatcgcttgaacccaggaggcggaggttgcagtgagctgagatagcaccactgcactccagcctgggcgacaagagtgaaactccatctcaatttaaaaaaaaaaaaaaaatatatatatatatatatatatatatatatatatatatatatatatatatatatatatatatttggaagtgggccgatcacttgaggtcaggagttcaagaccagcctgtccaacatggtgaaatcccgtctcttccaaaaatacaaaaattagctgggtatggtggcgcacccctgtagtcccagctactttggaggctgaggcatgagaatcacttgaacccaggagatggaggttgcagagagccaagatggtgctgctgcactccagcctgagcaacagagcaagactctgtctccaaaaaaaaaaaaggaagtaggtagggtgtgcttacccaccaaaatagtgactggtaacacttggtctttttcccttcaggctaaactgctcttttcagatggagaaaaagtaatacccagattgacccatgagcttccaggaataaaggtcagagtcactgtgttctcgggtattggagcgrgaggtccttcaggctgggaggcaagtgaaatatgtgggcccagggaggttccatgtacttccatttgtaggaccaggcccacacagcatcatgctggatgggcttctttggcctgggtcagagcggggctggagagctgtagtccagggctgtcttctgcaactccagaagacctgcagctcccaggcactggccttccactgactcccttcccttttcttttagcgtggccgtcaggcagaagaagaatgtgcccatcgaggaagcccccttcctaaaaaggtaaaccatttccttgttttgttttctggctgaaaaaaggcttgtcaggccgggtgtggtggctcacacctgtaatcccaacactttgggaggccaagcggggaggatcacttgagctcaggagttttgagaccagtctgggtaacatagtgagaccctgtctctaaaataaaaaaaaaattagccaggcatgctggcacatttctgtcgtcctagctacatgagaggctgcagtgggaggatcacctgagcccaggagttcaaggctgtagtgagctatgatcatgccactgcactccaggctgagtaacagagtaagaccctgtctctcaaaaaaggctcttcactccgcaaggtactgggcttcctcaaagcccttttgagccttcctagacatgagaggcagtttttctccctgtccctgtcaaacatcatttgatctctttggaaaaccatctctgccaagtgaccctggacctgccaatggggtatggggagtaaccacagggtcagacctctgacagctgttttttgtggcagaggaaaggacggcctcctggacacatcctgtcaagcgaccgggcagccrccggcatggtgtgagtagggaccaacagtgtggtgagagcataggggagcagayggagagaggggccctgaaggaaaagagtycagggttctgtgcctgtcaaaatcagatccatcagcttaagtcatcgtggaggggggttatcctggttggaggggtgaggaaggagggtagtgaggaggaaattgttttaccccctgaacggtttggcccagcttgatgaaagattaaactccagaggtttgtcattgttagtatatattggatgcttatgactggtctaaatacgttacatactttaccttttaatctttatagccaccctgtaaagaagatatcattaatttttcagataacagactcagagaattacttgcctaatgtcatatcgttaacattgcctccaagacggtcattttcaaatatatatttttttaagacttaatttttttagagcagttttaggttcacagcaaaattgagaggaaggtacagacatatcccgtatactccctgaccctacacatgcacagcctcccccattatcgacatcaggcaccagagtggtacatttgttacatttgatgagcctactttgactcgtcttgatcctcagagtgcatagtttccatgagggttcactcttggtattgtacatgaacttagacaaatgcatagtgacaggcatccaccattctagtatcacactgagtgctttcagtgccctaaaaatcctctgtgttctgcctgttcatccttccttccccctcaaccaacccccaaccccactttttaaaaaaaattctgaagcagcagaatctttttcaaacaaaactttacatgggagcccagtatttaaatcaaataaagccacactggtctggttcaggggcgtggggttagtttggaacagctggcttagtagatgggctagtattaactgtcataccttagatgtgtctcctacacgaagcagttttattcctcacaaacacaagataggtagggcagttgctgtttttgtctcttttgacagatgagaaaactgccactcagaggttcttggagttgctcatgccactatgtaagagcagagctagtgctagaatggcttctagtccagtgcttttttyccctttgttcctcctcttatgtgtcaccacgaaggaggatgtccagggctaaagtgagagtgtgtgaggaactcctaccaccaccagcaagctggcatttagtcctaggtctcaccttggagaattcacctttattctttccttccaagcagatggaaaccaaaatcctgtgaaccaattcgccgggaaggccccaaggtatgattatgtgagcatggcagagatcacgatcccaggagatagtcccactatctctaggacccaccatgagggaaaggggcagggggcgaagggtgcatgcacaccattccagagccatctgcccctctccacctccagccacactggcctcagagaggatcctgtgtaggaaytggagttagaggcaaaacaaagagagggcttgagtctttgctgaagccttctccttataggagttagtggtcactaatactgattcaatacttagtatgtaacgggcagtgtcctaaatcttttgtgtagaccatctcatttaatctttataacaaacttatgagatcaattctgtgaaccattctataaatgaggcgtttccttttctgccagcttccctgtgggcataaattattttattcagttgtcttatacacttaatgcacttaagacttgcccaaagtcacataactcgtaagtgatcgagctgagtctcaaacccaagacccgctgacaccagagtctgtgctctcaaccattagcctctgttgcctccctctctctcctgagttcttcctcagcagtgacttatataaatggttgttccccagaattctctccttggcccacttctccatctaaagtaactctctggataatctaaaacatatactcttatggtttcagggaccaccatgwtctaaaactcccatacctctttgtccatcccatgcctctttctactttaaaacttgtttatcctactatctgcttgaccactctgctggaagtttcataggcatttcagactcagcatatccaaacatgaaattagaatctttcctcacagcccttctttacattcgttatcttaatcatctttgcctcctcctcctcttccttacctccctacacccagtcgagtcctggacaattcttcctcttaaatatattgcagttcctatttccttctsttcatccttactgctgccctagctcaggcccttagcagctttccaactgctttatcacagcggcctctaaactgctctccctgcctgtagtcttgccccttcaaatccattatccacattgctagaagactaagctatctttaaaggaaatctgactctcactccctgtttagaggccttcagcgattccccattgcctacagaagaaataaaatgcagtcccctgaacataacctcctaagacctccaactcctctgtgtttctctctccagccccatcagctgccactccctaatttgtactctctctgttagcagcacagaattactagtagtttctccagcaggccaagctgcctctcacctgtctttgctcatgctgccccctgtctggaatgcccttgttcctgaccccctttaccccaacttgtgctcaccctttcagaattaacttgggaaatgcctctctaaggaagccttcctggctggaccctcccctcggcagccctcagaccctgcactcacttgtgtccttgcctcatcgcacaatggtgtaattatctgtacatatgttggtggcatcctagaaaacagagactgtatcttattcatctctttatccccagtatctagcacagacagggcctagcatattgtgagtactcagtgtcttgggtcaactgttgattaaataatagacaaggggaagggttagaaaagggtagggggaggagtgtttctgtcctacccatcagattaaacttcaccctcacgagcttctctattttttgcacagtgggacccagctcgcctgaatgaatctaccacctttgtgttgggatctcgagccaacaagtaagtttaagagctttggcactgattgaggaaacagctcaggagttcactagtaggactacactttctggaatcttgaccacttggcttttacttttcagagccctggggatggggggcaccagaggaagaatctacatcaagcacccacacctctttaaggtaggtgactgctgggaggaaagcaggccattgcattgggagtagactgggaactccactcagcacagagaagcttagaacaaacactgatcttggagtcaggacatctgggttctagttgtgcctctgccattcacctttccctttcatgatttactcaacacctctgtgcctcagtaataacagctactttgcttgcatgcttactgggtgccaaacacagttttaaatcccacacttatattatcttaaaaaataagtattgccatccttatttcacaaatttgaaacaatcagaggttgagaaaggctgagtgacttgcccacagttattcagctagaaatggtgagtcaggattcaaatccaggtctgtcctcaccaaagcctgagctcttaaccactaccatatttggttgtctgtaaattagagtttgggccaggtgcgtgagctcacacctgtaatcccagcactttgggaggccaaggcgggtggatcacctgaagttgggagttcgagaccagcctgaccaacatggagaaaccctgtctctactaaaaatacaaaattagctggcatggtggctcatgcctataattccagctactcaggaggctgaggcaggagaatcgcttgaacccaggaggcggaggttgtggtgagccgagatcacactgccctcatatttgcattttaaaataactctggggtctggcacagtggctcacgcctgtaatcccagcactttgggaggctgaggctggcggatcacctgaagtcgggagttcgagaccagcctgaccaacatggagaaaccccgtctctactaaaaatacaaaaattagctgggcatgatggcgcrtgcctgttatcccagctattcaggaggctgaggcaggagaatcgcttaaacccaggaggcagaggttgcagtgagccaagatctcaccattgcactccagcctgggcaacagagcaaaactccatctcaaaaaaaaaaaaaaaaaaaatagagtttggagcaaggcagggtcctgtgccttttcaaagagggtactcctcttctgagagcagctatgttttggtccccactgtttgagggaataatggaggaaatcataaactcactcaccctcttagatgattttgtattttatcagtcacgagagcatcgaagtagattagaagaatagcagtgcatgtgtgttccacacatggttttttgcacttatacgtaaggcttggcacctcttgccagaactgcacagccctgtgggatcccagaatcacgggctttctctaccacattctgtgcaagttttcaagttctttgaaakgcatacctgctcacgcttcttctccagtctgatatcctcgagtcccaacacttaaacagtttgcccagtggctcctttgttttcctctcttaatgtcgtcactcttgctattcccattgcctgggtggcctttctctcccacccttatctgcctgactattctttaagatccacctcctccaagagctttgtttgtatcatccccaaaatcaatatgcttttggacctactttgaattcccacttcagcgtggtttaaagtatggcttcaggcctggttccattattttactagctgcatgaacttgaacaaatggctccacatttgtttttcttttytctttttttttaactagctcaagtctgggaattgatccacatttctgagtctgtttttgtcctgtataaaatgagaatagtgatagaccaaccatttttttttttctgagacggagtcttgctctgtcacccaggctggagtgcagtggcgcgatctcagctcaccgcatcctccacctcctgggttcaagcaattgtctgcctcagcctcccgagtagctgggattacaggtgcccaccaccatgcccggctaatttttgtatttttagtagagatggggtttcaccatcttggccaggctgctctcaaactcctgagctcagatgatccacagcctcagcctcccaaagtgctggaattatagacttgagccactgcacctggcccaactttacaaattctctattagtgattataagtatcttttcagtcatttagaatctatttgtatttcttctgtaagctgcctgttatatcttttgcccatttttctctccttcagaaggcattattcaaattcttttccttttttaaatgttttgattatagaaataatatataaacccattcccgtggtaaaaagattcagacgatacacaggaggtagtagagagcaaaacacagtttctcagccaggtgcagtgactcacgcctgtaatcccagcactttgggagcccgaggcaggcgggtcacctgaggtcaggagttcaaggccagcctggccaacatggtgaaaccccatctctactaaaagtacaaaaattagccgggcatggtggtgcactcctgtagtcctagctactctactcgggaggctgaggcaggagaattgcctaaacccaggaggcagaggtttcagtgagccgagatcacgccactgcactccaacctgggcgacagagcaatactctgtctcaaaaaatatatatatcagtttctcttcactcctcgattttttttttaaggtgcttaaattctggtttctaggtgcccaacctagaatagaaaccagaatttaagccttatttgggttgagcacagtagctcatacctgtaatcccaacactttgggagactgagtgggtggatcagttgaggccaggagttcaaaaccagcctggcyaacatggcaaaaccccatctctactaaaaatacaaaaatcagctgggtgtgttggcacgtgcctgtaatcccagctattcaaggctgaagcagaagaatmgcttgaacccaggaggtggaggttgcrgtgagccaagatcatgccactgcactctagtctgaacaacagagcgagacgtcatctcaataaataaataaacagccaggcacggtggctcacacctgtaatcccagcactttgggagcccgaggtgggcagatcacctgaggtcgggagttcaagaccagcctgaccaacatggagaaatcccatctctactaaaaatacaaaattagccgggcgtggtggcgcatgcctgtagtgccagctacttgggaggctgaggcaggagaatcgcttgaacccaggaggcggaggttgtgatgaagcaagatcatgccattgcactccagcctgggcaacaagagtgaaactccgtctcaatcgatcaatcaatcaatcaatcaataaaccaaccaaccttatttgtaactccaaaaccgaattcttaaccatgatgctattatgcgtccgacagtacatgaggtgtcccgatttttgttttattatggtcaccataataattacagacgttataagccacctccgatcattttttaaaaagaggaagctctaaaataatagttatcagtcccaccagttgcccggggtgctttgttgtgagaagggggtggggattgggagtatactaagtctctgggaattgggtcccatggtctgccctcggggttggcttagctttctctgaagagattagtgagccctctaagtccaccacgcttggagacaaggacttttggtaagaactgctcaagggccaagagtatgctctgggaccaaatgagaaaagccccttacccgaggctaattttcttacaacttcattccttacagtatgcagctgacccccaggataagcactggctggctgagcagcatcacatgcgggcaacagggggcaagatggtaagcattattcatttgtgccactgccagtgacccaccccacctgggaaccaggattttggctgtgggtgacagcctacctccaaatctgacttccaaagcctcaccaatgtgtgagaagagagacttataaggcctatttcttcatgctgaagagcaaattgtaatcttcaggttcccttccctatccctaggtctcccttccgccccctcacacttttacctcatgcctccaagatcacatatttggatactattagctgtccataggaatagcaggtataagacacacagtactactttttcccactactgcacccactgacagatttcactcattgatcactcttccaccagacacagctatagaatcttttctcaacacagtacttgaggcagcaacccttgtcagtaggagttagcaatgaaatgtgtttgcacacttggcagccccttccagatttacctctacttraagagttctcagatcatatgaaacagcaaccttaggaaaatcatcattgcatgtgttcaaaaactattgttgagggctttgtccatcacacacaatgtcccccacctgaggactcactcactcccaccacaggtactgctccttttagaatctaagtgccttacaaactgatatgccatctcctttctggcagtgagagctaccttttattttattttactactctatttatgcctatgctttacttcaaaaaagatttcaggtaagcttcatgcacataaaatgcaacattacataaataagaaatagatggtagggggtgggggcaggacctaaaattaagccaccagtaaaagtagttctttaaaaaaaaaaagtgttttttatattgctgacctgggagacctgtgcacttctacagatgttggcaaattcagctgtaggccccactcatggacacctgatctgttatggttcatagtgcccataagatgtagacaaattactcaaggaatacacaattattcctgaccctaacattagaaagtctcccacagaagactttctaatatgatgaatatctcttcctatatgttaagttcacaaaagggccctcacccactgtagaccgaggcattgtgacaaagcatttctacaggccccagtacaatacakgccaattactagacagcagagcagtttatcatgttttccattttgccacaaagttcaaaaccaagttatctttgtcctcagagggagcacatggtttcctcttcctgatttcctgtttccatatatattttgctggctttcttgccattttgttataacccaccttgggtcctttcgtatacttgatcttaaccaaaaggtgtaggagcaatggtggatccctttttttttctttttttcttttttttttttttcttaattttcaccacaccattcaagagagaaatgggtccttttttaaaagagaaggctataaataagtcaccagtccctactctcccatccatgaagcatctactgtagtaaaagattgtctcaaggaaccattcccatccctccccacttactcttccgtactaaattgtaaaccgcatcccccgcttccacctagtagcaggccttacattaaacagatgtttaatgaagtgttactgagttggagtgaaatgaatcaggcaatgaccactctcccttgctcctgcctcaggcctacctcctcatcgaggaggacatccgggaccttgcggccagtgatgattacaggtaaaaccagtgggtctcctgccccttctcctctccctgcctccaaatagcccctagaatgaggcasggcctacatcctcacttcccccaacttctctcttcaatgtctgttccagaggatgcctggatctgaagctagaggaattgaaatcctttgtcctaccctcctggatggtggagaagatgagaaagtatatggagacactacggacagagaatgagcatcgtgctgttgaagcacctccacagacctgaggccgggtcccctggccacacttggcagccctcctccaaagccctcttcctcacgtggctgaggccaccgctgggactgctcctagatggatctcagcggcattaagctgtgcctgagcgagtttgtagtgactcactgcacagcacccccagactagcatgtggttctatatttgtaaagttattgggataagaaacaattaaacagtttgtagtaaacacagatggtgaacctgctgtgccctctaccttgtgggaattgacagaacatcaagggctctagaagtgggtgtaggaaaaaaggacgagataaccctcacccataacagtatagagccaggcttgataagaccaacctgggagcaccatgtaccctgcccgtcttccctttgcccatttgtagtttccttacccagctaatgtaaggacatggcagaatgcgatggagtttgatgacagatcatatgaaaaatagagttggcttttattgctcccattttacaggttaagatactgaaggacccgccccaaggttacacactacccactggggaggtaggatatacaggatatgaacctgtgttgttggggtttttgtttgtttgaagacagtcttgctctgttgcccaggctagagtgcagcctctggctcaagcgattctcccgcctcagcctcgccagtagctgggactacaggctcgtgccacctcaccagccttttttttttttcttttctttttttttttttttcttttaagtagagacaggtctccctatcctgttgctcaggctggtctcgaactcctgggttcaagtgatcctcctgcctgggccttccaaagtgttcgggattacagacgtgagccactgcgaccagcctgaaccaatgttgcctttttttatttctgtcatctctgcggagatgtatggacctatgttttctaatagggagcctgctgctctggccatcagcctttagtttttcccctcgctgggattttcagatacttaggacgcagcaaaggtgcccaggcgattataatggtgggagggtaccagtgctgcaggattggaggcactccctgcccgagggaaattggatcaaggctgggcgtgccgagtgttcccacgcggagtaagacgtgtagccagaaggaggggttcatcccacgtggacgttttcttggccctttaatggttagcgttttccaacggccaccaattcgctacggattcgttagttaatggcagcatcatctaccaatcggttgtcagaagcgggattctgccgcccaatagcggtgcgccagtgggtaggtctagcagtggcgcagcaatagagcgctccggagcgtctcattggctggatcaaacccaagcgagccattgattggtcgacgcccccagagggttacaattcaaacgcgggcgggcgggcccgcagtcctgcagttgcagtcgtgttctccgagttcctgtctctctgccaacgccgcccggatggcttcccaaaaccgcgacccagccgccactagcgtcgccgccgcccgtaaaggagctgagccgagcgggggcgccgcccggggtccggtgggcaaaaggtgagtgatgcggcctaccactcgccgggcctgccatgccctaggcattggtacccagagcaaagatttctaggaccaccccccgccgccacctcctggagcgggagatctgcgggtgcaggagaacacaccaggagctcggggcctggcattcccctgggcatgggtgtcgagggcggagacttccgggactcccacctccttgcgcgggtgagattcgagagatgggggacaggccaggagctcagaccgctctttgagactctcccgaaggagaatgggagggtaggggcgctgccagactccttccctggtgggcctagatgaagacgctcaaggaccctcgtgacttggccgagacaggggaagggagaagttgagtcgggcaaggaagagatgctaaagcctggggaattaagaacatgccagaatcatcccgagggagtctggaattagggagggtgaggactcgctaggatcgtcctgtggatctggtgagtataccctgagctgagcctgaccttggtgatgtggggagcctccatgacggctccccctgagattcaggtgggagaagatgcaccgtctggaggcctggcccatccagactcccaggtaaccccgaatactcttttttcaggctacagcaggagctgatgaccctcatggtgagtgattaagtgcccagaaccccagccttccatccaattttcagtagcctccttttttccgtcagcttttttgctagacataggggtaatgtaatttgctccctcctgggaaagaagttcatacaccccacctacaccatttcttccagcagtccctcctcccaattccatccccccacacgaagttatctcgaacacttccctgaagtcatacaagactctccctatccagtgtgtccctacttcctagccccaaccaagctttacccacacccaactccccgcccttcttggtatttctagcctatgaatttggttgctttattttggatcagagtgatgagattaaggggaggctgggcgcggtagctcacaccttataatcccaacactttggggggctaaggtgggcggatcacttgaggtcaggagttcgagaccagcctggccaacattgcaaaaccctgtctctactaaaaatacaaaaattatccaggcatggtggtgcatgcctgtaatttcagctactcgggaggctgaggcacaagaatcatttgaaccgtggagacagaggttgcggtgagccgagcgcaccactgcactctagcctgggcgacagagtgtgtgtgtgtgtctgtctctgtctatctctctctctcaatctctctctctctctctctctctatatatatatatgtaaatatatattttttagtagagatggcataaccccatctatatctcatatatatacacatatatatgtgtgtgtgtatacatatatatgtgtgtgtgtgtatgtgggcatatatatatatatatatatataaaattaaggggaaagctcacccactgacctttgctatgcccaaaagtgtactccacattccaacaaatgtgttttctccccagatgtctggcgataaagggatttctgccttccctgaatcagacaaccttttcaaatgggtagggaccatccatggagcagctggaacagtaagtgtagggctgggatgggtgagtgagtctggggaaaggtgggaagtgagatccaagtgcgagctctgcttcaagcctttggcggagcaagacactcctcctgtgactgtttacattctctgagccatgtggccttgttctttccctctgtgcaataaagggtgggtttaaagcagggctgcctatcttagatgtttacatggggggacagacagcaaggaaatggatgaagtgaggactttggccaatagggccagatctcaagaaggcagcttcccattgctgcagatcaggtttaagatgagtcagaagtccaaatctgtgccaaatctaatttttacgtattagcaactaatattcttttttttttttttttgagacggagtctcgctctgtcgcccaggccagactgcggactgcagtggcgcaatctcggctcactgcaagctccgcttcccgggttcacgccattctcctgcctcagcctcccgagtagctgggactacaggcgcccgccaccacgcccggctaattttttgtatttttagtagagacggggtttcaccttgttagccaggatggtctcgatctcctgacctcaagatccacccgcctcggcctcccaaagtgctgggattacaggcgtgagccaccgcgcccggccagcaactaatattctaattgaactaaagcacaggatgccaatttacaatccttagaccaaagagtcactgatgtctccaccagataagaggaaagcatcaggctaggcatagtggctcacacctgtaatctcagcactttgggaggctgaggcaggcagatcacatgagcccaggagtttgagactggcctgggcaacatggtgaaaccctgtctctaaaataaaaactaaactaaaaaaactttttaaaaaggcagtggggagcatcagaaccagctcaacagtttgtctactgtccggtcccagagaaactcaagattctagcaagccccttgtgtggggcttgggttgggacatgaggctgctgctggagcttactctgcaactgtttctccaaatgccaggtatatgaagacctgaggtataagctctcgctagagttccccagtggctacccttacaatgcgcccacagtgaagttcctcacgccctgctatcaccccaacgtggacacccagggtaacatatgcctggacatcctgaaggaaaagtggtctgccctgtatgatgtcaggaccattctgctctccatccagagccttctaggaggtgactttagagaccacccctcccctccatgcaacttgggaacctgtcaggactccctggggtcagcctcttctaccgccttgaccttctctttctctccacccacagaacccaacattgatagtcccttgaacacacatgctgccgagctctggaaaaaccccacaggtgagtcctcagtccttgagcccagggtgatccctcccccaaccttcaaaggctccctcaaacaaaaggagcccagtgacttgggaccgggttggttggggcagggtggagtgtcggcagcaacccacttctgtttctgccccagtgctcctatttgctataaaatagcaattgttttatagcagaataaaaatgtttggcgataaataattttgggaaattattggtgagaccaaggcaggaggatagcttgaggccaggaattcagtagagtgccttgcctgtgccctccagtctcactggaagcaagcccttccaggagagctgcctagatgggcagtgcagggagaatgccgggctgggaaaccagcccctcctccacctcctccgacctttgcatccctggtccagctgcctcttgcccaccttaattcatcctgggccaggcacagtggctcatgcctgtaatcctagcacttggggaggccgaggtgggtggatcacatgaggtcaggagtttgagaccagcctggccaacatggtgaaaccccgtctctactaaatacaaaaaaaattaaccgggtatggtggtaggcacctgtagtcccagctactcaggaggctgaggcaagagaatcacttgaatctaggaagcagaggttgcagtgagcagacatcatgctattgcactccagcttggtcaacagagtgagactccatctcaaaaataataaatagtaaagattaactcatcctgtctccatcactcactgagacctgcctgttctcttccagcttttaagaagtacctgcaagaaacctactcaaagcaggtcaccagccaggagccctgacccaggctgcccagcctgtccttgtgtcgtctttttaatttttccttagatggtctgtcctttttgtgatttctgtataggactctttatcttgagctgtggtatttttgttttgtttttgtcttttaaattaagcctcggttgagcccttgtatattaaataaatgcatttttgtccttttttagacaagttgttgcgttgtaatttcactagggttggaggtactcagggtaggcagaggtggaacttaaggatgtggggccaagcaatggggtgacaaagatttattcccttgtaccttattttatgactctgcatctgtttcttcatctataaaatgagtgtcacaataatgcctcctgtctatggagtcggtgatgtgtaccagcaatgttagtgaatgttggagctccctcagctgtgttgcagatgaggctgagccagaccttaggctgaaacctactcctatagctgtagaaggaacaagcgtgtgtgttgggggggggatcccaacacacagccacccatgttctgtcctgaagaagaatgcttaggtcaccctaagcaggtccagggcctggggagacagccaggaaaaaagccccttccctggcaggactcaggtctgagctctggtctccaggctctagcccaggtccccggtg

SEQ ID NO: 98073 - DNA, 21942 bp, Homo sapiens
ggtgaaatatattattagtagtatattttccaaaatgattttattgtagtatgaactgataagtgagtcccgtgtccaagagactgtatttattactcttaaacacgctattccaaatgatattactactataaacaaagaatattaccggtctcagcaatcagtgatctttataaaagtacttttaaaaaatgatgaattatcaccaggcgctgtggctcacgcctgtaatcccagcactttgggaggccgaggcgggcggatcacgaggtcaggagatcaagaccatcctggctaacacggtgaaaccctgtctctactaaaaatacaaaaaattagccaggcgtggtggcaggtgcctgtaatcccagctacttgggaggctgaggcaggagaatggcgtgaacccaggaggcagagctggcagtgagctgagatcgcaccactgcactccagcctgggcgacacagctagactccgtctcaaaaaaaaaaaaagatgaagtatcaacatcagttcccagccagtctgcttggacacactggggtgccacaagtgggttgcaggttggttgcagacgggcagagatggattctgctgagctttcagagtgaccactggctggggcctagcgctggggcaaggttccagctggctgcctctagcctggaggagcttcatctagttacccaatgtgctgaaccaacagcatgaaatagcatcatttcctgtgctgtgttacaaagtgcaaacgtttggaaacactgatacagtacaattatttccatcactccatgttgttataatttttagttacttttcttgattgaaaagtcaatcacattgccaaaaatgatttttatgtcagttaaaggccagttgaaatttttttattaggatgttttaaatttacttttcactttcttgaatttttttcttctcaaatttccttggcccagtgcccatgagcaaatttcattcaaaaacaggaataaccttttgtcataaaattttggcaccagcttggtatactaaattactgcaaagataactgagtaccagaagtaaaaatctctgcaggtgggcttaggagtactcttgggtccctggttcctcagttgccaactctggtttcatgaagaaagaccatgctctgaaaatctagggaggagaaagttattgcagcacctggtgtgatttgttacaacttctttaaagacagcctgcctggctagctttttcctgttttcatgcagtttgccctcccagcattggtccacctgttgttcccaagaaactcattcttgttcccaagactccttttagccaaatctttcctatcattccaggacttttttgtgcttctctccccatgaatctacccgtgcctagggtgtgtgccaggcacgtggcaggtggccagtcagcatctggatgtgagaccaattattccagcctgccctcctctttctctttttatcattttgtattatttttgagacagggtctcgctttgttgcccaggctggagtgcagtggtgctctcatagctcactgcagcctcgatctctggcctcaagcaatcctcctgcctcagcctcccaaagtgctgggattataggtgtgtgccaccatgtccagccccctttctctctcttaactccctctccctgctgtcgttgccatactcttgcatacacaatcggttgtctagtttttgattgtttgtgtgtatggtgtgtgctgtctctctgaccagatttcaggttcctgaggcgagcctgcagctcatactgctcatctgtcctctcctatggtgggtgctcagggcctctcactgttagttactccctcctttctgcccagttctgcactcaactagtagaagcagccatcctttccccaagcaggaaattgtagtggtcgcccttaagagcagtgtgagggcagaagattaagggaggggaagagtccctggaactggaagaaggtaaatactttgccttgagagggcgccgaatcattttaccaaaatagtaaatggaaaaagtgtcaaaggttgggactagttttaaaaacacatatagccagtagacacatgggggctgtttaaataaaaacatttttttacccggttctgccatcacacacactagtgacattccaagtactcagtggccatgtggagctagtggccaccacacttgacaccacggatgcagaacttttccatcactgcagaaagctctgttgaacagtactgtgtccagagtgctaattatgaacagcttagaaaccacaattaatacattctcatgaggttaaaagcagacatgggaatagaacataatgcaaatgatgatgaatattttgggtgagaagagaaagctgaggacccatttctaggattctaagatgtaagatttcttaagttctttatcttagtctcatgcattctccacatcacgcgctgtaccatactgtgtagtcagaacagacagtgtgattgaaaagctttggaaaaagttaacacaaaggattatttagcacataggctgtagatacgtatgtgtgtatttgttcaacaattggagatggttgaatacccttgaacaaagtgtgtatcttctcaaatcagtggttgcactagtcaataattagaaggtgttgttatttttaaaactataagcaaaattatgaaggcctttaaaaaatctatcataataatgaaaaagaggttgtctcccaacagtgctgtccctcaaagaaaagactggttatgtggaaacagcacgtttggagagattattctagtgaataacagtgtatatttgtggtaggcaaatttctaagaatgacccctactgacacccccaccaatgaccttgtataatatcctcccactttgagcatgggtggaacctgtttgatccatgattatatcatgttatgtagcaaaaggaagactgtctgggggtggctaatcaaatcttgtgactcctttaaaagcagagagttttctcgggctggtggcagaagtcaagagacaaagcagaaggacctcaggcaccattgctgttttaaggtagagggggctgcatgagaaggaatgcacatggctttgaggagctgagagaggccttggctaacagcaaaggagctgggaactgcagtcctacagccacgggaactgaattcagcccataagctcattcataggcttggaaaggcattcatctccagtctccagataagacccagcctggccaacactttgaatccagccttgtgagaccctaagccgagaactcacttaagcctgcttggacttctgacctacagaactatgagataataaatcagtggtgttttaagctgctaaatttgtggcaatttgttatgtaggaataggaaatgaatacagtattttaaaagaggtaaagaggaaatcttcatacttgattccctgtagtatgctggatatttcttggtaaatgcatgaataaagtctttagtagcaagtcatgtacctggaccttgttggggatgttctcgccagagatctcaattagtcttcattggacgtttgttggcaaagttgcagcatcttactgagtagcgtttggtaaaggaactgctagaatgagactataggaataggactgaaacagtgtgtaagggatcttttttatttctagaagaggtgttactttatactgatttagactgctctgagcctgtcagaagtaaattcaagaatgattaacagtggtattttagatacattaagagcaaaaataacctttgccttgtagagatcagataatctgtgtatcgagggatttaattttttttaaccaaaacttagtttctctttttatcatctagcacagatcaaatcctgtatgggccagccaaatgtttgtagtttgagaatgttttgcaaatacctctctgcttccaagccattaatagctaatgaagttttattttggtttgtccattaatttttctgcttatttttactgtattgccatgtccttgatacgagacaagtagaactaaaagagagaaaatgagaggttaagactgtcagaagatgagaaatgtgagtcataaccataccttagtgttttaagggaactttatccagtccaatccctttatagaaaaggaacttttccaagttatgttgcagtatttatagtgtgtaaaattttgtttgactttggtagttgtgcattttaaattatgaatcttatatgctacgataactagtatgcttactttctttaatgcatgtgatcatacaatgctaaaaaggtattttttaaagacccaaccaaactgaggattttgttatacatatctgtatcaacacctatatataaactcttcttcttacctgaaacactccttcacccggtttgggcactaactagatcattttcaaaggaacaaacaggaaggagcaagctggcactccagggtgcatctgagctgagaatttagaagacctcattcaagaaagtaaactgagcattgatgggaaagcactttgcgcgaagtaacattcccactgttaatgttgcagtcaaaattgtggaaaaaaaaaagtggtgctaaaattgttctgaaatgaagattgtttgttgtggggaatattttaatactcttggactttagggaggctattttatgtgtcacttgctcctagttgtttcattgtattagtaattagcaaactgtcctggaaccaagggtttggtacttttgcctgattagcattccattatttatttgaaatgctcagtgtttgctcaaatttggtgaaaatatcttttgaagacatattctctgagccttaaaaatggctgctatcgacagtactgtaagatgcactgccagtagatttgatacttttcatttcagtgtaggcagtaatgttttctaagaaagatttagaaatcagcaaagtgtaacaattgtgtttcatttatggaatggaaaaactgaagtgtcccattcagaacactttggaaaggttgtctgcattaggggatgtttctggaagcatcccttagagaagctgcctgaggaatctccttgccaggttgtaccagatttttttttttcttaaatgtattgtatatattttccttaaaatgtcttcattggctgaatgattcctatccgtagtaatattttaggtacttgttggatttttaaaggaagattatttattttcagatttgctgctataattgaaaacctagtaactggtcctgttgattgtgccttcatcactgtttctctgtgccacgaccgttcatgtgtatttgaaataaagaagtttaaaaagccatgttgaattcaagattccttctaataaaaataggtgaaacttaatgagtagtattttattattaactttgttaacactgagacaatactagttatccattttcagttagaaaaaggagtggatcctctattgggttttgtaaagtctctaaagaaaggggaaaaaaaagccctactgttaagacagtgatgaccaatattatgctgatgttcactttattatatgtactatacagttcctaaaataagagtagctacctgggcctctttgatctaaaatatttaggggctataagtaagtttttaatgtagaaaatgctgctaatgatgcttagggcctgaagtacagtgactcccgtttgactgacactacaggtttatagaggattccgaaggttagaagggatcttgtggcttatgtaagtaagtatttaaaatacagctaattagaaatggagattatgcatctttgtcaataggagagcgatggggctgtatgattattcccttgttctccaactagatgatactctttcaaaaataattcatattgttttatgtttatgttttccccatgccattagcattttacatgtagctcttacatttgcaaatattagagtgaacacacatgctttagtttaaaaaatatttattatagaaatgtacatttaattagttttaaggaatgtacctgaccacagtgttaatatatatttcttcaaatttgcaaactttacacctttaagatatctacaaagatgatartttatttacaagttttacaagaaatgatcacttcacaatactgttgacacagttaykattgaatcttcttctcactttttatttcactctgtacttatagaaagaacagagagtatgggtgaagttccatcccagtgccagggaaagcccgtagagcagaatcagaggtgcaaatggatacagaagaattactgtatttttcaaaaatggcaatgctggaaaagaaaggaatccaaactgatttwaaaaaaaaaaaaaaataaatgactaataaatgaacattttgaaagacagcttacttcaacatgtggggtggaagggaatgcatattttgaatcagtaagatgatgctatttatgcccagaactagactactcttcccaacccctctgtgctgtttcctccttgtctagggctgggaagaaacctaggagaggaattatttcagcacagaggctgagtgggacatcatacactggaccaagagaggttaacaatgagggagaaatgtcacaaatattcatgaaaacagtggtgaatttaaacttgtgactgcctcagaaacctctaggagtccaacttaaagtacagagatggatggcgttataggaaaacatcttttagctatttgagattttccagtgtaaagcattatacccccactttaagagggtgtgagctcaactagtagcccaggcttcagaaaagaactgaaactcttaaatataaaagtctggctccaaatattgatgtttcttgctcactgcttagttagcgggaccctaccccatgcatcccgacctaagtatttctcatataggaagttcttaaacaaactgagctgtactccaactattctaagtggtataggtcgttaccaggagtgttcaaataaccacttagagaaaccacagtgctgcagtgttctcatcacaaaacactttcaaaattcrttagaaatgacacaaacatctcccctggactagagaaagcactccccaaacaaggcattacaatgaaggggttaagtgttccctgacaaaccagccaaggggggagagaaccrgggtgggaataactccggagccaggcatagtcagagccatctgtatttacagttaggccctaatcatctacagtaacaggaaaggaaggggtaagaaacgtacagcgcagtctctagattttatttggctttatttaatgggatcatttcttaacataaatgaaaaataatatatgttcctcattcatattaagaaaaatgaactgacaacaggatttaacagtaaatctgcaaacatgtcctgaggacaataaatgttgggcccgatcttctgtgattgtctacagaaccatacggtaatcatgaaaactaagaatggggcaaaaagttatgattcaaaaggctttagagaacttcagttcatagacctatgtaacaagatgctgggccccacctttcttcgctctaccctcctgctggtaacccacaacctgaaagcatgggagaagaggagtgaatggtcttggattcctgcaagtcatctggagataaccagtatggtttaacatgtttccttgaaagtataaaatctgttatataccagctaggccattttctagctgcatgaccatgggtaagttgcttaatctctctgcctcagtttcctcatttgaaaacagaaacaaacctgtgtaattgtcatgaagattaaatgagataatgcacataaaatacttaggatagtgcctgtaagtgttccataaaagcagctgtttgtactactgttacaactttccccctcttgcyatgttctcaaccaaaaacatttaaaaaaattacttaccactgtatcccaggaaagttacatagatataatagccaactgcaaccaaccataaggtatttccaactaaatatccaataaatgtgtctgtcaggataacatctgccagaagagacgcagaccrtgagtccctttaccaatgcatgcaatgaagacttggataatactctaattaactgctacttacggttgatgaaaaaaagctggataaaatgcaaaatgaccaggagtggataaaaagcattgagatgcacatcaaaagcatagccccattccacatcatagtctctgctctgtcgtttcactaaatacttgttagagatgaacctaagagcaaaattaaaatttctttcataataaaatgaattctgtaaatgtttactgacgactttctatgcggcagacattctaaattctggagatataccagtaaacaaaacagacaaaaatccctgccttccatctaggaaggaaggctgacaatgatacacctatgtcagatggtattatggaaagagagaaagcagcagagaaatgtggagaatacaaacttgagatgcaattgtacatatgagggtcrtaaagtaacatttgggtaaagacccaaggatagtgatggtgcctggcaggcctgaggaatggtgaaaagaccagtgtctgaaagaaaaggagcaagaaatgaagycagaaaagaaacagggttgggcccaacatcaagtcacacaggctccatgtcttacgaagcctgtggccgttttacaatctttggcttttattcctggtgacgtgagaagccactgtggagttctgagaaaagtatttgacttaaatgccttgacagagcctccctggtggcggatctgagaacagactccagagacaagactggcagcagagaccagttagaaggctactgcaaggaagagatgagcagaggggctggtggcagtggaggtgctaagatgtggcacacacgatactctgaaggtagagctcctgacattattggattggagtatgagaaaaaaatactcaaggatgactgagagatttctgccttgaacaaatggaagatggagctgcctttaattgaggtggggctggctgtgggaagagtggttttgaggtgggaaggagtgtgcggaagtttgaatttggacctgttatgttgaagatgccaactagtatggagtaagaagttgtatacaatgtctagagtttagaagacaagtccaaactggaaatataaactcatcagtgtgtagatgatattaatatttaaagccacgggcctgaatgatgtcaccaaaaaaatgaatgtggataatgaacaggcccaaggcccaagacctgggtcaaccccctattaaaaggaggatgaaatagtaagaagcagttaggaagagtgacgcatccagccataagaacaattattcaagtgtatgtcactgttctacaacatggcctactagtttttcagttcaatgatgaataaaaagtaaaatatccaagtaacagaaaagtaagatcttcaaagaacaaaacttgtattataaacatatattggaaattcaatgtattttttaatgtattatttcatttcatctcaagggtacaattaagaatacgctattccgtcactggggataaaaatggaaaataaacagaggtacaatactaatgttaacagtccctgcatttcgttatctgaaaatgccaaaacaatactgaacaaactagagcttaccaagacagtttcctttttagccaagaatgtgtgccattcaaattttatggaatcagtatgtagctcgctccccaagagcgccctttctgtagacgttctctgctgcccctattctcccgcttatcccaaatgggcgcttttcaagcttctggcctcagtgagagtctttcctctgaaagacagatgtgccttccgagagcactccaaggcactgtggttttcacctcccagctccatattaacgccagtcagaggctcatcatggcccagactcttgcctctaggtctagagtcatcaacctcagtgtctactgaccttcttttcactcttcaggaagctccctgaactcaacaggccagcaagggctgcttcatctgcatctgctgcttcctcagtcatctaagccaaaatcttacaggtcatcccaaaggagcctcccacccactccctcttcctgatcccccctcataccttgttatctcaggaagctctcgaatccatctctcctctctattcctatcaccaccatactatctgggcctcctctactcctacgcagacctctgcaagtgtatccagccttgcccactcactactccaacttttgcctcctccactgccatggaaaagatagtgtgagtttgacattatttccttactttaaagcctcaaagctccccacctccttttgcccccaacccacacatgcagtctatgagataaagtccaatttttttcctgaatggcatgaaggccaatttctctagtcacatctcttccccagtgactcggtgtcaccctatgctcccagacctagtgtgctgttcacacctctatgccattgcacttgcaattcccagcaccaggagtcaactattccccatctccacaaaccaccaccttatgctggcttctgtagctcctctgtgatggtcatcattacatgtagtcatttctctttctagttcctcacacaacataggttctcaaaaatacactgaatccctttctatttaattcaaactatgatacagactcacatgaaatgtgctaaactccaggctgatttggtccccttctgtgcctgatattgtttggctgtgtccccaaaatctcatcttgaacagcaatccccagaatccccacgtgtcaagggtggggccagatggacgtaatttcccccatgctgttctcgtgatagtcagtgagtctcacaagatctgatggttttataagcatttggcatttcccccacttgtactcactccatcccgccaccctgtgaggaaggtgcctgcttctcctttgccttctgccatgattataagtttcctgaggcctccctagcaatgcagaactgtgagtcaattaaacctttttcctttataaattacccagtctcagatatttctttatagcagcattgagaacagactaagacagtggcctccagaattactgcattcagggcagaatgcttgttatgaatgaaactattcctttgaaagtcttatttattgaaattttaaaacacaccatttgtttttcatgaatttcttggtaatgaatacgtgacttacattagtattaattctaggccagattttagaattttatattaacagtggacagcatttattggctaactagcacatacaaaagctctgctgtactagtcagaagttacaaaggaaaatacaggcatatgtcattttaccacactgcactgtactgcgcttcacagaaactgtagtttttaaatttttacgtattgaaggtttgtggcaactgtgtccagcaagtctgcctgtgccatttttccagcagcatatgcccacttcatgtctctgtgtcagcatttttaagcaataaagcattttaaattagtctgtacattgttttttagagccatagtgctattgtacacttaaaagactacagtacagtgtaaatatgattttaatatgcactgggaaccaacacatctgtgtgactcagtttattgtgatatttgctttactgcagtatctggaatggaactagcatatctgaactatgcctgtaaaagggtggtattggctgggcgcggtggctcacgcctgtaatcccagcactttgggaggctgaggcgggaggatcacctgaggtcaggagtttgagaccagcctggccaaatggcaaaaccctgtctctactaaaagtatgaaaattagccaagtgtggtggtgtgtgcctgtaatcccagctactcagaaggctgaggcaggagattcgcttgaacccgggaggcggaggttgcagtgagctgagatcacaccattgcactccagcctgggtgacagagtgggacttcgtctcaaagaaaaaaaaaaaaaggctggtatcagaagttatagttgcagagttttgcttaaaatattagtaactaccaaatattgaacacttaactgtgtcaggtaattttcataacataattatctcaaaaattggacagaataggtaattaactagattttgtaaaagaagagactgggactaagagtttcacagataactaagttggcatttgaacccaggtctctctgcaactaaaatgttctccacaatgaccaccatgtctacccaaccactggtcctctactgagatcgctagccacatcccctgcccttcatccagcatgccaaccacacaggaggactttaccaaacaccagatttatcctcagtacactgctgttgctaaatcaaccaaagtcagactgagaacccttctgataaagcccgtgtgtgtgtgtggcggtsggggggcggggggggcggagggtgtgtgtgtatgagagaaagagagagaattttattctcagtaggaaggcatgagaagtttaaaaaaaaaatccttctttttcaagtatacttcatttaatgcaaagattcaaagtaagactccacaaaataaccctttagatctaaatggatttaaacacaatgaatatcaagaagtggtctctattgacaaatgcagaaaaccatgctatcatccagacaacttaagcagaactggctaaatctgtaatatttttgcaaaaccaggcattttgttagtatgcagaaaataaatctcgggaccccaaaatcactaagccaaagggaaaagtcaagctggtaactgtgtcaggcaaacttgcctcctattttattcctaagatagcttatctttacaggtgtgggacagaaagtcctccttctactcacctgagacaagtgtttatctgattgcttcctctgccccattgtttatgtaaaaatgcagactcactgagccagattaaggcataaatgactattcctgtacctgcctctcacaagtaaattgtgtattcagtgaaaggcagatcaaagactcaaaagaatgcaaccatttgtctcttatctaactgtaacctgcctttccccactttctggattaaaacaatgtacattttacacatattgactgatgtctcaagtctccctaaaatgtataagagcaagctgtgccccgaccaccttgggcacatgtcatcaggacctcctaaggctgtgtcacaggcatgtccttaactttggcaaactaaactttctaaattgagaccgatctcagatattttgggttcaaaacataattatttcaattatttgctacatttgacaatattataaaccagcctttatagtattttctgatataggtggcaacacaggagggaaaattgtaataatcttggcagtcaaaattgatcatttagtaactctacctgggtttcaatttccatctgctgctattgtacctctgaagcaaacaaatggagatgctacagcagtatctgaaaaaccaaagttatggtacttaccacattaaagttgctatcagaagaccaacgcctacacaatctatgagtacaacccaaaggagaagctttattgtctcaaagaatcccatgtccagcacaaagccaaatcctatagtggacactgaaagaaagattcacaagattcatttagggactctgctaggttctggaaatacaggacacatcccttgccctccagatgcccaggctagtgggagagacagrtctttaaacaaaactcccaagatgtgtgaacactaccttgggacacagcgtggccactgagagagttgaagtttcctgaggtgggcccttgccaggctgattcaccacggtggcctcagtatttagaacgccagtgtagagaaggcactaacatagtttaagtccagttaaggtgcaaaacaccctataaacttcaatatcttacccacttcaacaccctacaggtaaatgagacccttgcattatggaattggagaacttcagtttctcaggttcccatcaatacctttacaattctcactgtggatttgcctgtgaaatgcaatttccagtttcatattcctattcacagtcagctgacatttgggtaccgattcaagtacttaaaaagatatggagtgaatcttgtcccctgcttttcaatgtcctagggtaacagtttactctggcatctgcttgggacctgtagaaccaagactacaactttctttcctgtgagattttttgaggcttcagtaaaaaggagaaatagtttccaatatttccagattctgacccacaacacatttataacaaaaaatctaatcagaaacactcagcgttcaattctatctcagataaacacacttaccacagagccagatacttaacaggaccaagaaagcagggtcatctctggcccactggtccttcgtctgttttcgataatgaaaatttctgtaaactctctgtggggatgtgaacaggtagagcatctgccaggcagcaaattcaaagtccatttgccgaaagcggaaaagccttctcagatatttgtagcgtttcgctccggctgtgtgtcttgccgcatccctggaattcaagactccgttcccctgcactaaggaattcactgaagtactcggtaacatcttcctagatggaagaaaaacatttcttttacacgtattctgaagaaacwtttggctaccgacactcctcttctgagttatttggcagggaggtcactttccatgttcttcccaaccctagagaaaggccaggagtcaaaagcaaatgcagttagttctgaggcgggtcttggggcttgggaaccgcagactgcaacctcargcaagggcaacagcccacccttctgaatcacctaataacacttatccaggggcagctaccattacagagacagggatgatgtgactgccccatgactccgaggatagtgatagagccaagattggaaatctgactcgaaattccgtgctcttaaccaccaagcttttaagaaaatgcctaagaaagcagtttcagccggttagaacagtgttactgaagaggtcaaataaatggcctattcacacagatccatcagcgcactgccagcaagcttctcggtcactagaatgagattaaaaaaccaagaaaaactccgatccctagtgttttacatccggaatagttcagcagagggagcggtagcgtcggagtccartccaaccggtccgagctccggggaacgccggccactgcccggctgcccgtctcccctccacttcgcaggccccccagacgccggcagggtctggccgagcccagctgctccctccctgcccggggccgcgggtacggctgccagatttagcaaataaaaacacagaatacccagctccatttggatttcagacaggccacgaataaggttttagtatgcctacatcccacgcaacatttcggacatgcttatactaaatgctctttctttatctacgatgcaaatgtaactgggcgtcctttcattttagccgcaactctatcgccggccgaggggccggacgccgacatggtcactgccaggccgcagcgacgtcaggccgcaagctgtcgggattaaatggcccccggcgcgagcccgggccgcgggagggcagagtggtcctcaggcctcacctggagtcctgctacagcctcracycacgtccgaaccagcccaccacctcctcccagcagccgaccccagccgccaccgggcgggcttcccttccctcaacggagccggcccttggggcgcgccgcgtcacgggaaccgacttccgccgcggacgcgccacctctcggcccccgtagtcctcggccctaccgccgcggcccgccggaagttgttgccgctggcttccggtcccctgagactggggcctcgctcgctcccgacccggttgcaagtgttgcggtgggagaaagtcgcgtccgcatcggaggggaagcgccgtcatgcctaagtattatgaggacaagccgcagggcggcgcgtgcgcgggcctgaaggaggacctgggcgcgtgtctgctgcagtcggactgtgtggtccaggtagcgcggccgggcgctcccggtggtgacgacccctgtcccaggcaggcctggctcggcggagggcagcgggtcgcccgcggcggcggttggagttaaccatcccgggcgtaggtcacagctcgggctcactgaacgtgcgcagatccactgagctgtcggagccccagttccctgtggggttaaatcggagataacgataaacgcaccctgtcgggtttttgtaaaggttaacccatttcagttcacgaagcctttattgaatgctagcactctactaggctttggagacataaaggagaataagccaggtttcttgcctgcctagaaatgataatctgtagaattaatgattccagagagttgcgtaaacctggtacactgccctggccagtagtgtctcctgcctgttcagttgtgacaatgtgtgctcagtttgacttgtgttgatgtgaatttgtttctgagttacagttctctgcattcttggatgttaagttgtaaaaataaggcaactccatattttcacgatttcgtatcttgcttcccctacactcttccttcactccccggctacagacacaggtctcctcagcaccctcttggaatgcactgaaacatgtagtgaggttcacagtggacctgagttctggattagagctcaagtaaagcacaagtgccttttccaattgcagaggcccgacgagagggcattcaattgtgtgcaattgtctttgcattgggggatgtagtttcagaaagttgctgttatttcagagaaaagattacccccaaatggacatccactgtaagactgtaccagtgtttctaccgagtcacaatttgtttggttcactgattttagcagtcagccattctcgcctcccaatgtctagtaaaacttgagttattataaatttaagagattatctcgcccaacttccttatataaatgaggaaactgaagtaccgttgttttcaggctcccctgtccagggctgtgtcccttctgccccttactcactggtgctgccgttcagccagctcctggtaaatgcctcttaagtggcaggcatggtacctgacactggtgataacgaagatgaatcagtaacagtcactacccatgtaagcttggtgtcatgggagaaatagacatctaagggtctaaattcctgccataagactgtaagcatttattaaacatgtgtttaatgactagatcttgaggagaaaaatgcgttagcccaagggagagcgtctgattttgcttcagaatttggaatcttctgagatgacatttgagctgagtcttaaaagttgagtagtagtttatcaagtaaaggagtgggaactgttgtggttgtggggaaaatctgaaagaacagcaagtgcagaggcagggagatgtgggagggcgcagaggagctagtgtcctgccataggggaatgcgacagaaggcctgaggggaaggttgcagccaggtgtgaaggcctgtatgtgtgtcagagtgaggagactggattttatccagacgttcagcatcggaaggccatgttgatgagtagtcaagggaagaaagtacactgagtaggactgaggaaagaaactccaagtggaggacaatagcagcagcacagagaattccaagctggctttctgcagcggttgatacagcaaacatgtacggagcgccaggctccagttcagggaacaaatactgatgaatggaacatggtctctccagtatagaaagcggagctgtttggctagaatgctgtaggcagagattatggttgggacagctggtacagactttgcttttcccgccattgaatatgtggccttaccagtgctcagtttggtcagccagaaaacgtgatgcttataagcagttctttagatggaagttcgtatacagtttgtgttaaattcattctgaatgctgacttcagctggattgtaaaagggcaatagtgaggaggtttgcaggtccagaacaatctcctacaatctgttggcagctactgcccactgctcctcactggggactctgaaagaccaaggaaagctctgctgaggtctgtgcttgctctgtgtggcaaccttaattatgatggaaatttttgatttcttaagttcttgaataaaaaggttaatctgatcctatggcaggttggtgctgtagtctcttcttgccagtctttaacccacctgaaacctgcagcacctcgctctagggaggaattcaacataaacatgtatttagttctaggtgctgctttgggagactgtcaaggagttagagggcctcagagaaactcagggtaatggtaaggatgtaaattccagtggggctggaggaaagcagggaaaaagcagattcaaaaggcatctcttgaagagacttcttaggatttaatgactcctggatgatcaggacaatgaaactctgccagaggaacttcactcatcatagggtatcttcgtctccactaacagcttccagatccactgactcttcatcagaatcacctagaagtggtgtggctttttaaaagtacagattccactgctgccctcaccctacccccaataagttaaaagtttctttcctaggttggttttgggcacagccatgtttgagagcactgactgatcttgacctcagaaggcaaaaaagcttgggagtgtattagttagaatatagattcaagtgcatgttacagagacccagaataatagtggcttaaacgagatagagaactttctcttttgtccttgtgcctataatcagggcctagtcatttccctcagtcttccatgaacacagacactgttgatcttgtgactctgtgctgtgaaaataggaaaatatagcaagtagggtgttactctcatattcatggtccaagactggtttgcttccacatcatcaggcccggcaaccttatggagtgaagtgaggaaaggggcaagcctctttaaggaccaacccagaagttctacacctgtttcccacacattccagtggctagaacttagtcacaggaccacagctagatgcaagggcgtctaggagatctcacccagccatatgctggataaaaaggaagagcagacagctagcagtctgttatttggggtggagtggataacgaatgactgtctcttagctttagtgtatctagatggatctttaccccaggcagttgacaatataggttgaaagcttttgaaaaaggtagcatcttagatacagtttgaagaggcatcagcttataaactatagttataaccttttatatggttagtcttcttttgtctgcctccacgtcgttcatgtgggcaacacatcccaccagcagaattgcagagtttggagaggaaggaaacctgctactcttatccacttttgagagtcactgaggtagatgacatttgatatctaggacccaggcagacatacagactggaaggtggccaagactcctggggaacaggaataccacagacatagtaccctgtagcttttcataggaaaaactggcagagcgtgcctggcacttgcaacataaaggttctggggagtggctgcagtgatgcggctgtagagtcaaaatctgcttgagggaaaatccctgattatgcagagcagatgagctttgggttatattttttctggtgcatgaatgggccacatgtttctatttaagtagtattccagcctgccttgttaatatctttgtgaagtgtttcgtgccaacactaaaaatattctgattttagggtacccagttcacacatttcacccataaggaaatgaagataaccctttctagatttttatataaacagtttaaggaaaagtatccaatagaaaccagtgttttcaagaattcaacagtgtccttaaagttcccaagttactttacaatttttttttcattctttaggcaccaatagcccaaatgaattaagaactatttcctacataactttctattttcctcctttaacacttttaaaaaggactattttcagaaggacaattattttgtactttgtgagaaaatttccaaggtgtttatattgttttatgtgtctgtcataggaaggaaaatcacctcggcagtgtttgaaggaaggatactgcaactctttgaagtacgcattttttgagtgtaaaagatcagtggtaagtggttaaagatttttaaaagcctatgctaaaaattagctatagggaggttaaatatatgaatgacttaatagttataggtaagttgcagtgatatggtttggaaaaaattacatagataatatttcttcctccagtgagttaacgttaggtagcgttcataaaaacccacagctcattgttatgttcttctgtcaccgtgctaactacagctgctgaacttcatgcatttctgaaagtgtgagaatgaagtctcggcaggtatatacgggtaaaagttgatgttggccactcgagttcagatcagttggcaattgtatacaaacatataatgtggagctccaaggtgtatacatttgtgccttatgtgactaagagaaaatgtcagtatctgtgtttgaattttggagggatggattgtagaaatagggcctaaaaagagattacaaatctctggggttcattctaacattctttgatttggaagatgtatggagatctttggaatggaaactgagacccttttcttggagaaatgtataaaaccaaaaatatgagcatcccattaaaggaagaaagcacttggacttgaggatgttttttttttgttttttgttttttgtttgagacggagtctcactttgtcaccaggctggagtgcagtggcgcaatctcagatcactgcaacctctgcctcctgggttcaagagattctcctgcctcagcctcctgagtagctgggattacaggcgcctgccactgtgcccagctaatttttgtatttttttagtagagatgggatttcaccatgttggccaggctggtcttgaactcctgacctcaggtgatctgcctgcctcggcttcccaaagtgctgggattacaggagtgagccaccacacctggccttgagcatgcttttgtttgcttaggaactacactgcaaatcccttcctttttgttaacaaaagaaatggagggtactgatacttacgacctgcaagtggttgtaaacaaagaacttggagcatgtttgccagctaatcagatccagggagggtgtaaagttagattaaatttggccctgctctgtttactttcttaagtgacatcttttcctgtcattcagtgtgaatagaggaggattttcttgccttctctcacatagatttgttacccatgtaaaatgcaaacctttaactttgtcaagaatttcaaagcgtgtgcagtaaaccctctgaaattctctacctaaagctcagtcttcgatctccaaagaacgaagtcagatttttttttatttttacaatttatctactttcagcagaaatttttaacaatcttacataaaaagtaaaatgatcttaccatttctaaatatcagtacaaggcagagtttcacatatactttgacactgagaagagcaccttagggaccctttttttttttttttttgagatggagtctcgctctgttgcccgggctggagtgcagtagtgtgatcttggctcgctgcaacctctgcgtcct

SEQ ID NO: 98074 - DNA, 74853 bp, Homo sapiens
acatgatgaaaccccatctctactaaaatacaaaaatcagctgggcatggtggcaggcacctgtaatcccagctacttgagaggtcaaggcaggatgggcaacagagtgagactccctctcaaaaaaaaaaaaaaaaagaaagaaaagaaaaagaaaagcagcctattttttaaaatacggtagggtacaggtaaaagccatataacgtactctattttagaaactcaaaatataaaaatttggactcacttataaaagattatttccttttgtagtaactcttctaaacatgagggtgtaaacatatcaaagtgatgctacagcaatacaaacaaaactccttctctttttttgtgggggaactgggtcttgctctatcatccaggctggagtgcagtagcacaatctcgactcacggcaacctccacctcccgggttcaagagattctcctgcctcagcctcctgagtagctgggactacaggtgtgcgccaccacacctggctaatttttgtattttttgtagagacagggtttcaccatgttggccaggctggtattgaactcccgacctcaggttgtccgctcaccttggactcccaaagtgttgggattacagatgtgaaccaccatgcccggtcaaaactccctatttcttcagaaaagttaagcctcatgtttaagtcacagtcaactgaaaaggaaccagagttggtgataaagtatttccatgtaacccaatggaaaaaatgttttaatcaaaattcaatttggccaggtgcggtagctcacgcttgtaatcccatcactttggcaggctaaggtgggcggatcacttgaggtcagaagttcaagggcagcctagccaacatggcgaaaccccatctctactaaaaatacaaaacttagccaggcatggtggtgtgcgcctgtagtcccagctactcgggtggctgaggcagaataattgcttgaagccgggaagcggaggttgcagtgagttgagatgacaccactgtactccagccagggtgtcacagcgagactccatctcaaaaagcagaaaaaaaaatttcaatttacagaatttaatccactggtttcagtcagagtttacaactctgcgtttattctacacaaacattctaagaggcaacaacgatagagctgtggccacctttgttacaaagcatgcattcttttgaatatgccacataattatttcattggaaatgcctgaaatacatttttcaacataaattgacttaattgctcttatctcatctgtcttatctcgtttgctttgaaaatagctaaatcggctttaatattacctgaaatggaaaccaatgactccctagccctccattcaaccaaacaaatccaagctcagaaaaacgatcttgggcagatctttcttttactcgactgtggattaatatagagattgggctaattttgaatgtctttaaaacatatttttttctgggcaaatttttaacagtaataggtattctgaattttaaaaaccctaaacacaaagaacgaaatgtaactactacagcacatgtatatataagttgttaggcgcatactgttatagcaatttcagaaagcagggcagagaggttacttgtttctgctgttgagctttccttagtgcctggagtctcttttctttaaggcgttccaattcatcctcatccatctgatccagtttttgaatttcagaatccaaatgttcttccaccagtttggtagtctgaagcagctgatgctccaggactttggaaaacatgtcaacagatgcatcagcttccattcttccaaatggtacagagttcagcctgggtgctggggagaagatttacaaaatacattttaaaaaatgcaaacaataagcaaggttttctctaccattttcaaaaattctggcaagtgtataatgtgtactctatggagtattctaacgacatccaagcacttgatgctgggcttaacaatttttatgtgtttttaaatttaattctcagtaggttctagtcacaccactcaaaaactacttacagcaaatttagggtgcttctgatttagcatatgttttactatactaaagccaagacaagtctttaagaccatcaccaaaccacagagaaatgagttgtgaagttatacctagtgatatatactgacaatcagtgttctttaccaatgggaaagagaaatcagaaacaactgcgaacaataggaaggtatacctactgaggttttacacataaatatatatattaaactttacttaaacacagagtacagttgagcaaaacacagatttttttcatggctgctgcccaaatgagtttcatttaactcctaagacgtctcattaccatttatgtaaagaagagtgcctggtgttccctgagcattaatgtccattcctgttctcccattacctaacaaaaaagtctatgaggtcacaaaaattaatactggtttccatttactgacagtgttaactttgatgtaaaacactccaaatacttttctaaattttgggtttttttccaacatcactcctctgtgtaaaatcagagtttcaaaatagaactaattcagattagaaaggaagacctatctcaattagtcatgcatcacttaacaatgggaatatattctaggctgggtgctatggctcacgcctgtaatcccagcactttgggaggccaaggtgggcagatcacttgagttcagatgtttgagaccagcctgggaaacatgatggaaccctgtctctactaaaaatagaaaaattggccaggcccggtggtgtgtgcctgtagtccccgctactagggaggctgaagtgggaggaggataccttgagcccaggaggcagaggttgcagtgggctgagaacgcaccacttgcaccccaccctgggcgacagagccagaccctgtctcaaaaaccaaaaaccaaaaacccacaaaacaatgagaatacattctgagaaatgcatcattaggtgattttgatattgtttcaaacattatagactatttacacaaacccagatggtacagcctgctacacacctaggctatgccatacagcctattactcctaggctacaaatctgtacagcatgttactgtactgaatactgcagacaactgtaacataatggcatttgtgtatctaaacatagaaaaggtacgataaatacagtattacaatctcataaaactgaaatgtccttatgtggcacatgactatatattttaaaagaaatggagtattttgtactagcaattagtacaaaattttacttttttttttgagacggagtctcgctctgtcgcccaggctggagtgcagtggcgcatctccgctcactgctagctccgcctcctgggttcacgccattctcctgcctcagcctcccgagtagccgggactacaggcgcccgccaccacgcccggctaatttctttttgtatttttagtacagacggggtttcaccgtgttagccaggatggctacgatctcctgacctcgtgatccgcccgcctcggcctcccaaagtgctgagattacaggcgtgagccagccgcgcccggccaaaattttacttcttttaaaagaaatggagtattttgtacgagaaattttataccaacaattagagggcaagtttatgtgtatctcagggttattactgcagaaatgatttataatttgcctatcaaagcaggaggctgttgcatatcaatgaactatgatacatttgcaaataatactgaagcaccccaaacttcacaacaaactgtgaattcattcactcagcttctgacacagattctgacccacacaggccctctataaacgttgagctgaagagaaatattcttgcaaacttcaattctgattcctttttctttacaggaaaaggatttgaaaagcatacttgatttcatctttgtatctccatagaacacagcaggtactcaataaacatgtatttaacgttgaatgaacacgtgcctgacttctgttcaaattactacactgttaagtttcaaaagtatttgagtctaaaaaaccaaattgtaagctcctcgtgagtgctataaaattggaaaggtgctgtatttcaaacacagcagatttccacgctccctatcgcccaagaaaaatgtcagtaggactgtgaccctcagtgagggggttggaaggagaagataataagatactgaattgaacgttggaagctgtgctccagggataagcacagagaatgcttaccctggaactttatagaatgagcccagaatttaattatgggataactggaaaaagacgagattaagaagagctattctgggtgtaggtgttggtggtcagagcattgagaatggggtaaagagacgatgcaacccctcgttagcttttcatttttcaaaccacagcctctgattcttcctttttacagctccgctggaagggtgggacgggacacagcgcgtcctcaaattccctagtcatttcctggacacccttacaggtatccgccaaaacaatcaaggggcctggtccttaactgaaccccaggtacctccccaatggcaagccggccactccctgcgcccggggaaacagaggaaagcacagtcccggtggccccaacttcgacgcctcctggtgcgcttgcgcaagagcctctgccaggacaccgacaccggtgctggggccgcgcccctcctccgctccggatgtggagcagcagaatgttcaccagcacccggacgtggtggtcggattcttctcactaccctctgcctcacctgagctctcggtgacgcctgagaagtgaaagagcagcagtttcaaaagacacgtccactccggcttttgccttgcagtagctgccggcggctgcaaacgggccgtcacatccgcctccttattggctgcgaacctcgcgcgatatcaccttggacgccagaggaaggggcgggcggtcgggtggccaacagttctgcgcgtgcgcctcccgcccagcagcccggaacccaaggtgtccgacccttgctttcctccgggtacacggccgaactggaaggccgcaaagcattgtgggagttgcagtttcttagtgcgcaggctgtcgtggccggactttctcaggagcgtgcttcagtattcacggtccagtgcgccagactggaaatgagacagctgtgctctcgctcagccgtgacgcttgaactgcgtttccattctgttagtgttgaatgaacatttttcttttttttgttttcttttgttaacatttttcctaaagtcgaggcataaacatatacagcacaattaacttttgcatagttaaaacccaaaatatcaccggccagatccagatatagaacattttccaccacccctgtaggtcccctcttgactcttcgaaacacaggaatttttagaactcgccctcgctttgagggtgaagctgaagacctatgttagggaattgatcggctgtgtcctgttctgttttattcagtgactgtacataatgcataatgcatggatgttactgagaggtccctattttgtcctgaatttatctctctcgcaaacccccagaggactctattggttcgttgtggttctttactgaacttcgtgcggctgagaatacaaagatataaagggaagcccaaagcccactcctgaaccgaagcgtgcgttccccgttgggagaggggtgaggtggcgaaattgacagcttcattgtccacctccgggttctagaacgtggaaaacccgcgggtgtcggctcgtggcggacgcttgagggcagggggcgctcgggctgctgcctggtcggccggtcaaccggagacgctctacccgaagcgcagctctcgatgagccgcgccctgcgtcctcacgccgaggcggctgggcgatgcgcttgcgcactgagaactcacaccatatgtgtcctgttccagtgcgcgggtctgtggagagccgggtgcgagcggcggcagcacgaggggaaaagagctgagcggagaccaaagtcagccgggagacagtgggtctgtgagagaccgaatagaggggctggggccacgagcgccattgacaagcaatggggaagaaacagaaaaacaagagcgaagacaggtagataggggttgggtccgtacggcggcggccgccgtggctcagtggagtgtgcgggtctcgccgggcgcggcgtcggaccggggtctgggctcgcgatgagcttcgcggggtaccaggcctgggcccagagtgtgcggagcgggcccaagcccccgggccgggtgggcacgtagggcctcgacggcgggcgggtcctcccagtcgagcctcgctcccccggctaccccttccccggcctgaggagcggggtagtcatttgagggttcctggtcgcgcggggagggtcaggcggcttcgccagcgtggcccaggccagtgtgagtttttttccgcgctactcttggcgagggtggggaagttctttttatgcctcttatacctgtgagtactttgggagggaagggagcttgaatgtgatgtacggccgggtttctctactcgcggtttcaggtacgttagagttatggggaggtgtttagcagttcgctgtctctcaacttaatctgatttggatacagttttcgtttatttaagggctgattgtccagccctcatgcttttcgctttccttcttccggcctgttttttttgtcgtttctttgctctctagccttcccctaagaaaggaagggaagaagaagaaaccaaccaaccgaggtcgctcctttctaaccacctgmaatgctttggggagggaggataagggtatatgcgagttacttacctagagatttttgagacatttctgtgtgtcacattcgattgagttctgttactcatgatggaaagagttgacttcctgggagtgaacaacatctgttacattacacgttcgtacactacccaccaaacttaaatacgaggcggagagtaaggtaaattaaaaaaactagtgctagttcatcagtctgactcaaaacagatatgttgtcttgaagttaaaataagtttactaattataaattggaagcctggatcgttttctcacctagcgtttgactagcttatgagtagaattaaaagacaacaaagatagtcttgtatttcagttttaggtctattggaggaagttaattggtttggagaattgaattattgttaaaccagatgaatgagaaaataaggattatgggtgatgtaggggaacacaaatttctgtacttttgacaggaatttttgatgtatagggtacttttttccttgctaatgttcagctgtctctagaaaatagagaactgagtataatgagcctttatgtattaattacctgccttcaaccattgttagcacatgacctgcttggtttcatcccacctactagaagtgtgtgtgtatatatatatatatatacaaatatatatacacacatatatataaatatatatatacaaatatatacacaaatatatatatatacaaatatatatatatatatacattttttttttttttttgagacggagtttccctcttgttgyccagacaacaagaaacttagggcaatggcgcgatctcggctcactgcaacctccacctccctggttcaagcgattctcctgcctcagcctccgagtagctaggattacaggcatgcaccaccacatccggctagttgtgtatttttagtagagacggggttactccatgttggtcaggctggtctcgaactcccgacctcaggtgatccgcccgcctcggcctcccaaagtgctgggattacaggcgtgatccatcgcccctggcccccacctactagatattttaaagcaaatctcattagcttttcatctgtaaatccaccaagtatatctgtaagaaatattaatagtgattcttaaacattagcaaatattcagtcagtttgctgatttccctgattgtcttattacagtttttttttcaattcgttcgtttggtttaggattacacaaatgtgttctttagattaaaattacatatatatgtgtttttgttttgttttgttttttggagatggaggggcagtctcactatgttgcccagtcaggtcttgaactcctggccagtgatcctcccacctcagcctccctagtagctaggactacaggcgcgatccggcttatatgtttccctacttacactttttactttccaggctctttcacaatagaaaaaagccattgggagacaagatgtttattcttgtctgtgtctttttagggaaaagtgagtgtctcattgatttataaagattttcagggatgctgtaaagtttaaattgcacactagaccctgttgttaaatgattggtttggttgtgtagaagaaatgctgttttttccccctctcaacctaatctgtgttttgttgttgttgttgttgttgttttggtttgtttgtttttggctcatgttgaagggaaagtggtggcaatataattttaaaacatttattttctcatataccaatatatgaaattgatacattttgtgagtgtgtgtgtgtataaatgcctcatggactcctttttatgaatggctttcagattgtgtttaagaaatcctgagctttagcagagttccctttgactggaactgcttgggtttttattttggtcttccacatgagatattgggagatggggaatgggaagttccactgctttgtgagtcagctttttacctttattttaatatttctttcctttcttcagggatattttgaatatttgtaaatgggacaaaaacacagactggaaagaaaatctagagggagaaagtccaattttaggattagtattcttgtttgtgtaaaatgagatagagatccggttttattctcctgggtgaaggtccacactttaaagattttactgtcattccacctcccctccttggctatgtcaggcatgtttctggcaaggtgtgaactgtgtgagaaatgacaactgcttatttagttatcaagagaaggcatggagccacttttcagttcttggacagaacatacaatactcactgtccttaattcttatatttaattaatccttattttaacttcttagccactcagtattcatttaaaattagattttaacttacctaattttatttgtacagcatgtgtcagtgatcaagatatttattcttgtctgtgtatttttagaattctagaattttgcttaaagaccaagttctagaattctgttccagtttgtgaaaaatcttcttttttttttttgagatggagtcttgctctgtcaccccgggtggagtacagtggcgcgatctccrctcactgcaacctccgcctcctgggctcaagcgattctcctgcctcagcctctcaagtagctgggatgacaggcgcccaacacctggctaatttttgtgtttttagtagggacagggtttcaccatgttggctgcctggtttcaaactcctgaactcaagtgatcctcccaccctggcctcccaaaggcctggaattacaggtgtgattcaccacgctcagccccagtttgtgtaattctaagaatgagattttgatgtggtgtttgttcagcaagttttcctgacctttttcagttgactcgggaaacttgttgagacaaaggctaggattcaatatccacatatcaaacaaatataatacacatagcctaggtttaataaaggaattcatttcttacttgcatatatttgaatgaaactcttgtctgcataaattacatcaaaaaaagatgcataatcagaattcttttggtctagcctgttcctatcctgacgctttaggaagtggtaggggaagaagtcctagtttgctataaattaataagaaaacagattatagatttttgttgatagtaacctctctagccttccatgctgtccctgtggggaactcattcagctacttttaatgttacttgctcatttgttgtgctttatttatgcttctaagtttattccagtattgcagttgatctataaggtgggcagagtgttgttttaccaaggaactgagtgtcagtggttaggttagaatagcaattctcaaattctggtcctagactcctttacactcttaaattcctaaggaacacaaaaggcttctgtgtatgtaggttatatctaccagttacaggtattacaaactaaaactgaaaagttcttcaaatatttaatttaaaaataaaaataaacttacactattatacataacattattaaataaccatattttcaaaaatagaagagctaagcgtttttgcaaacatcttcactattatatgacttaatagaagatagatcctcacatttgcttatgcatttgatctgcagcatcatcacacatcatttagcttctgaaaaactcccctgtacagttgtgagaaaatgagaatgaaaaaggctagtatcctcttagtattattttgaaaatagttttgaccccctaaaatagtttagattccctaaagagaccttgggaatgaatttgaggactgctggcctagggatttctaaactagatttaggcatttgtgagacatttctcaagctgtttgaccatcgttcatgtatgtcttacaggtgctgagaatgcttgagaatcacttaaaggcaactgaagacatctgtgggcatgttaatgttcttgatattttaacaatttgagatttttcctttttttttttaaatgtaatacttgccaaggtaaatatcagttgagattgatttcaattgggagtccattaagtttatagattatttgtgacacttgacatctttatggtgttgaatcattccattcaagaaatatattgagatttaagcacttgagtgccagatatttttctggatgctagaaatatatttgtgaacaaataagtaatatgatttgcctctccatttagttggttaatttaattctataacagtaaaatattattttcttcattttaatctttaggatttggctttttcccatgtatcacagaatttttgttgctgttaatgtaatcattcctccccctcctttttttttggtaaattgtaaaattttgtcttttttgtctccttttctccttcctttctgttgagagatggaatctcactctgtcacccaggctagagtgcaatggtgtgatcatcgctccctgtaaccttgaactcatggactcaagcagtcctccctcctcagcctccccagtagctaggactgcaggcatacaccactgtactcagctaatttttaaaaattttttgtagagatggggtctcgctttgttacctaggctggtcttcagctcctggcctcaagtgatcctcccatctcagcctctcaaagtgttgggattacaggtgtgagccactgtgcctggcctgggttgtctttttctttctttctttctttctttcttttttttttgagaccgggtcttactctgttggccaggctggagtgcagtggcgtgatattggctcactgcaacctctgcctcctggattcaagcgattctcatgcctcagcctcccaagtggctgggactacagtgccaccatgcccagctaatttttgtatttttagtagagatgcggtttcaccatgttggccaggctggtctcgaaatcctcacctcaggtgatccatccgtcttggcttcccaaagtgctgggatcataggtgtgagccaccgcacccagcctgggttgtatttttattgttgggttgtaagaggtcttgatatagtctggatactagatccttatcagatatatgatttgcagatactttctctgatttctgtagtttgttttttccactgtcttttmaagtttctttttcacaaaagttttaaattttgttgaagtccagtttatttttgttgttgttgcttgcattttggtgttgtatctgagataatctgttgccaaatccatggtcgtgaagatttacctgtatgttttcttaagagttttattgctggccgggcacagtggctcatgcctgtaatcccagcactttgggaggccgaggtgggtggatcacctgaggtcaggagttcgagaccagcctggccaacatggcaaaacctactactaaaaatacaaaaattagtcgggtgtggtagcacgcgcctgtagtcccagctactcgggaggctgaggcaggagaattgcttgaacctggaaggcggaggttgcagtgagccaagattgcaccactgcacgtcagcctgggtgacagagtgagactccatctctaaaaataaaaaaaaaacaaaacttttattgccttatctcttgcattttggtctttgttccagtttgaattaattgttgtatgtggtatgatgtaggggttcatctgcattctttttttttttgagacggagtctcgctctgtcgcctaggctggagtgcagtggcgcaatctcagctcactgcaagctccgcctcccgggttcatgccattctcctgcctcagcctcccgagtagctgggaccacaggcacctgctaccacgcctggctagtttttttgtatttttagtagagacggggtttcaccatgttagccaggatgggtctcgatctcctgacctcgttatccgcccgcctcggcctcctgaagtgctgggattataggcgtgagccaccgcacccggcctgcattcttttatatgtggatatctagttgtcctaataccatttgttgaagagaagatttctttccctattgaaaggttctggcacccttgtcagatcattagatgctagatatatggatttatttccggactttaagttttatttctttggtctgtatgtctgtgtcagtgttgccaccacagtttgttgttgttgttgttgttgttgttgttgtttctgggtttttttttttgagacgaagtctcactctgtcacccaggctggagtacagtggtgtgatctctgctcactgcaacctccgtctcctgggttcaagggattcttctgcctcagcctccggagtagctgggattttaggtgtgcgccaccaggcccggctaatatttgtgtttctagtagagacagggtctcaccatgttggccaggctggtctcaaactcttgacttcaaatgatccacctgcttcagcttcccaaagtactgggattatagatgtgagccactgcatccagccggcaccacagttttgattactgtggtgtgaatttccttagatgaaaaatttcaaacacatacaaaagtagaatagtctaatgaacaaacatgtgtccatcacccaggttcaaattcattcataaatctcatttcatatgtattctgccccctcctttmttttctccattatcttgatacaacctcagacatttgtaaatatttcaagaaattatataatgtattataagaaacatttatatcttaaatataaatttttagaagtggtacatttcattcatttggaaaattcacatacaatggaatcsttgtctgtgttgtcagataaatgaaatgtcattgtactttttcagaggcatttaaactagcgtttcaatttattgcttcagaaaattccatttggaagttttatgatcaaaagtacagtaattattatagtgttagacgtgttttttattaaactgctgtgttgaaactggttagccttgcctgttgtatgagagtcgtgattgccactccagaataggactttttccttatttattagtgcctatttgaaatgtctaacatgcgaccgggcatggtggtggctcgtgcctgtaattgcagaactttgggaggccatggcgggtggatcagttgagcgtaggagttggagaccagcctggccaacatagcaaaaccccgtctctactaaaaatacaaaaaattagccaggtgtggtggtgcatgcctataatcccagctacttgggaggctgaggcataagaattgcttgaacccgggaggtggaggttgcagtgagccaggattgcaccactgcgctccagcctgggcaatggagtgagactgtctcaaaaaaaaaaaaaaaaaaawtggaatgtctaacatgcctttctggttgccacttgtagaacataggtaggtgggcggggtgcggtggctcatgtctgtaatcccascactttgggaggctgaagcagaaggattgcttgaggccaggagtttaagaccagcccgtgcaacgtggggagaccccatctctaccccctaaaaaaaatagctgagtgtggtggtgtgtgcgtgtggtctcagctactcaggaggctgaggtgggaggattgctggagscttgggaggtcaaggctgcagtgagccatgtttgtgccactgcacttcagcctgggtgacagagctagaccctgtctcaaaaaaaaaaaaaaatgtggtgaattgggaatacaaaagggagttttctgttctcaaagggagttacgttttaacatagcaaataggcatatgcacagataatacagagtgaagtgctgaagggagaaaatggagtatgagagtaccaccctcgagatttcacatttgcctcttaaagttattgtttatgcatctttaaaatccttttctaattaagtttgccatcaagagagcgtgcagattggaaggaatgggagtatgctgtgtgtttctgtgtctctagagtaccaagggtgaccatgaggaatatttgagatcttcagttgctcctgtattgccaataattttgtacacaggtgcagccagaccattctaatgatggtgttcaccaaattggttattcagaaatctggtcttgagagtggttgtctacataaaactttttgttaaaatttattagtaattattagtttgttaatattaatgatttattaatattagagtgccaggcactatacaagttaggtggggaaaatcctttaacagtgattaaggatcagagttaacttytatggagtacagagactgagtttgctttgagcacttaccatgtgattagttattttagaacataagttgtatctcttttttttttttttttttttttttttttgagaaggtgtctcaagcaatctcagctcactgcaagctccacctcccgggttgatgccattctcctgcctcagcctctcgagtagctggcactacaggcacccgccaccacgcccagataattttttgtatttttagtagagacggggtttcatcgcgttagccaggatggtctcaatctcctgaccttgtgatccacccgcctcggcctcccaaagtgctgggattacaggtgtgagccactgcgcctggcccatataagttgtatcttaaggtgtttattgagaatgtggatctgaatttttatcaatattatatatatctgcagacataatcctaaatataaacttgtatctctgtaattatgaaacccaaaatattctttttttattattattttattttattgagacagaatcccaccctgtcgcccaggctggagtgcagtggtctgatcatagctcagtgcagccttgatctcctgggcttaagtgaccctcccacctcagcctcctgagtatctgggactacagacgcatgccaccacacccagctaatttttttgatttttagtagagatgaggtcttggtttattgcccaggctggttttgaactcctgaactcaagtgatgttcctgccttggcctcccaaagtgttgggattacaggcatgagccactgtgccaggcccccaaatagtcttatatcaaatagtaacaaatataaaattttgtaaagttccaatctgcagtattgatttgaaagatgatgccacgttgttgaatctaaatcagggcttctcaaactttgttcacctggggatcttgttagaatggagattttgattcagtagatctggggtgagggtctgagattctgcatttttcagttttttttttttttaacaggcctgagattttgcattttcaataaggtgatgatactgatgctgcttgtcctataactatactttgagtagtaggatctaaatgaccattttcattgtgaatgtattgcctcttacaatggatttcttttgagttcagcatgcctgaactagcaagagctcaattcttctgatacttttttttttatttgaactagtgattttgagctttacatgacagattcttctcttgacaaaaaggtttaatttacctagtaagtgtgcatctgatctttttcatcaaccggaaacaattttggggggtaggggttgtaaacaaaaccttgggttgctgttctatgacagtatactgtgataaagtggctgtctgtattcatcttaaatctttattatcaaattaaaatttaaaacaggtaaaacagaagttgctrgagaattttgaagcttctgaaatccctgcaactctgtgttcctccccacttaatccagtttgtaaaagctgtactgatctgatagttagacatactggaatctataatacatatgaacttagggtatgtgtatcgggggcgtctacaagatttgtattcttatcaaattaatgtatcagatatttagaaaataaagggttaggctgaattttgtagaaggtgataagatacacataccctttgcattgcattgtataatatagtagcagtatggtttcatatcccttttaaaggagtcacgacttcataaggacatcgtaagctgggagggttttcttttgagacatagctagttctcagcttattgattgtagtacttgagccataacttcattaagagagttgagagtgaaaactgttaagatttgtggttataagtggtgggggccactgaggagcaatgactgctgggctttcccttcttttgtcttgtttttcctctttttgtatgtaactgttgatgatcaaagatgttctgggtaagaagatgaagactggggaaatgagatgtcagaaggtaacctgtagagaaggtgggactgaatttcccggtttctcttattgcagctgttactgctgagatagagttaagaataaagagaaggattccctcttatgctcttcttgtttactattattaagagttttggcggagaggggcagaagccaaagtaagtgaaaaagggcagcaacagtgttatatgtgacttatccttcctttaatactttgaggttttggacaatttgtccatcaacttggggatggggacggaggaaggagtggtgtagtttggattttacacttctaccaacatgctgtccattactataggtcctggtattgattaggaataggaagaaatatgggggtgcttcggttattattgtaccataacaagtcatcccaaacagtggcttaaaacaagaaaacttgtgattatctttcatggttctggaggttgactgggcttaatcagctggagttggcagctggagcatctctatttgatctctcctcctgacctggacatccccattagcttggcagtgagcattccaagagacaggaagctgccaggttaaggcctaggcctagaaactataacaaaagttgcatccttctatttagcaagcagtcatacaactcccacattaaaggagatagacctccacctctcaaagagtgtcagagatattttgtgccaggttttaaaacctctgcagtgggtaaagaggcattggagaagagaggttggtaaaaaggagtcttagacatcttggagattttgaagtgtggaataatttggaaaggagttgaatttcctgtgtttcttgtctaactttacattcattacacaagttttcagtggaaaatacctgtcattatcaaatgaaatttgctaagtttggaattgagaggagatttgtacatgaggttaattttccttttactttgcagtgaacaattttttgtaatatgtgtctttaaaaggctttctactacattggtctcaagatgaagtatttgtcttactttttatttttatgtatgatttttatttaattccaaaagccaaactccaaagttgagtacatgcctgcacacacaataaagaaatactgtttttatacaactggaaaaatacaagttgtattttgttcttgacacataataattgtacatatttatagggtacaatgtgatattttggtatctgtatacattgtgtaatgatcagatcaggatgattagcatatctatcacgtcaaacacttgtcatttctttgtgataagaacattccaaatkctcttttctagctgtttgaagtataatacattattgttaactatagtcatcctactgtgaagtagaacaccagaacttattctcctaactgtaacttgaccaacctctcctcattccctctccttcctactcttcccagcatctggtaaccactattctactctttacttttatgaaatcaactttttttgattccacatatgaatgagatcatgcagtatttgtctttccatatatggcatctttcacttaacataattacatccaagttcatatgtgttgtcacaaaatgacaggatttcattcttttttatggatgaatagtattcacactgtgtagacgtacattttctttatccattcatctgttgatggacatttaggttgactgcacatcttggctattgtaaacagtgctgcagtaaatgtgggagtgtaaatattcttcaacatagcaatttcatttcctttggctatatagacccaatggtggaattgttagattatatgatagttctgtttttttgaggaacttctatactgttgtctctaatggctgtactaatttacatttccccccacagtatataatagttctcctttctccatattctcaccatattattttttgtctttttgtaaaagctagtctaaggtgtgatatctcattgtggttttgatttgcatttccctgatgtttttttcatatacctggtgcccatttttatgtcttcctttgagaaatgtgtattctgatcttttgcccattgtttagttggattatttgcttttttgctattgttgttttgagttccatatgtattctggatattaaccccttgttagatatatagtttgtgaatattttctcccgttctataggctgtctcttcactctgttggttgtttcctttattgtatttgtcggtttatgcttttgttgcttgagcttttgaggtcttaaacaacgttatgaagtgtctctcctgttttcttctaatagtttcatagttttggattttacatttaagtagttcattttgagttgatttttgttaagtggtgagatgagaatgaagaaataaagaataaaatgtttttaaaagactccttcattaagtatcattttaactccacattactgtgtttaatagaaattaagatactagaaaaagattatagatttgttcttatttttgtaacttataaaaatggataaaagggccaggcatggtggctcaccacygtaatcccagcactttgggaggccaaggcaggtggatcacttgagcccagtagtcactgtagttttcatgttttatttttggtcactgtagttttgccttttctagaaattcatataagtagaatgatagactacatagtcctttttggctgactgggtttcacttagtacagtatacttttgagattcatctatgttagtgcttgtagcattagtacttcccttttgttacccagtagtattattccattgcctggatatatgacaatctgtttatatattatctggtagatggatatttgggttgtttccagcttttcctgatttcgagtaaagctgcaatgaacatttgagtataagtctttgtgtggacatgtattttcatttctcttaggtaaatacctaggagtgggattaggagtgggattgctgggtcgtatggtaagtgtatatttaacaagaagctgtcaaactctcttccaaagtgactgtgccatttttgcattccctctagggatgtatgtgctccagttactccatatccagtctcaacacttggtattattaccaatctttaattttaggatttctagtggctgtgtagtgacatatcattgtgttttttttttgtttgtttgtttgtttttgagacgaagtctcactctgttacccaggctggagtgcagtggcgtgatcttggctcactgcaacctttgtttcccaggttcaagcaattctcttgcctcagcctcctgagtacctaggattacaggcacgagccaccatgcccagctactttttttgtatttttagtagggacgggatttcaccttgttggccaggctggtcttgaactcctgacctcatgtgatctgcccacctcggcctcccaaagtgttggaattacaggtgtgagccaccacaccctgcctttattgtagttttaatttatgcttccttattagtgataacatcttgtcatgtgtttgtcattctttcatctcattggttatgtgtctgttcaatcattttcccatttaaaaaattgtgttgtttcttcgtaggcaaatcctttatgagatatatgtattgcatatattttctctcactctttgtcatggcttttcttttcttcattttttttgagacagagtttcgctcttgttgctcaggctggagtgcaatggtatgatctcagcttactgcaacctccgcctcctgggttcaagcaattctcctgcctcagcctcctcagtagctgggattacaggcatgcgccaccatgcctggctaattttgtatttttagtagagatggagttttgccatgttggtcaggctggtatccaactcccaacctcaggtgatccacccgctttggcttcccaaagtgctgggattacaggtgtgagccaccgtgcccagcctgtcttgccttttcattttgctaattgtgtcttttttttttttttttgacagagttttgctctgttgctcaggctggagcacagtgatgcttgtgccttagcttcctgagtagctgggattacaggcatgtgccaccatgcctggctaattttttttctattttttagtagaaacaggatttcaccatattggccaggatggtctcaaactcctggcctcaagtgatccacccacctcccaaagcgctaagattacaggcgtgagctactgtgcctggcctattttgttaacagtgtcttttttaaagttaaacttttatttcaagattattatagattcatatagttgagacagggtctcactctgtcgttcaagttggagtgcagtggcacaatcatggctcatcatagcctccctctcctgggctgtcaatcctctcaccctagccattggagtagctgaaagtacaggcacatgccactatgcctggctaattttttcttcttcttctttttttttttttttttttttttttttttttttgagacggagtctcactctgttgcccaggctggagtgcagtggcatgatctcagctcactgcatcctccacctcctgggttcaagcaattcttctgcctcagcctcctgagtagctgggactacaggcacacaccactacacctggctaatttttgtatttttagtaaagacggggtttcaccatattggccaggctggtctcaaactcctgaccttgtgatccgccagcctcggcctcccaaagtgctgggattacaggcgtgagcccccgcgtctggcctgcctggctaatttctttgtagtttttgtagagtcagggtttcgccatgttgcccagtctgatctagaactcctgggctcaagcaatccacccacctcggcttcccaaagtgctgggattacaggcgtgagccactgtgcccagccattacacagataatgacattgatacaatccactgattatattcaggtttgccgagtttcatttgtactctttgtgtttgtgtgtgtgtttatatatttagttctgtacaatattattacatgtgtaggtctgtatatccattacacagtcaagatgcagaatatcagtgcaaaaatctctcatgttgtacatttgtaaccatctccttcctgtactccctacccacctccccaacccctcacctgtctctaacctcaggtgtcttgtatgtttctaaacttttgtctttcaaaaatgttgtattaatggaattaagtatatatatgaccttttgaggttggcttctttctactcagcctaattctcttgggatctatcgaagttgttgcatgtatcaatggttcattccattttattgatgaataatatttcatggaatggaaatgaaccactgtctattcaaccattcacctattaaaggacatgtgggttgtttccagtttttggctattgaaaataaaattgctatgaacttctgtctacagatttctccatgaacataaatttttgttatttaggtataaatgtgcaagaatgcagttgctgggttatgtggtaagtacatttttagttttgcaagaaactgatagactgttttccagagtggcattgccattttatatttctaccagcagtgtatgaattttccagttcctttctatccttaccagtattggttattatcactattatgggggaggagggcattctcattggtatgtagtgattcgtatgtagtgatatcccattgtggttttaatttgcatttcccaaatagctaatgatgtgaacatttatttgccatgtgtatatcttcactggaatgtctttttatgccttttgcccattttttaattggattgtttggatttattttactgttgagttttgagagttttgggtatattctagttgttaatccttgtgatttggaaatattttttcccattttgtagcttgttcttcattcccttcacatagtctttcacagcaaaagtttttgatgagttccacttcttttggattgtgcttttagtttcaagtcttaactcttaactctttgcttagtgctagatctgaaagatattttactcttttcctaaaagtttatgcttttatttatttttttaagtacatcatatatcttgggttcactcttggataaggactgagggtgaggttcatttttgtgtgataggtgtccatttgctgtagcactgtttgttaaagaggctaccctctgcttttgcacctttgtcaaaaattaattggttgtacttttttttttttttttttttgagacrgtgtttccgtctgtcacccaggccgtagtgcagtggtgctatctcagctcactgcaacttctgcctcctgggttcaagagattctcctgcttcagcctcctgagtagctgggattacaggcacctgccgccacacccagctactttttgtattttttagtagagacggagttttaccatgttggccaggccagtcttgaactctgacctcaagtgatccacctgcctcggcctcccaaagtgttgggattacaggcgtgagtcactgcgcctgggcctaaatggttatacttctgtgggactgtttttgggttctctctcttctcgtcttgatctgtgtctattcctttgccagtaccaagagctttgcttaagtcttgaaatctggtagtatgattcctcacattttagtcttttttcaaaattggtttagctattctagtttctttgccttttcatataaatattagaataaccttgtctctattggttatgtcctaaaaatcttgctgagatttttattggaattgcattaaacctgtatatcattttagggctgattgtcatctttactgtgttgagtcttatagcccatgaacatggcatgtctcttcacgtagtcaagtcttggatttctttcataagcattttgtaattttccacatataagtactttacatattttgttagatttaagtatgttactttctttggaataactataagtaatatgattgttttttccccctcagtttttctgtttgtttgtttttttgttttttgggtttttttttttttttttttgagacagagtctcattctgtcgcccaggctggagtgcagtggtgtgacctcagctctctgcaacctccgtctcccaggttcaagcaattctcctgccccagtctcccgagtagctgggattacaggcatgtgccaccacgtccagctaatttttgtatttttagtagagacagggtttcaccatgttggccaggctggtctcgaacttctgacctcagatgatccacttgcctgggcgttccaaagtgctgggattacaggygtgaggcactgcacccggcctccctgctcagtttttaaaaaataaactttaatttgtagaagttttagattgtgaagataatacagagtctccatgtgccccacacctagtttcttctgttattactatattagcatggtacacttgtttcagtcaacgaatcaatattattaagcgaagtgcatactttgtgtagatttctttagtttttctctactgtcctgtatctgttccagggtcctatacaggataccacattacatttagtcagcatttatccttagatttgtcttatctgtgatagtttctcagatttcattatatcactgatgtcgatgttgatcacttggctgaggctgtgtttgtcagatttctacattataatgttactcttttcttcctctttctatattgtactctttggaatgaaatcactgtacacagctcatagtttaggagtggaaaattatgttccacctccttgaggatgggattctgcatatttagctttcttctgcacacgtttgtctcttccccatttatttacttaatcatttctctctaatagtatgactagtggaattatttcatactttagcttataatttaatattgktacttaatttgttcttctaattaattaacatattaatttgttgctcccattgcccattgggagctctttcagttggctcatgtgtccctttgtcatagactcaacattgtgtgtgtgtgttttcgtgtgttttggcattttcttgtttgtgtgtttgttttttgtttttaaatcatttccttacttcctaccattacacagtgctccaggcttgttttgtctgtgtccagcccctgccccagaatcagccattttgctttcttaccaggaattggtattgtcagtttcttggattttagcaactctgataggtatataccactatctctttgttttaatttgcatttccccagtgacaaatgatgatgaacatttttcatctactccccctgcccctaatttgacaaggtgactgcccacattttaattgggttgttattgttgagttttaagagttctctgtgtatttgggatacaggtctttcagctagtagtgctttgcaaatatctctttcagtctgtggttagtgttttcattttaatactagtatcctcagagctctatttctgggctgcctggtctgttgccttgatctgtgtgtctcttctttcaccagtactacactgtcttgatagtaattttataataaatcttaaaattgagtaatgaggcttgcagctttgttcttcagtattatgttgacttatgctaagtcttttgcctttctgtgtaaactgtaggaatttcatagctatgtttgaatttttcaagcaagtaaaaaactagatcatttcccattttctaggaaggcagtagaacctggtgttaaaatttgggcttgaattcctggtatgctactttgtagctggtggcctttaaaaaattaccatctttaagaataattttatgtaattgttatgaatattaagtgacagtgtatatattatgtctaggcattggtcagcacaatgcctgaatataagcatattaaaaaactgttcatcttatattgttagtcacaaaaagcctttcagacttaataatgtacaaatgtagtcctatactttgttatcctagagatgtttattgatgaattctccagaaatatagctaatcacaagaagattcttgaagctattttgatgaggtgaatatagtttgggtgagggccgataaatttttggaaatgagatgccaaacttcagccttctcttctcatgcagttgtcagaagctgctgtagtgtgaaatgttgccagagatgcctttggggatactcctgggagatgctagggcagacttaggttcttgttacctgaagagacctgagaattgtccttgattcttccttactcctttctatattcatcctgttgaccacttaagtgttgttgattctattcccttaatatttatctaactcatttacatcttgcctgccactggtgcaagtcaggtgctcattgtttctcattacagttactacaaaagcttcctaactrgtctccttgcttcctgactagtcaggattcagccctgccactcattgtaccagatgtagcattctaaaatgcttttatatatatatatacagggttttactcagtggcacaattctagcttactgcagcctcaacctcctgggctcaggtgattcaggtaatcttcccaccatagccttccaagtagctgggacaagaggcatgcgccaccatgcctggctaatttttttatattttttagagacggggtttcatagtgttggccaggcaggtctcgaactcctgggctcaagtgatctgcctgcctcagcctcccaaagcgctgggattacaggtgtgagacactgcatccaggcctaaaatacaaattggattatgtcagcagaagtaagacatctggctatggaatcagacttcctggattcaaatcccatatctccgactcgtgtgatcctgggcagattctctgtgcctcagttagtagttacttcatctgtaaaggaagaagaatgacagtgttcagatctggtacacaatcacctggaaatattgttgctaaaaatatactgcctggctcccccctcagtttctggttccctctatcttgggtggggtcaataaatacataatgctcaaacatttcttgggtggttcagatgccttttgtgagccctcttgaggcataacacaccttgttgcctttaggcttttgtacttactgtgtctggtatgtgtaccccttttactaagaataaggtgcctctgactttcccattctggatttggtactgtaggaagtcaccaccactgcagcagatcagtgtcaaattatctaaaatgtaggaagaaaaggagcacatttcaattctggccaactatttataaaagcattaagttcttttacttcaaggcatttaacattttgcaatttggggtttactggtttgctgtcttccctattaagcgccttaaggctaaattctatatcctcaatgtcttgtcatataatcttttaattatatttataatatggttgaaagttacttctctttagaaattttctttactgagactgggagcagtggctcacgcctgtaatcccagcactttgggaggccgagggtggctgatcacaaggtcaggagtttgagaccagcctggccaatatggtgaaaccccgtctctacttaaaatacaaaaaaaaaaaaaatgaaccgggcatggtggcgggctcctgtagtcccagctactyrggaggctgaggcaggagaatcgcttgaacccaggaggtggaggttgcagtgagccgagatcacgccactgcactccagcctaggcgacagagtgagagtccgtctcaaaaaaaggaaaaaaaaaaagaaattttctttactgaamtaaagcatctcttacaaggtgtccattataaaggccacattacatgagttgttttcttactgtgccattcatttggattcatctgcctttgctacttggacattttagactggactgccttcattttctgtaggttttagctggaacttaatttggtttactccaagtaagttggtaggtgacgacattgttggatggatccagaaatgaaaccaggagcaagcaggtttagttctggatttttggttaagtattttatttagtgaatcattcctaattcatttagatttgaatgtgtggttatgtttttctcaggacattcaatccttgtgcattttagttttcccattggtaaaatgagataataggctaggtgactgatctctaaacttccttccaactctgaaatttctgctattcmaagtaaaaatgcacagggatccaaatatttaggtgttgttattgatcgtcgagaaataagacttgttttatgttttaagatctcccattttataaataacttcattcagacgcacaaaaaacctttggtatctgtaaaagttaatttccttttcttgattaccctgatttttttctggagcttttcattatctgttccttatttgagtgtaatccagaaacttcactgaagcagatgtagggaggctgataagtagatgtaacttgtgttgtgatgaaagaacttgccaaatgatttttctcattgtgctgctaatgcatgaaaaaggttaaaatgataaaatctatataaatgaatgattattttgcttttaagtagcatttaggatgtttttgttttcatttaagcaccaaggatgacattgatcttgatgccttggctgcagaaatagaaggagctggtgctgccaaagaacaggagcctcaaaagtcaaaagggaaaaagaaaaaagagaaaaaaaagcaggactttgagtaagtatattttaaatatatttgatttttatttgttttggtactggattcacttaataaaaactataccagtgcttcacaatgtattttaatccttttctagtgaagatgatatcctgaaagaactggaagaattgtctttggaagctcaaggcatcaaagctgacagagaaactgttgcagtgaaggtgaaagacagacctttgttacctattcgtatttcgtattctattctttcttcttaatgttggtttggggagctacatttggaaacttttgagcagtgtacaatatgttatttaaaagcttctatgaaatctgatgtcaaagggaaaaataggtattttgtggtatgttgattgttcataaaattggtacatttggagatgtgatgtaatcactcgttccatcttcagttttctctgttgtttctttttcatccttcgaatttggataagcctcagagtaatgggaaaatcatagatattttttcttctttcaacttgtcccttaggctttgtaaagttagtaaatgggtggtgactagtgcctgtttcaagagcccctggattctgcaatttacaatgatgcgagatgtgtctgaggccaaggccaacctctcttgcttgtttgaattttatattcctgtgaaaaagactttgaaaaagattttgaaatcattttgagatttttaaaaaatgtttacttaatgaagcacatgactctggtctcaattataattctgttaattttttctaacaatggaaattttttagccaacagaaaacaatgaagaggaattcacctcaaaagataaaaaaaagaaaggacagaagggcaaaaaacagagttttgatgataatgatagcgaagaattggaagataaagattcaaaatcaaaaaagactgcaaaaccgaaagtggaaatgtactctgggagtgatgatgatgatgattttaacaaacttcctaaaaaagctaaagggaaagctcaaaaatcaaataagaagtgggatgggtcagaggaggatgaggataacagtaaaaaaattaaagagcgttcaagaataaattcttctggtgaaagtggtgatgaatcagatgaatttttgcaatctagaaaaggacagaaaaaaaatcagaaaaacaagccaggtcctaacatagaaagtgggaatgaagatgatgacgcctccttcaaaattaagacagtggcccaaaagaaggcagaaaagaaggagcgcgagagaaaaaagcgagatgaagaaaaagcgaaactgcggaagctgaaagaaaaagaagagttagaaacaggtaaaaaggatcagagtaaacaaaaggaatctcaaaggaaatttgaagaagaaactgtaaaatccaaagtgactgttgatactggagtaattcctgcctctgaagagaaagcagagactcccacagctgcagaaggttggttaatactttagaggaaagagcaaaaggcttttgattcacagtataagttgtaatcattgtgccccaaggtcgttttgttatttgtccatgggtataaagacacttgattgtaaggagccatctaaaaaattacgtctaagtatttgacttgatttgcattgttaattctttacatatatagtataaatatctttcagattatttatgtacagactggaatttttatagaattgcattatgaaaactattttttttgctgttgataaaggctatagaagttacttaatgaaaaatttattcttcctttctgataactcagtgtcagataatatttgaattctttcctgtctttaaaaacctagttcaatttatgaaattcacaaagaaatgttttcatgaagttgctaatattttctgcttcacttaaaactcaacatgctaaaattagtgtcttttaagcaataatgagccatttttttaacaaccaattataaaataaaagttctagctaatttcttcctcttatttagaatgaaaatagctaaagatcagatggtttgcatggccatactatattcttaaaacagtagtttttgggctgggcgcggtggttcacgcctataatcccagcactttgggaggctgaggcagatcacgaggtcaggagatatagaccatcctggctaacatggtgaaaccccatctctactaaaaatacaataattagccgggcatggtggcgggcgcctgtagtcccagctactcgggaggctgaggcaggagaatggcgtgaacccaggaggcggagcttgcagtgagcggagatcgcaccactgcactccagcctgggcaacagactgagactctgtctcaaaaaaccaacaaaagcagtagtttttcttttgactggaaaacttttaatgggaaaattgacacaacttttttttttgagacggaatttcactcttgttgcctaggctggagtgcaatgacacgatctcagctcactgcaacctcctctttacaggttcgagtgattctcctgtctcagcctcccaagtagctgggattacaggagcccgccaccatgcccggctaatttttgtatttttagtagagatggggtttcgtcatgttcgccaggctggtctcgaactcctgacctcaggtgatccatgcacctcagcctcccaaagtgttgggattacaggcgtgagccaccgtgcccagcaacttttttaaatgctagcatatttattatctggatatattcgaggaggaacaccatgaaagtaccttcatagcttttaattctttagagttcttggagtataactacctatatttttgtattttatcctactaataccccctaaagtggacatcattctcattaactccatcttgtagaagtgaaattagctacagaacttacgtgggtgttagttcattctgattgttagaacttcatataagcatctgttggacaccagccactcaggtaccatggatttagagatacattaggtacaggattgcccttttgctgctgacagtatccttctgtcttactgtattcctcaggacatctgagaccaacatcagtattgcagacttctcaggaggccatctgtgagttattctgagctattctagttaccaaagtgctcaggatgccttgatgcctgtagaacttagcctgctgctggcatcggccttggcccattatggtccttgaattgtggttgggttttgctcgtcatcaccacagggaattgttttttcatttcaatgctttgcctttattctttttggtagatgacaatgaaggagacaaaaagaagaaagataagaagaaaaagaaaggagaaaaggaagaaaargagaaagagaagaaaaaaggacctrgcaaagccactgttaaagctatgcaagaagctctggctaagcttaaagaggaagaagaaagacagaagagagaagaggaagaacgtataaaacggcttgaagarttagaagccaagcgtaaagaagaggtatgttttcatgaagttggtaacattgatattgtgtttaacttaaaatctattctctgtaaaatatctttactcttctaattctgaaaatttcatagttgcatggtaattcagttatattattgttccgatacaaataataagatgaagaggtacagcacatcttatctttattttctcaagaacagattgctcgatacataagttgcttatgtatcattgccaataatctgatgtgatattaattaataatcatgtataacatttaaaatactttgatttggaatctcctaacataatactttgcatgtgtctcaagagatttatttgaagtttggattgtttacatttgaattttatagttcattaaatgaatacaggttttgtctgacatgtactcttttataggaacgattggaacaagaaaaaagagaaaggaaaaagcaaaaagaaaaagaaagaaaagaacgcttraaaaaagaagggaaacttttaactaaatcccagagagaagccagagccagagccgaagctactcttaaactgctacaagctcagggtgagtggtactcttcattaactgaatggtcagagagctctgcacatgcagttatatcccttaatgttcagaaggagaatggaatttgcatcaggacagttcctatgaaaaatctgtgaaaaagttcagtaaaacgtaaggaataggtgatgtcatttcattgtttaggaagatgacatctacatgaggataaaaatttatatgtaaatgatagtatgtctaaataagttatcctcccacaaacaagaatagtgataataatagaatgagtccctgtgtacctatcagccagcttcaacaattaggaccatttgacattcttgttttgtacctctccatctactttttatcctagcatgttttaaagtgaatcccaaaaaataaaaaagaaatacagtgattcccagacagcatattagtttgcccacatgaccacggtgaaaaagtattcatgaccattttttttaaccctttccttactttctgatgcaacaagatatcccaggttcatcttgcatgggctgagacctggaatcggttgtttatccaaagagcttttgttccttttagagggtaatagtgtttagagatcacaactgggcatataatttattacttttttgaaaggtaaggtgatttaaaatagtgtctttgctccaatgagaagaatatattgggacctctcttaaatttcctgctcctatattccctagatttttatattacagtcattttggtgtttatgctataattacagtaatagctaccatttattgtgtgcttagtgtgtaactgatgctacaatgtctttgacattgtctatttttccctcataaaaaaatcttatagctatttttacttccatcatatagatgaagaaatggtggttcagagtgtaaacagcttacccaaggccacagagctgaaatttaagctggtctgtgcaactttttcttacgcatatgttcagctaggarcattagatgtgaagaaacccagtacttagattttagaaagttttattcttaatggagaatatagcttttgtaaaattttaaatgaaattaggtacaaacttgaatatagttagcattcatacatcagatttcattggtgactattggagaggctaaaagcacccatgaagaaattcagatgggaccaagcagggagtaatttgccagtctcaaaaatgctgttttaaggagcagttagacttgtagttatggaaattacagtgtagaatggtggacttttagcatcagtctttagcattaggcttgtaagagatgctctctcaagtggcatccctgackctggtctcttactcttcatagtgttgtccagtgtttaccatcttattagttccctattgtctactaataagaatccaaattccttagcttgacattcaaggttcccccccacccacagcccactcatgtgagtcatctcattaaaagatcctacagtgttgtttcatcgtatgtttgaaagacagctgcttaccacatttattacctagaatattgtaaaacttattcattgagctaaaaatgtactctcagagagtgtaggcatctgcaggtgtcttcatataattgctctgaaatgtgcagcaggttaacttttcagtcatcctttagcctgtgactactaagcatatmcacacacacatatatgagtactttatcaataatttgtaataaactcatttcaggcaaagagcttcttcaagaacttgattgttatgtctcagtttgcaaagtgaatggaatgtctaaacacatacaagtcttggtgttgattccaagtacagcagcttatttgagagtctgagacyagagcagtagtcagttgattaagtctagggtgttattgggaccrcccttcaggtaatccagcctacagtttcccctcaggcccatgcttttcatcttagtaggtgtaggctgctaggcaaggaaaacttaaagtgatgatctctgcattctcagctggctttatcctctttctttggtttgtttaatgtattcgtcttaccagtcatagctatggttttaccattctagccattcttcagtacatgcacaacacacatccatatacattcctackttagagataacatttttagtcattttcctttattagtgacttcattcaaaatcccatggtatacaatttctgttgtctttattctaaggcttctgcccatagtgagagactgagtcagtaatccagtaatctgtagattcagttcaatcccagtcaaaatcacagcatggtattttgtagctatctgtcaactagttctaaaatggatatgaagagaccagagagttagaatggccaaaatatgtttgaaaaaggagaacaaacttagaatacctgatttcaagacttagtataaagctataggaattaatacagtgtgatattgccagaaagatagacaaacagataaatagtctatacatggttagtatataggtgaaaggtaattcagtggataaaatacagtatttgtagcaagtggtactagaacaattggacatctgtatgcagaaaaacccaaaaccagttttaattcccactgtataaaaattgacccaaatgggtatcatatgtaaatgtaaaatatacaataatactttcagaggaaaacataggaggatatcttgtgttaggcagagtgcttagataggactctaaaccataaaaggaaaaaagatacattttgagaaagaccagttcagaacttttctctgcaaaagacactgtcaagagaattccaagacagtacctccaagtcagatatctgagaaagaattaacatccaaaatatataaagacctctcaaaattcaactataagaaaaccaataagttcatttaaaaatgggcaaaaggtatcaacagacactttcaccagaaagctatacgcatctgaaaagaatgttctaaaaaaagagaaacctttaccacattcagagcagttgaaactcttttttttttttttctctctttttttgagacagagtttcgctattgtccagactggattgcagtggcgcaatctcagcccactgcaacctctgcctcccaggttcaagtgattctcctgcctcagcctcctgagtagctgggattataggcacccaccaccacaatatatatatattttatataatacaattttttgtatttttagtagagatggggtttcaccatgttggccaggatggtcctggactcctgacctcaggtgatccacccacctcggcttcccaaagtgctgggattacaggcatgagccattgcgcctggccaaaactcttctgcattagtggtgggaatgcaagatagtatagccactttggaaaacaactggcagtgtctttataaaaattaaggtcatatttaccttatgtttcatcattcacactacaaaatatttgcccaagagaaatgttcacacagaaacctgtctgaaaatgttcatacctgctttattcataattgcaaaaaaccagaaacaactcaaatgtccttcagctgttgaatggataagcaaactgatatatccatacaatggaatgctgcccaacaatgaaagtaaacgaagtattgacatgtgcagcagagtgagtgactctcaaatccattatgatgatagaggccagaccgtaagattccatttatgtgacattttagaaaaagcaaatcttttggttggagaacagatcagtggttaccagaggctaagaaggtaaggagggtttgattacatggagcagcacaggatgatggagtgatggagcttttctgcatcttcattgtgatggtgatacacgtatcaaaactctcactgtatgtgaaacgaggatttttactgtatgtaaattttaaaataccttatatgtaaaagatacaagtttttccatgaatatcctttcatattttagggtatgtgtctctgtggtgaatgaaatgctatcctttaaatagtacttctcaggtgacatgcaagtagtataagcctgaagtttttcatttttatccctcaggtgttgaagtgccatcaaaagactctttgccaaagaagaggccaatttatgaagataaaaagaggaaaaaaataccacagcagctagaaagtaaagaaggtttgtatacaaaatagcctctaatttaggaaatatgttgtttgcctttcccccacaatcttcaaaacagtgtctgtaaagaagaaaggaaaaaatccgaaatgcatattgaaacttattttctaaacttatttcttattaatgccattattctcacttgattcaaatgacaagctaatggaaaaagtattttactttgaaaaatctgggttctaccctatgaatattgtaactgttgttaactctgagaagtaaaactaccattcttatcttttcttggtttccttcttagccttctgtgatttttgtattttatttattgagcagaaagagtagtttcctgtaaaacatatgactatatttaaacattttctaaacttgaagaaataggtttgcacaggctgggtacagtggctcacgcctgtaatcccagcacgctgggaggctgaggcgggcggatcacctgaggtcaggagtccaagaccagcctggccaacatgatgaaaccctgcctctactgaaaataagaaaattagcctgtcatagtggcaggtgcctgtaatcccagctacttggcaggctgaggcagggagaattgcttgaacccgggaggtggaggttgcagtgagctgagattgtaccactgcactccagcctgggtgacagagcgagactccatttcaaaaaaataaaaaataaataggtttacactactgttttttattcagtacttaatggagtatcttaacagaaattatacaccaaaaaaaatattatcttggtttctgcccctttttcagtgtctgaatcaatggaattatgtgctgctgtagaagttatggaacaaggagtaccagaaaaggaagagacaccacctcctgttgaaccaggcgggtagtgttatctgattatttaattagtgaattcttattaaatagtgttggtgtgtcataagttgtcttagttattataaataattggggagaaccaaataagtatctggctggatggccctctttcttcatagttctttcttttctatttcttttcatttctactttgaataagtatccaagtgagacttgaatcagttgtgttcttttcagcagtgttagaaaatgttttgtagaaaggatacactttgggagggtgaggcagatggatcacgagatcagaagatcaagaccatcctggctaacacggtgaaactccatctctactaaaaatacaaaaaattagccgggggtggtggcgggtgcctgtaatcccagctacttgggaggctgaggcaggagaattgcttgaacctgggaggcagaggttgcagggagatttcagtgagcctaggttgcaccattgcactccagcctgggcaacagagcaacagtccatctcaaaaaaaaaggaagaaaggatagtaggttttggattttctctgatgcttttatttatgagtcagaaatctcaaaaaaagatctgaaggtcttcatttaatgcttcagaagcaaattggaaggatttttaactagaactttttaagaaccataaaaattggcatttttagaccttcctaaaggtcggcttctattyacaataatcagagaattcaacttactcattgtggggtatctgtgtatatgttgaggagttggggaaaaatctctggttttaaaaaaaaaacattgttctaactcttacgactagatattgatgggagagctggggctgcctaaatgtatgtttggtattcaagagaatccccagcgattaaagataggatcaggaatgggaaaagcctttacagaatactaagcctgatttacattggtgaattatattattgatagttcctttccttctttttctcttttctcttcygagcgaataggatcatctcacctgggtagacctcagcctagcactgatatgacgagattagagaaatttagattgatatgcttaatagcagtccactattttagatcgtatttttagcaccagaaagaattgctaatttagatggatgttttgggtacctgagtctcatttcctcctcaagataacttatgcaggcttgttagtaaataatgattatttcagggaagcaggtaccacatgtcctacccgtcatcttactttcatttaagaatagttgtgcctggttagatttcagtaaagaaaagcattcttgttaagaagagtattaggtctttaatgtctaaataatattcagaattttagctttctggctgttttggggttatgagcacagcattgacccagagtgatggtggtagttttgtaccttcaacttcagaatttaagtatatttaaatacctgtaaaggttaaaagcaaaataataaattccttgcataaagtatgagttggatgatcaaaaagaagatatatatgaaatttcatttgttttcaagaactgagtatattcatgtagctttttcaagatctaaagaaacatttaaattaattaaattaatgaaacaattagcttgaatgtaaaattggttaagtttaatatgttggcagtagtaggaaatggaagcatttaagtaatagtaaattataacatgctagctatattaaaaagatagttctggctgggcgcggtggctcaagcctgtaatcccagcactttgggaggccgaggcgggcggatcacaaggtcagcagatcgagacaatcctggctaacacggtgaaaccccgtctctactaaaaatacaaaaaattagctggccacggtggcgggcatctgtagtcccagctacttgggaggctgaggcaggagaatggcgtgaacccggaaggcggagcttgcagtgagccgagatcacgccaccgcactccagcctgggcgacagagcaaagactccgtctcaaaaaaaaaaaaaaaaagatagttctaaagataatagctgcatacatattttttacataattaaaacattctttttttatgtcagagcataattttttacttttttctaaaagaccttcatatttctaaataatttttgtgtcttaaatgcaaatttttacttacagaagaagaagaagatactgaggatgctggattggatgattgggaagctatggccagtgatgaggagacagaaaaaggtgaatacctcataagcacacactgatacatccagtggttattagaaatgaatgatatatatttaaatgaatagtcttttgattatgaaagccatatgaacatttctggggatagggataagtctcttgttctctcctttgccatggtttctaagtcctcaagtggatcttcattttgtgaatgagtggttcctcagaatgttatttgtaagatagctgcctaaggtttagaatgcattttttcagagtgatgatgttacaaaatagggttgttactaaagctgacctacaaaaagcactgttaacttaaaaggtaatgagataaatactatagttcctgataagtatgaatagaaagtaaacgtttttgtcattgtttccccttctttattactgaaatctctacttcgagatttaatttcctgttaattttactaacttactgataatgatatctggctctttgatttttttcagcctccccccatctttgtttttaaagctatacctttttctttaagcatggctttagtcaaattctgtaagtctgatatgttgatattttctcattttcattttgatgtattaagttttacaagatttatttagtgtatttcttttttttgagatggagtttcacacttgttgcccaggctggagtgcagtggcgcaatctcggctcacaacaacctccacctcccgggttcaagccattctcttgcctcagcctccagagtagctgggattacaggcatgcgccaccacgcccagctaattttgtatttttagtagagatggggtttctccatgttggtcaggctggtctcgaactcccgacctcaggtgatccgcccgccttggcctcccaaagtcctgggattataggtgtgagccaccacagcccgcctagtgtatttcttaatttacaaaaatgggcattttctaattgtcttttgttacttcattgtgatcagagaagatacatgattctatcctttgaaatatgttgattattgctatacaacctagcatggtcagttattgtaagtgtttcatgtttggaaagaatttatattctgcagtagttggatgccttgctttctatatttaggtcaagtttgctaatcattttgttcaagtctttcatagcgttctgagggtttttttgtttttgcttttgttttttttctgatctgttttttctctctgttactgggaccaatgccttaaaatctcccatcatgattgtagattgtctatttctcctgagttctgttaatttttgctttatgtatttttatgctgtgtcattaggtaaacacaatcttgtatctttctaatgaattgactcttttatcattgatatatatatttctaacaatgccttttgatataaaagtctacctaaaactcatataggtacacgagctttgatttacatgatctttttctatctttatgactctttttgtatccgtaaatagcattatcttagtccatttgttctgctgtaacaaaataccacagactcagtagtactaaagaacagaaatgtgtttctcacagttctggaggctgggaagtccaagatcaaggcaccagcattggtgcctggtaaaggctgctgtctgcttccaagatggcaccttggtgctgcatcctccagagggaaggatggctgtgtcttcacatgatggaagggagggaagggcaagaggagcaaactctctttgaaggcacttttctgcgggcgtgaatccatttatgagagtgacttaatcactccccaaaaccttccccaccaccctcctacctcctaccagcaaaatggggattatgttttaaacatgaattttagaggggacaccatttacaaatcacagctaggatctagttgagattttttcaatccagtttgtcaatctttatattttacctagagtacttagcctgttcattaaatgtaacatttggtgtaattaatgaagtatattgattttaaacatttcatcttactaagtcgttttttgttctgcctggttctttttctctcctttctaatcatcttttggttactaggtttttaaatttttatttttttttcctttcatgagcttagcagttgtatacytttcaaacaactttttagtgattaagaaaatttttagcaagtacctttgarctaacaatgtctgatgttatcctctaacaatgcagggactttagagtacttgaatgacatttacccaatactctatttagatatcattgctctcggccaggcatggcggctcacacctgcaatcccagcactctgggaggccgaggtgggcggatcacttgagatcaggagattgagattagcctggccaatgtggcaaaaccccacctctactaaaactagaaaatttagctgggcgtggtggcgtgcgcctgtaatcctagctactcaggtgactgaggcatgagaatcgcttcaccctgggaagcagaggttgcagtgagctgagattgcgccactgcattccagcctgggcgacagagcgagactcttacctaaaaaaaaaaaaaaaaaaaaagatataatttttctcatttcttttcattatctatttaaaacctcaaattagcttatattttatatagtcaatacttactatttataagtttacccacattcttaacattttgttgcgcttcgtttcctgcatcttgtaccttccatttgagatcatttcttcctatctgaagaacactttagagttttttttagtatggatcagttagtaagacattctgttttgctttctaaaaacatctttattgcatcttcattctttagttttatatgtttactgagtgaggaattattggttgaagtttaacactttgaagttattattcccttgccctggctttcattgttcctgttgagaagtcaggtatcagcctaaatttttcatatggtcttgcttttcagcagttttrtcatgacgtacccagaataggctttttaaaaatatattctacttgtagagctttattaatatatggttttatgtttttatcagttttatgttaggagtcattttctccctcagaattccaatgatgtctctgataggccctcttattgtatcattgtttcctattttcttttctgtattttccacctagtgagtctctgtggttcattctggattgcttctcttgactgtcttctaggtcactgattttctccttggctctttctattctgaggttagatccatcttttgagttctcaatttcatttgttatatttttcagttttagtatttccatttaactttttttatagttttaattcaccttctaaaattttaactttgtcttttgcttctgactgaatgttagaagcacagccattttaaaattttgattttatgactttattaaagtccttttggtgttttatatgttggttcttctcacgtaaattgttttctcatgtgccttgctatttttatagctggatattttgcttggagaagtaatttgaggtcaaggatgatgttttcttttctccagagctaatttatgtgttacttccacaaggtacctgagtgaactagcaatatggaataatcttattctagatttagaatccagaggatctgaaggtgatctgccaataatggggagatcctgtttatttcttattcatccttattcctagggtacagctcttcatgattgtaccccacagtaagggtgtaacccaatgtctgctcactgcaccccactgaattsttagtattttggtaggtctggactcccaatgcagcttagcctttcatctgcctcttcccgaatcaacaaatgaccataaggggaaagtggtactaaagactgttccacctccttgagttttgttctcccatggattctgtcttactaatactgacttcagtctggattactgccttaaggttttactgttaagtgacagayttcgttttagcatatagacaaacaccttgcgtttatgatgtatgaaaacaccatgttactgccttaaatacaagttgagcctctgaaattcaaaaatctgaaatctgaaatgctccaaaatcaagtttgagcaccactacgtgacgctcaaaggatatgctcattggagcatttcgtatttcaggtttttccgatttcagatgcaaatattccaaattaaaaaaaatatgaagtaagtatagaatgcaaatattccaaattttaaaaaatctgaaacagttctggtccaggcattatctcctccccttactttaaagcaggcttgtccagtctgcagcctgtgggccacatgcagcccaggatggctttcaatgtggcctagcasaaatttgtaaactttcttaaaacgtgagacttttttttgtgatttttatttttaagctgatcagctattgttagtgttagtgtgttagtgtattttatgtgtggcccaagacaattcttcttgtaatgtggctcagggaagccaaaagattggacacccctgctttaaagtctcttatcttgatataaatctatcatattaatgtttatttatttaaaaatatatttgctttcgtagtagaaggaaacaaagttcatatagaagtaaaagaaaaccctgaagaggaggaggaggaggaagaagaggaagaagaagatgaagaaagtgaagaagaggaggaagaggagggagaaagtgaaggcagtgaaggtgatgaggaagatgaaaaggtgtcagatgagaaggattcagggaagacattagataaaaagccaagtaaagaaatgagctcagattctgaatatgactctgatgatgatcggactaaagaagaaagggcttatgacaaagcaaaacggaggattgaggtatttattttaccgtttctctctacttttcttcccactcctctgtgatgattaaaacagyactctacaactaaagrctttgaacagcactttatgtattctcaagaatagaacaccgttcagtttttgtaatgttgaaatattactggcctttgatactggtcttacccaaggaccccccgtccccgctcttacctaagatagaatggtgtgactacttcatttttttcttgttttctccaaattttaatgtactctttgagtgatagtttataagtatgcagaggtattctgagcatatgccctctgcttataaacatcagttatgtgtttgcctcacatatttaggttagtcaccatgaggcatctgatcactatagttatataaatctggtgggttgatgaggcttctatttagtaaagtccgatacctgatagactttctgtatttttcctacttaatgcagtagatttcagtatgcttcaagagaaagttttctttagttctgtcagcttaatgtaaataatacattaaaatctagtttgcttgaggatattaaactattttaaagctaaaaactattttagctttcctttttgtgtattattaattttttaattttttgttttactacctatatatcaacatttgctttttctcctgtaaagtctaggtatggataaattgtctaaatttctaaaggactaagaggatttgttattctaaattagggtttctcagccttggcactattaaaatttgggggccagataattctttgttgttggggacagggactgttctcttccttgtatgataccaaacaacatcttggcctttgcctactagatgcctgtagcattcttccccacctggcacctcagttatgactgtcttttcccgtagcacctactcccaccagctcccttgccatatacccatgttcgagagagtgatggaatatctgtactgtgcttgctgattaacaaacaaaataagtataaagcagaagagtttctcaattatcctgctccctagattagttaatggtagtgtgtatgagcttcatgtttttaaaaataaaggccctagcccccaatatagtcatatgaggggttagggcttcaaggtaggaattttggggaaatgttcagtccataacaaacttcatggatccataaaccttgctacatattatgattttctgaaattcactccattcctgggtcagaatctccattgtggaatggggtttgtattcttgtcctgtcattgcttcagtatacttagaatttctgagtcagtttgtaacttattgccctccaaaaatttttaacacttcactaagtgtgggagagagaggcagttttcagccatatcaaataaagtcatgatgtttgaatttgagttgtatgtactgtgaggttgtcgggtactactctttgctagtgattaagtcctactttgtgctcatccctggcatctcacttttggtattttaaaaagtttttcagtttcagtttctaccaaaaaatctaatgtctagtactagaaatgcaagtaaagggttcttacagaaatggtttttagatgaaaaatagttttgtaaatgacattacttcatagtttttgcttcaagtttatctaatttgaatgccaactttactgtatttgagaggtcatttcaaagaaaacctattgctggcatgtgtttttggtcctcagaaagctgaagcatttaggtaaatgcaacggagaagcacgttgtggttcaaggaaaagctttctcgctcttactggtgttcataaagtggtagagccttggaaagtcaggacatgttttacttatttaagctgaaccttaaataaacagtctcctccttgaaaggttttatagcatttgtatattggataaaagtgtgaaataaattgcctttaaaaatctttaaaattcttaggttccagtgaattttttaaaatgtacaagttcacctgtttttatataaatcctcacacaaattcagggttgcactatatagtcagtatgatgggaagattgattccttttctagtcattatattccattaaagtaactgtgtacaaaagtattcaaaaattttgaaatgacactttacaatattcctattcgtattcagcagtgctgctgtgaaatctaaacaggtttttccttatccagaggtgctgtgatgggaattcgattgtaaagttcacattataaattccaattatgtgtagtcaaatcaacaaagaacttggatgcaggttgtagcattcttttgccaaggcaaaacagaaaataaggatagtgaggatttgaaataatatttaatttttgatttttttttttttttatttctagaaacggcgacttgaacatagtaaaaatgtaaacacygaaaagctaagagcccctattatctgcgtacttgggcatgtggacacagggaagacaaaaattctagataaggtaagaaagtattaaatgtattgatagaactttgaaaataagtgaatggtaccttataaaaaaaaactttagagaccaataggacatataagcaattctgcttacrataaataagttgctaatttcttattatttttgctgctatcttttccatgttcaaataccaatctgtatttgctgtcttctcatagctccgtcacacacatgtacaagayggtgaagcaggtggtatcacacaacaaattggggccaccaatgttcctcttgaagctattaatgaacagactaagatgattaaaaatgtaagtacattgtatttcatgtattttaatctctgacaaaaattaagatatgaactatttcaaacatagaaaaaggacagagactaggataacagctccatatactcaccattcagaattaacatgtactattttgcctattttgctttagatcattctttttaaagaatamaacactacatattataggagctctcacattccatttccttccctccctctcccagaggcagccactattccacagttagtcatttgcctccatgctttaacactgataccatttatccccataatttaaaattttgtttccttctctactcttttccccttctaatctaatcaatttcttttctttttctcccatatttttctacttgtttggaggtattcagtttatgtatgttaaatgtaacacagtaagataaatgtaaagcttaaagaatcagtataatacacaccaccctttaagtgtcacctttgttgagcaatataaccttgcaagctgcttcagaagccctccaggtgtagctttccaatcaaagatctcttctccagccacaactttttaagataatctctaccttttaatgtgttaggagttgcaaaatgttgatactcgaactccatcagccattattggattacttctatagagaaacgttacctaatctactatttgattattcagtgatggcttatttaggaaaggcagaattaatgcctgatcctttaccttcttttaaccagcttttaaaataaaaagtggccaatatgattttttttttcttttgtttgcccttcatagagacagggtctccctatgttgcccaggctggtcttgaactcctgtgctcaagtgatcctcccacctcagcctcccaaagtgctgggattacagatgtgagccactgtgcccagcctgattctgttttgtattattatgaactcatggatttaaacatatttactgtgcattagtccatttcagttattattgtgctgagatagtcccatctttgcccagtggttggctcttgaatctttctcatacaattctggttgtcctagttttggttgcattcatgctgtctgatatagcaggatgttcccggctcatgtaatatagaaactacccagactgagaactgggccttgttaataattcctcagtttcattatcacagagcaggtgaaagtggtagctttggaactgagaagcagtaagttgaaaaacaaacagagcatatgttattatatgctaatgtccccttttattccttattgagtcttagttctgcatgtaaaaagagtctatgagtttgtctctccagtttttgttttgtttctttgtgactgggttttatgaagcgtgtcttctagtcaatttctaaggaaggaattagaagaattaacattccttgaatttttgaatattgaagagttattttgtggcctttatactggaaagtcattggccacatataaaatccttggttgacattttcattccttaagtatcttgtgtcccatttattctcgcataaagtattgctgttaagtttgatcatcagctgaatttcgtctttttataaggcctaygatcgttttacatcttgatgtcgcttctgagttttccagttatgtggtgttctattataatatgtagtagtgaatttttattttagaacagttttcttgaattatagcttttcaaatttataatttattttcatcctattttaaacagtatttctatgttttagtcactagaggagagggttcataacaccttattccaccagttgccagaacttgaactctcgttgttattttagaacgtaaggaacaagattattattaggcctgtattaaagttcttgggataacctttatatgacaattgtaattacttactgttagtatataagacactaaagtggaaataattatggtgctcagtgaaccagaatgcggatctgaaatgttttacgttgcattattttgatgtagatcaggataccaaattttggaagatcatttgaagattagcaaaaagaaaatgtagataagcataatacaaaaagggggtgtgtgtgtgtgtgtgtgtgtgtgtgtgtgtgtgtgaaattagttggtcagtgttactttttagactaaaagggaatgtccagattagatctgttgtaatgttacttccattcatttatgtccttttgtccagaaagtcaagcatttatgacgttatttgaatacaacagggtatgcatttactctttaacacttttgatcaatgtggtaaatttactttaaaatgtacttttgggatatatttgaagtcagaattgctttaaaattggaccacataaattttcccaatgctgagaaccacctcttgcatgtcagatttctatagaatatttcagatgactgccctgcgattcgtatcaccacttacttaataatctgctcaaacttggactacagtcatagttgtaagaccttaagaaaggagatattttctcatttagtatttttttgttaaaatgcctttggattttaatgaaaatactgacaactgtactttgctggttaactcactgtttctaaagccatttatatggaaaagggagtagtgatactttcagagttttatggcaaaaggattgttytgtaaagaagctttcatgtctgactttcttaaactttgaacttttccccattgtttytagtttgatagagagaatgtacggattccaggaatgctaattattgatactcctgggcatgaatctttcaggtaagagcaatttgagtcttttctcatcaagcaatctacttgaaaccattaagtctaaaagttcagcagagtcattaacctttgagtagtaatttgatctctataactaccactccacctttgtacctcattgatttagtaatgttttctttgaatacttgttttttatagagggaagtctttactgctttaaaagagcacccccttaatgtggaatgcagaaaacatgctaatacatgccaggcctatctcctgtaaaacccgttacaagtggaatattatgctgttgtctcttgtccatattctttaacacagaaaacttggtcagtaaaattattagaaatattagttggttctaaaactagctcattccacttgaggtcaattcaagtgattggtagatgagcmtttggcaagttaagggctaatagtacttgaacaatttaatacatatactctattttgtttgggttttacagagaagtttaaaagtttaagaaaagtattaatttcaagattttctacttatagatcttttccttcttttcaacagtaatctgagaaatagaggaagctctctttgtgacattgccattttagttgttgatattatgcatggtttggagccccagacaattgagtctatcaaccttctcaaatctaaaaaatgtcccttcattgttgcactcaataaggtatgtgcgccttctgaaaaattaacctaggaaaacatgtttcttaattttttgtgattaaaaaaagtagtataattaacttacaagcatagctcattttattgtgcttcactatattgtgcttcacagatattgtgtgtgtgtgtgtatttgtgtatagttttttttttttaaatacaaattgtaagtttgtagcagccttgcatcaagcaagagtattaagtctgttggtgccatttttccaacagcttgtgttcacttcttgtcacattttgttaatttgcaatatttcaaactttttcattattacatttgttaggttatctgggataaatgatctttgttattttaattgatttggggtgccacaaaccacacccctataagatggcacacttagtcaatacatgttgtgagtgctctgactgctccagcaaccagctgttcccttgtctctttctctctccttgggcctgtttcctgagacagtattgaagttaggccaattaataagattacaatgacctgtaagtgttcaagtgaaaggaggagtcacacatagaatatcagtccagccacaacactcccttaagccaaagcctaatctaaagcaaggccctctcttcaattctgtgaaagttgaggaaggtgaggaagctgtcgaagaaaagtttgaaaccagtagaggttggttcatgaggtttaaggaaagaagctgtttctgtaacctaaagttacaagttgaagcagcaagtactgatacagaagctgcaacaagttatccagaaactctagctgagatgattgatgaagatggctacactaaacaacagattttcagtgtagacaaaaaagccttctattggcaaaagatgccatcttggactttcatagctagagagaaatcactgcctggcttcaaagcttcaaaggtcaggctgactctctagttagggtctaatgtggttggtgactttaagttgaagccagtgctcattgaccattctgaaaatcctagggcccttaagaattatgccaaatcctttgggaggccgaggcgggcggatcacgaggtcaggagatcgagaccaaggtgaaaccccgtctctactaaaaatacaaaaagttagccgggcgtagtggcgggcrcctgtagtcccagctactcgggaggctgaggcaggagaatggcgtgaacccgggaggcggagcttgcagtgagccgagatcgcgccactgcactccagcctgggtgacagagcgagactccgtctcaaaaaaaaaaagaattatgccaaatccattgtgtgctttataaatggaaatataaaacctggatgatagcacgtctattcatagcatggtttgctgaatattttaagcccattgttgagaccaactgctcagagaaaaagattgctttcaatatattactgcttgctaacagtgtacctgattacccaagctctgatggagacacacaaggagattaatgttgttttcgtgcctgctaatacagcatccattctgcagctcatggatcaaggagtgttttcaactttcaagtattgttacttaagaaatacattttatacggctatagctgccatagatcgagattcctctgatggatttgggcaaaagttgaaaaccttttggaaaggattcacccttctggatgttatgaagaacrttcatgatccataagaggacaaaatataaacrttgataggagtttggaagaagctgatttcaactctcatgtatgactttgaggaattcaagatttcagtagaggaagtcactgcggatgtggtagaaaaatagcaagagaactggaatttgaagtggaaccagaagatgtagctgaattgctgcaatcttaagtaaaacttgaacagatgagaagctgcttcttatgggtgggcaaagaaagtggtttcttgaggtggagtctccttctggtgagggtattgtgaacattgttgaaatgacaaaaaagaatttaggatagcaatcaacttaattgataaagcagtggcagggtttgagaggattgactccaattttgaaagaagctctattctgggtagaatgctctaagcagcattacatgctacagataaatttctttttttttttgagacagagtttcgctcttgttgcccaggctggagtgcagtgctgcaatctcagctcaccgcaacctctgccttccgggttcaagcgattctcctgcctcagcctcccgagtagctgggattacaggcatgcgccaccactcccagctaattttttatttttggtagagatggggtttctccatgttggtcaggctgtcttgaacttccgagctcaggtgatctgcctgcctcggcctgccaaagtgctgggattacaggcgtgagccactgcgcccagccaatgaatctttcataaaaggaagaatcagttaattgatgggacagacttctttgctgtctcttttaagaaattgctacagccaccccagcctttatgagctaccatcctaatcagtcagtagccatcaacatcraggcaagaccctctaccagcaaaaagattatgacttgttgaagaatcaggtgytcgttagcatttttagcaatattttaaaattaaggtgtatacattgctttttttaagaagatataatgctrtcacacacttaatagactacaatatagtataagcatctcttttagaagcactactaggaaaccccaaaaattgtgtggcttgctttattgtagtattagctttactgcagttgtctgaaaccaaacctgcagtatctctgagttacgcatgtataagaaaatgcaccccatgctaagtgtttaatttgttttgacaaatttacaaccactgtcattcagaacatagaccatctccatatttccagaaaagttctctcatgttactttgcagtcattctgctgccctccctaaactcaagctagtattgatctttctgtgtcatatggactagttttgcctgttttatgatttcatataaatggaatcatatagtatgtaattttttaagtttggcattttttgttactcatgttattatgctttrttcatgttgtcattacatgtataaagggtttttcctttttatttttgaatagtagtccattatctgaataatactgcactttatccatttatctgttgagaattctagttcctgcatatctttgcgaatactcgccctacctccagcattctagtaggtgtgtagttgagtgcaaaattattgtggtctagtttgtttccacagtgactaatggctttatgcatcttttcatgtacttatgcttagagagatgaccatatctgtttctttgaaaaatatgttcaaaatcctttgttctttattagattgttttattgttgagttttaagagttctttatacttctggttctatgtatataattcctttttcacttgtatgtactgctgatgtattcttatggtctgggacttggtttttcattttctttgttttgttttgcgtgtgtgtgtgtgtgtgtgtgtgtgtgtgtgtgtgttggagactgtctcttgctgtgtgtgtgtgtgtttttttttttggagaccatctcttgctgttgcccaggctggagtgcagtgtggcgcactcttggttaactacaacgtccgcctcccaggctcaagcgattcttgtgcctaagccacaggtagctgggattacaggcatgcaccaccacacccggttagggttgtttttttctggggggcgggggggcggtgtgtgtgtgtgttttagtaaagatggccaggctggtctcaaactcctggcctcaagtgatccaccgctttggccacccaaagtgctgggattacaggcgtgagccaccacgcccagcctccttttcttaatagtgtgttttgaagagaagaaatttctgattttggtgaaatccaactaatttttatattttatttatttttgggacagggccttgctctgtcacccaggctggagtacagtggcattatctcagctcactgcagctctacctcctgggtttaagtgattcttgttcctcagcctcccaagtagctggaattacaggtacatgccaccacacctggctgatttgtatttttagtagagacggggtttcaccatgttggtcaggctggtcttgagctcctgacatcaagtgatccgccagccttggcctcccaaagccctgggatttcaggcatgagccaccgtgcctggccccaattaatttttttacgatttgtgttctatgtaagtaatcttttcctatcccaagttcattaaatttttctctggtgtttccagatgtttaatagttggagctttttttacattgagatcagtgatcttttttttatatagtgtgaggtcagggtttactttttttccatagaaatattttgttatttaaagactctttgctgaaaaaattatttttttccccatggaattagtttggaatctttgtcaataattaattgaccatatatgtctgttcctagaatttatcttttgttccattgctctatatacattcctatgccactactaccctgtctcattatagcttcatagtaaagttttgaaagctggtagtggtaaatccttcaacttagttttctttatattgttttggctattttaggtccttggatttcaatataaagttttcagtcagcttgttcgtttccacaaaaagccttttaggattttgrttgggattgcgtttcaatctgtagataaattttgagagaattggctcttttagcaatattgcatcttttgatcagtgagcatggtatctctgtacatttacttagtcctctttaccatttttaaaaattatttttcattttatttatttttttaaatagagacgaggtctgtgttacccaggctggtctcgaacacctgggctgaagcaatctgcccacgtcagcctcccaaagtgctaagatttaagacctgagccaccatgcctggccaggccttctttactttctcttggcaatattttgtagttttattgtccacatgttggacatatttttctgaatttatccctaagtatttcatggtttaatgctattgtaaatagcatgaaaacttcttaaatttccagctgtttatcacatttacactcagtttgtatcttgtgaccttgttaaattcactgattaggcctagtatcttcttttgtaaataatgtgagtttttctaagtatgttgttatgttatctgcttataaatgcagttatgtttttttccccttacctatatgctttctacatctttttcttctttattgtactaactagaccttctaaataatgttgaatagaaggaatgacagtagacatcatcctttccttattcctgatattaagggaaagtgctcagtctttcacccttaagtatgatgtcagctgcagggtttttgtttttttggtttttttgtcaatgccctttattaagtttgaggaagtttccttctattctaggtggtttaaagtgctttatgtttttatttctttaatcatgaatggttgttgattgtgtcaaattcttttcctgcgtatgtagagatgttcatgtggattttctccttcattctgttaacaacataattactgttgaatttttagaatgttaaaccaactttacattattaaaataaaccctagttggttgtcatttgttatccttttgatatattgctagatttgatttgtaatgtttcattgttgttttgtgtctatgttcatgagtgatatgagtatgtagttttcttgtaatgtcttttatctggttttcatatcagagtaatgttggcctcctaagacgagttgagaagtgtttcctcctctrttttctgaaagaatgtgcaggaattggattatttcaaagaattagcttttggttttattgatattcttttctaatataagcatttaaaagtgttaatttctaattactagttagacatgtttttattatttagctttacaagcttcaggcttttcctttaaaggtgttgagcatgtttataaatattctaaggacctcatatgctaattttaacatcttcgtcatttcctactgatttgtctccttagtagcattcagattcgtctgattctttattttgtcaccctagactctgtccccagacagattatgcttttgattgtttgtttggctagcaagtatttttcatttcttctatgctcatttatctctcatgttgaaaagtgagggaaaatagattctgtcattaacaaaacagatttaatcctaatttgagcaataaaataattaaaataggctgttcccttagaaaatatatattttttaattttttggtatataattttatagtgatggtacttgctgggattgattgatttgttacaaaaactgtttcggaattccaacaatatacattaatagtcttaggataattctaggatgttatcttttgcaaacaaatggcagccacttaggaactcatggaggctgacaggggcagcatggcaccacagcagtttctaatttaagagcaggtgccgataagcagtctgaaaggagcttttggtacaataaagtgtatgagtaagtcacactgttctgtatatatgagacacacatgaggaattttctggagctattaatacagttcttgaatgttctgaattttttagagatctttctcatgaaaaaactttttcagattgataggttatatgattggaaaaagagtcctgactctgatgtggctgctactttaaagaagcagaaaaagaatacaaaagatgaatttgaggagcgagcaaaggctattattgtagaatttgcacagcaggtaagaaggccttccttctttctgaagagcctatctcagaatatgtattatattatctttataatgaagtcagcattttcattaatactggttcttttcctctgttgacagcaattactttttttaaattcttcttcccttttctcctttttctttgcagtctgaatactttaatttagaaaactgagttgacttagaactactttgctataatacagttaatgcttataggatatacatgatcatttttagtgtttatgaggagtttcaaaatgatgagccatttgctcatccggcttctagtgaggcacacctattccagatacgttttctttacagcctggcattttggatgatttttgctcctagggtttgaatgctgctttgttttatgagaataaagatccccgcacttttgtgtctttggtacctacctctgcacatactggtgatggcatgggaagtctgatctaccttcttgtagagttaactcagaccatgttgagcaagagacttgcacactgtgaagagctgagagcacaggtgatggaggtaatgatcaacttttcagtttattgttttttttttttttaaaaatagcaagttccttgagtggaggatatttactacttttagatttaatgaacatggtgcattgtatgtatgtctttctctttgcattaatgccttttaggttaaagctctcccggggatgggcaccactatagatgtcatcttgatcaatgggcgtttgaaggaaggagatacaatcattgttcctggagtagaagggcccattgtaactcagattcgaggcctcctgttacctcctcctatgaaggaattacgagtgaaggtatgctgaggtgggaagcattgacacgtggggacttgtacagtgtttagaagttctgctgagatggtttcctcactttgaaagctgtttgacttaatacagaacacatacatccctcgctctcccttttattttagttgtcatcatacaggaaggcctgtctgtcagagtagagatgtgtgaaagtacctgcttaccagactgggcctttgccagattctaaactacactgttwtggttctacactgctaaatacggttgactcttgaacaacatgagggctaggggcactgactccctggccagttgaaaatccacatatattttttgactccccaaaaacttaactcctaatagcctaccattgaccagaagccttaccaatcacatacacagtcgactaacatgttttgtatgttttatatattacatactgcattcttacagtaaaacaagctagagaaaagaaaacgtgattaagaaaatcataaggaaaatagatttactatttgttaagtggaagtggatcatcataatggtcctcattctcatcttcatgttgagtaagctgagagggaagaaggagaggggtaggccttgctgtgtttggtggcagaggcagaagaaaatctgagtataagtggacatatgcagttcaagcccattttgttcaagggtcagctgtagttttttaacatttttaattgtgaaataaaacattgctcctgaaaagtacacacaacatagaagaaaagtttaacacatttttgggaagcaaccagatggagaatcagaacgctgctggcacccagaagcttcctgtgtgcttcttcctgatcaactcccctgccttcccctcctaccccctgacctttcatagagttaaccatggttgcattttatgacagtaacaaatatccttgctttgctttgtttttgtgtctaagagtacttcccttagaagtgtctgtagactttatgtagaaatggagttattctcagtgtgtacttttatagctggctctttttttttttttttttttggtgataggctctcactgtcacccaggctggagtgcagtggtgcagtcacagttcactgcagcctcaacctccccggggttcaggtgatcctcccacctcagcctcctgaatagttgggactataggtacgcaccaccacacctggctaatttgtttacagatgggactttgtcatgttgcccaggctggtcttgacctcctgggctcaagcaatccacccaccttgatctccccaaagtgctgggattataggcatgagccaccatgcctggcctatatctggcttcctttagtgaaaaaaaaaaagtatataattttaagatttctattccattgtgtgactatatcacaacatatctatctgttctgttgatgggaaatgtaggtgatctccagttttttatgtttattttattttattttattttgagatggagtctcagtctgtcatccaggctgggattacaggtgcacgccaccacacccggctaatttttgtatttttagtagaggtggggttttgccgtgttggccaggctagtctcgaactcctgacctcagcctccctaagtgagccaccgcacccggcccagtttttgatttttgttgttactaataatgctgctgctgtgaacatctcttgatgtgtttgtgccagtttcccagggtatgtatacctaggagtgaaggccacacttgtctacagtgggtgtaacaaattatattctcaactgcagtattttagtttcattgttttacagcttcatcagttcttggatgttaggttttaaattttttttgccattctgctaagtgtgtagctcattgccgtttcagtgtgcatttgcctaattgttaacctggttggtcatttaaaaatgtttattggccatttatttcctccttcgtgagatgtacatttttcttctgcattatctttcttacagatttatatgcgcttatatattcaggataccggtttgttagttggtgtgttttgcaatatcttctactcttgtgactttttttttcctgtggtattttgagaaatggaaatatttaattttaatgttaaatttatcagtcttgtgattattgctttttgtgcctcgtttaagaaacctctctctaatatcatgatgagattctcttatatcatcttctactgctaaccacttttaaagtacatttggtaacaaatgtttttatctctgtagaaccagtatgaaaagcataaagaagtagaagcagctcagggggtaaagattcttggaaaagacctggagaaaacattggctggtttacccctccttgtggcttataaagaagatgaaatccctgttcttaaagtaagttcatttaaaaatttttttccttaaaagctatttgagttctggcatgtgtcagcattgcacatgctagggatggtgaccaaaactggctttgtctttgtgaagcctgccatttcttggcctcttagcaaacttgatgcttttgaattacttcagtttgtacaatcatagaaattggtataatttttatatgtactagaattataaaaataatgcattttattcaaataaaaaaatgagtcaaaagctagaagtcggctgggcatggtgaatgcacacctgtagtcccagctacttgggaggctgaggcaggagaatcacttgaacctgggaggcagaggctgcagtgagccaagatcgtgccactgcactccaacctgggtgacagcaggaccctgtctaaaaaaaaaaaagctagaaattgtatattctttttggcccatgtccattgtagtttcataaaagtggactttgagccatagtttgttcatttgccaaagagaaaatacaactgttcccagcacatggctcttgtgtcctggggccgtgtttattatttaggcagcatcaagtcatgctgttgggaataagctatcttagggccagtgagagaatagggcaggcctgtctcttcacccagtcctgagtatggagtggacttacgtcccttcagtggcattgataaacttgttttacttatttctggttaaaaatctcttcttccatttcccgacaagcagtgatggaggaaggagctgctgagatcatgagattatggtatttcctagttaacacagacaagctgaacttttgggctatcataacacattacgtttatgtggtacttttttaactttaaaaaaatttttcttctctactgtttaattctgcccacccatctactgtatttgccaagtggagcggagattaaacatatttcaaagttagtaaacctaagacaaaggtgaagcgaaatacagttagggtatggccccgaaatctcctccttcattccagcacaggttctgtgatgccttgctctatctaagccttagtttcatatttgcagatgagtacttaaccaaagagagaaacacaatttaattctagactgctgaggrtagaggtgtgttgacaaccttatcaaatctgatttcttttcaaggatgaattgatccatgagttaaagcagacactaaatgctatcaaattagaagaaaaaggagtctatgtccaggcatctacrctgggttctttggaagctctactggaatttctgaaaacatcagaagtgcccgtaagtaactacaactcgctccacaagtgaatggtggttggtcgtggtttttggtgccatcgccattacctgatacatacagataaacatggaaactcccattttttcagtatgcaggaattaacattggcccagtgcataaaaaagatgttatgaaggcttcagtgatgttggaacatgaccctcagtaagtaatttctcttgctatgaaggctttcatgttacgtagctatcttaaaactgtcctatcttaaaaaactgtcctctgtgacatactctgtttttcactgaatggtctttgatgtgttttaaccttttaggtatgcagtaattttggccttcgatgtgagaattgaacgagatgcacaagaaatggctgatagtttaggagttagaatttttagtgcagaaattatttatcatttatttgatgcctttacaaaatatagacaagactacaagaaacagaaacaagaagaatttaagtaagttactgtttttatttactttgagtctttgttaatgaacatgattgagaattactgaattccagaaagggctgtaaacagcaaaatcatggcatttactcatctaccagaggctgcatcctgaaatggtgtgttacaaaccagaaacccaacatactggggacattccagcagtatgcaaacaagtcttgtctgtgacttcagtttaataatcttggcagacttgggtcttgttaatgggttcgtagttattaaatgtagggactttatgttgctcatctgggattatatagattggaagtaacaaaacttgagtgaggaaaaccgggaaataagagattctgtgggagagaagtccattcctctaccaaactttcactcaagcactcacagtacctacattgctgcagtggtagaggaggcatcagcagagaaccaggccagcctccctcctcctttccctttgagacagggtctcgttctgtcacccatgctgcagtacagtggcatgatcatgggtcaccccaacctctgcctactgggctcaagtgatcctcccaccttggcctcccgagtagttgagactacaggctcacaccactatgcctggctaattttttgtatttttggtagagatagggtttcgccatgttggccaggctggtcttgaactcctgagctcaagtgatccacctgcctctgcctcccaaagtgctgggattataggtgtaagccactgtgcctggtctgggacatgctcttattgcaggacaattgacacatgttgagaagtgctgaaaaaccaaataaagcagggaagggcctagataaggagaggagggactgtgattaatgatgtggtttgggaaggcatctcacctcttcagacagagtaagccacacaggcacatggggagtgtccagagagaacagcagtgcgaggcagagtgaccagaagggacagtgataaatgaggtcagagagggtggcaggacctgtatcgtcaaggatcttacaggccatgggagggattgagcttctctgagttttgcaagaagccattgccaaggctgtgtgttcacaatcagactggttaattgggttgttatgtggaccttgggttgttaggaagtcagtggcaagagcctgtcaggaggctcccacagtccaagcaagaggtctaggtgattcagaccacagtgatgataggagtgatggcgtagtttgggatacatttttaagtggagcttactagtaaatattaggatttagactggtatatgctcactttagatcatgaaacctgaagtgagaagaattctacttaacaagactgctggaaacttttaaagcattttaagcgtgtgctcaataagcagggtagttatgtagtggccttttggatcaatggtttgggaacgtggtggagaaaaggagggtgataatacggtctgatgcctatgtgatcccccagtagcctacatatgtgcctaacgaagacctgcctgtcaccaggtactgcctaggttctaagccccagactgtggctgacatcttcagcagccaagctcagtgttttagactaggaacagaatgctcctgtgatgcagcttcttttggaggtagggctttaaaagagaagaaagcaaagacttgggaagcaacagaatggggaggaggaggttaagaacaaggaagaagcgctctgggcatggggtggccctgggctgcagcaccctgcctgcccctctcctgtggccgctggggaaagctgctttcctctaatgggagaagcctgatgttcagctgcagtttttctttttatgtttaagtgattctgtaagcttaaaattcttttcttttttcctttcaggcacatagcagtatttccctgcaagataaaaatcctccctcagtacatttttaattctcgagatccgatagtgatgggggtgacggtggaagcaggtcaggtgaaacaggggacacccatgtgtgtcccaagcaaaaatgtaagttctagttgtacattctgtgggtcatttcttaaagcactaaatgagtgtccaagagtcgtaccaacacagctttgtgcctgtagttcacagtactgtgctgtgtatttagtgtggtctccaccttcttaacaaatgtttcagtgtttttacctcagtaggaagaaaatgtggtaactttaaaacaagcagagcctgtcaccttctgttgtgcttcagtattggtaaatatcagtgctccatagtcagtgttgactcagtgctgatctcagtgcttcagttaattggggctccaaggcactttacattattgccttttattttattttgaaaggtttcaagcctgtggaaaagtttaaaaactagtataatgaacactcatgtttaccttccctttctgtcagcatacctaagaaaaattaataatatttcaacaatatcctataatttgcagccctcaacattatttcaccagttattccaaagatgttttggtaactctccccaccaatctggcccagtgccctgcaagctgcattgcactggggcttgttttgtggctgagcctcagtcaagaacagtcctccattctttttgaagtgtccctgttgttttgcaaatccctcctccatttggatttatctgtttctctccctcccaactagacacaggttagaattattggaaagacactcatgcagtttccctgtgtgcctgcctcttgcatgacccagcctgtctgactgctgctgatgctctgatttcctggggaaagtgctagacgccaaccatctccattagaaacttgcccctttataattactctgtaatctgtctggtacctggagttcctaatggatatcctgtttctcaacagcctttatcccagtgcctttagtacccactggcaagcgttgcctaagtcaactattacgtagatggttgcaaaattgtggatatacctgtccccccatttcttacaaagaacctcttcccactgacctttttattgagtcatagactcagtggktttttttttttttaatataatccattacctttattcttttgatactcagattttctattgtggtcagtaggagctcaactggctcctgtatccttgacacacagcagtctgagcatcatcttcctttctggttgagatgttccagcctcatctagtactttccctggcccaaacctggttcttgtaatgggcaatggcacttagaagttgtcattgcttttctaccatttcagtggactaagcctggacatttatttgtgttactttctatgtggctttggcctcctaaaccaaccagagctctccctgttttcactcttactctcctgaatctttttctccacaaaggagtcagggttttttgccccaaactctgagatcacatcactcatctgctcacaggccatcattcttaaaatttcaggattggtcctcactctgacttcattcccatcagccacttcaagctcattcctgactcagaccctttgtgcctgctgatccctcctattacggcacctgtcacgtgaaatggtagagcaaaaataggaaatgacattgggtcaacagggcacttggaatgttttgcaaagcacattatctcctgtcattcttacaaccatcatgaagggaatagggtgttggtggtgccagcctagtttaccaaaatgttacaccgtgagtgatgaaaggatcgcactgccatgacttttaaaacaggcttttgctstagttcttacttcagctatccagccatggcgcctgtgattggcatgaattcttctgcatgcattttaatttgttcttattttatagtttgttgacatcggaatagtaacaagtattgaaataaaccataaacaagtggatgttgcaaaaaaaggacaagaagtttgtgtaaaaatagaacctatccctggtgagtcacccaaaatgtttggaagacattttgaagctacagatattcttgttagtaaggtaagtatttcagcaaaagtggcacactttaagcaacagggaatcactcttcttgggtcacctgtacctgtagctccttgggcttcagtttgattgtagaatctgatgggactggatcccccattagggcttgacctctagctgggccttgtctgttgaggaagttgctctatcaggaaagcagcaccaayagagaaagctaggacttttaggtcccctcgtgcctgacatgcaaaccagatgtgattttggaattctactcccttmggcaggcaagccctgttttttatttctgcttaagctttttagtacagtgagagcgggcatctggggccacagctttctttggcacgtttgttatgttctgtttaccctgtttgtgcctcgggcattgcagatcagccggcagtccattgatgcactcaaagactggttcagagatgaaatgcagaagagtgactggcagcttattgtggagctgaagaaagtatttgaaatcatctaattttttcacatggagcaggaactggagtaaatgcaatactgtgttgtaatatcccaacaaaaatcagacaaaaaatggaacagacgtatttggacactgatggacttaagtatggaaggaagaaaaataggtgtataaaatgttttccatgagaaaccaagaaacttacactggtttgacagtggtcagttacatgtccccacagtwccaatgtgcctgttcactcacctctcccttccccaacccttctctacttggctgctgttttaaagtttgcccttccccaaatttggatttttattacagatctaaagctctttygattttatactgattaaatcagtactgcagtatttgattaamcaagcttctgcagattttgtgattcttgggacttttttgacgtaagaaatacttctttatttatgcatattcttcccacagtgatttttccagcattcttctgccatatgcctttagggcttttataaaatagaaaattaggcattctgatatttctttagctgctttgtgtgaaaccatggtgtaaaagcacagctggctgctttttactgcttgtgtagtcacgagtccattgtaatcatcacaattctaaaccaaactaccaataaagaaaacagacatccaccagtaagcaagctctgttaggcttccatgttagtgtagcttctctcccacaagttgtcctcctaggacaagaattatcttacaaactaaactatcatcacactaccttgtatgccagcacctggtaacagtagagatttttatacattaatcttgatctgttttaatcttgatctgttttagtagagatttttatacattaatcttgatctgttttaatcttgatctgttttgtcctagaaaattccatcatacacacatttcctgatatttgggcttagtgcttctaaattgttgcagacacaaaacttaatgattcattcgtagtagtaatctgtagctagttttagggttttgctgaagtcagtgtggggtgtttgtttgaggaaaaagttccaaatatccactagcatagaattttaaactatttttattttaaagttatggcataacatataacataaaaatattttatatacgtttgaaaaatctataccgttcttttttatcatcaaagtttctcaatggccagtagaagcaaaaagacaacaccacctctgatctacgggacataatgttcccaggaaaaaaatcttcaagtgggtgtgagggtgtttctaattcaaaatatgtagatttctccgcatggaagaagtagtaaagattttcttaacatgctcctgtgttcatgcttggagacaagaataagatggtttagaagctttaccctttcttggaacaagtagaatcccggtctgagacctctcaggaatttcagagcttagcagtctggcctggaggtttttcagccttttagtataataaacagtagttgcttcctagagttgagtttttaaggattcacaaaaaggagcctgtacaaaatatacatacagttctttattaaacaactgtaaacacttcactgtaaaaatccataaaactttataaacaaacattttgtaaatagaatctatgctacagtaaaataattaacacaattatttacatgcaatactgacaaatttggcactttttgaaaagaaatgtacaaaacacttgctttaaaagaaatttaaaattataaaaactccgagcattactatcatgcactttgcaaatacctcacaagcacttatggcacagctatcagagagcatcaggctctctggtaatatttatgtaacttttaatgtgcttccataagtttgttgtaaaaccacctggacattgtcaagaataaagtcaaatgccatattccaaaccgattccaccgattgctgcatcagcctaaaggtggggagagaagaaatgtcattaggaattaggaaaggtccttaagactaattattcctttttatatataaaaattgactttggcaaaaaaaaaaaaaagtcctggccaggtgcggtgtggctcatgcctgtaatcccagcactttgggaggccgaggagggcggatcacctgaggtcaggagtttgagaccagcctggccaacatggtaaaaccccgtctctacaaaaaatagaaaaattaggtgggcatggtggcacatgcctataatcccagctacccgggaggctgaggcaggagagtcactggaacccaggaggcagaggctgcagtaagccaagatcctgccactgcactccagcctgggcgacagagtgagactccatctcaaaaaaaataaaatcctagaacactcaaatttttttttattttgttttgagacaagctgtcgatcaggctggagccatgcagtggtgcaatcatggttcaccgcagcctccacctcccaagtaactgggaccacaggtgggcaccaccacccccccagattatttattttttgtatttttcagtagagatggggttatgccattttggccaggctggtctcaaacgatccacccaccccagcctcccgaagtgaagtacaggcgtgagccactgtgcccagcccacttcctatggttttttaatcacatgtaagaccttgagggcaacatatttggaaccttatttgctacttagtcaacatggcaaaataaaggatatcactttctcattaaccctaatgagtacagtttcccagaaagtttaaaacaactcagtacaccctcagccattgtgacatgccattttttcccatttgataaaagtgatgaattactaccttttcatgtattttataactagatccagtttttccaaatctttttcttctattagatcagtacagtatttcacaacttggagaatgtcttcttccattggatctaggaagggggaaaaacttcaaatgaggaccagtctttttgaaggagaaagtcagagatctgcatggataaaggaaaactgcatttctacaactatgtcactaacagctatcaaaggaatgggctttgttacttttcaaagcaagtcccagaatttaaaagatttgggggtagctgctttaagcttatcagagttagagaaatgggttaaatctgcatagtttagtctgtttatgttctcaaatcatgagacgactacatctcagccttgggccatctaacacaggccaagccaacctgaaattgtagttatccattctctgagcaaggtcttcacatcattgaattcaacagctccagctagattgggtgctggaggtctcacacagccagctgggtcagactgcaaactagaaaggcctggcacacctgaagtagaagcagagagttcttcctgttaagaaaacaaaggataaaattgctatattcacacattatccaggtatattaagatctcataaaggtcaaagttaaggaattaccaggggtttctctgcaggaggtccttcatgttttagaaacccatcaattaacttctggggactgccacaggcccctggcagagtttttgcaggactgttaagcagcttgttattcaaaggactctgaatcctttttggtgaaccaatggtttttttcttcttgtttcttttcttttctttcactgctgcctttagatgaagtaaaggattctttggcactaagagcagatggatataagatcctcaacaaaatgatagtatggatagtctggatgacagtattgggttctcttttctcctcccaaatacaacaggctccctagcctacacctcccctcctgccccaagtgagaggcagtgaatggcaatggcccaaagtacaggctctccaattctctctttgctttgccacttactaatttgacctttggcatgttgctcatctatgatgggtagtactaaatgtgggtttgatgtttgtgatgcattttgaaccaacatcctttaatgtattcatctcaaaggacaactagctgaacaagtatttaagacatttgtggtaatgtcctattccaactttttaaaaagtaaaaagtggtgtgtttaaatcctgaaagtacagacacaaatccaactagaaatatgatgatatttactcatactgtatacttcagatattatcccaatatgaagagctcttaatgcaacagcttagactttgcccattatatactgcaataattagacaacagtgactccattactctttgtcttcatttttgttacatgccacttccaaggctcaccagatgcgctggctgactgctggtgagtgctgttctcgccctgcctttgtctttgatcatacgctgctttcagctccctctgaagttcagcaggaagggcagcaaatacctcagggtccacctagtggaaaagacgaggtcaaagtcaaacctgagctaattgtagatggtagctggtttctctttttcacaaaacagactttgttttcaaatctcacttttctgatctgtacgaattcttaacagttccccaatatcaaagctgattaaatcttcaaaatggttagagcaagaataaggaattaagagcaagaataaggaattaagagtactaacttaaagaaacccactacaacagcagaacctgggcaaaatgcactagtagaaaatgggaagcaaaacattgaaacagggactcaggttgttactgtcccccatgcaggattatacatctccgctctgttgtattcaagtgtggccattgatgtgtttgccccagatcagtgtgtttctgtcttagcatgccctcccccgtctcttccctgctgcttcagcgggaggctgctctgtgtctacatcctgcagatgcaggagatggagacaagcccactctcccctcccctcccctcccctccccagtggatgtggtgtcagatacagaggagaaagggaagtgagacaggtcctaagttggagcaggggggtgagaatattgaaactacagcagagggttcccatatttaacttacctgtgaaaatgctggaagggctattaaatttattcctgcgtcactgttcgattcttgaggttctggtatttgcaacaagactgtcccaactggttgtggcaaaattcctgtattacagccatttactggttctttctttttgtcgccatgtgactctgcttgctggacagcacagacttgctctacttgttcccggagatcaggtggaagtgcttctaaaacagactgatccagctataaaatgccaaacatatgagtaggaagttaaagcatgctcagagatgaggtgtttgggagttaacacgccactttaaatttcaatttgaatactgtggataatcaatgtaaggtacagaccatcaagctaggaaagccacctccaaatcagcacatttttggaacgtcttggccttttgtcattgaagcctgaagtactatgtgtagtctggaaagaagtgtatatatactaccagccactatcacatgaccaggtaagtccaaatatactcacagaatgtcctgcaattggggccaacagatatgaatagccttggtgaagctcaaattagatcccaccccagggaggggtgaaggcctgaggcacatgttaaaattctggacaggtaacagtcctgggtcaaaagttcacctttcagatgagagactgcccaaaaatacaaataattctactctgagagcagcacactggaagaaagggtttctagaagctgaattttctctaacttacaggacagaatccactgttcctttggccagggcctacctgtgcatccacatctggccctttggaaacatgcaatcccatcaactgggtggaccaatcttatcttgccaggagtaactaattgtgggtatctgtcgccatacaagcatatcagcattgccctttcccctagttttgcagccagtatttaacatctccttccgcctccttccatgcagggggagcagaggcacaaataaacttgcccaatatagcttaaggtgctaccttactttcaaggaccagcagtatatcacatgtacagcccacacacgctgaattaaaccatccaaatctccagagacctgtttgcaaatactgcaaaaacccttcgacataaggcctctacttcaccactaatcaccaaagctgccttgctgaatacagtaagtctgcatgatgaccactgtcacagacaatggcagtccacaggaggactgcctttcagctatgctttacaacttgcaagagtggcaaatctttgcaaaagcactttcactcaacccaaatattgcttatttagaatccaacatcatgatctacccaaacaagtggcccgttctccctttcttggttaaacggatgaagaaataaaaatgccattttcatttgtaaacttgtatttttgtatttatatttaggagtataaaatgtacttatatttaggactacaaaaatgtacctgggaaggtgacgggacctctatactcaggttaagtctcgactgcacactgacaggagtatgtagaccattccatttccctgaagactcagccttgttagtatcaggactggtcggcagatgtgcaggaaaaggtggcaagaaagtgcaagttctagaagcagatgatatttccagatccacagcagcccgaaatactacaaaaagaaaatatataaaatagcctcttcagatcatcgggcagggcctttaatcctctgtccattacaaataaaaaaactttattactgattcatcataatgaagaatataaattttt

SEQ ID NO: 98075 - DNA, 168751 bp, Homo sapiens
acctcaggtgatctgcccgcctcagcctcccaaagtgctgggattacaggcatgagccaccgcgttggcccattaaatctattttgcatcagctttaatgactgtttaatattccattgttaacaagtttactcagtctcttagtctgtaattttaggtggcttctagtttttctggttatcaacgatgtgttcatgaacatttccgtggaaagctttcattatgtctttataacactttaaaaataatttcctgtttgactttgggatatatgatttactggcagcataacttttatttagatcaatattaacttaggatgaacccttgaggtcagagagagaggcaactgggagtatgcaggtttatatacaaaggctaagaataaattcactatgtttggatgctttccacattattcatgttaccattgctaatgaaatattaggcagcaaaaggttgaaaatactagctatgaaaatgaagtattttgattacttatggtcttaaatcattctattccaattctatttcttagaatataattttccttcaggttgaagaactgggaatagaatggattattaaagtgtataacttgaggttaagagtttggttctaaataaagaaagttcataactaggtagctaggcttttttattttttatttttaagacagggtatcactctgtaattgtctcactgcagcctcgacctcctgggctcaagcaatctccacatctcagcctctgaagcagctgggactacaggtatgcgccaccatgcctggctaatttttaaattttttgtagagatgggggtctccctacgttgcctaggttgatcttgaactcctgggcttcagtgatcctcctgcctcagcctcccaaagtgctgggattataggcatgggccactacacctggccccaaatcatttagttaagtaatatcttagaagtacaattctagaaaggtgtggagaggtttaatagaggaaggaatacttgaactgagtcaccaaatctgataagtttgccaggtcgaggagcatattccaggcatatgcaaagacaaagagtcatctaatagtaaggtatgtttggggattccctcctaagagaaagagttacactactagtcttcgacttccacttaagcctatggctatactgtcctaggaagcctcgcaaccgagactgcattactttggttaacctctttgttcttggttctgcttgactgactttgacacagtaccatattcattcaacaagtatttatggagttcctactaggtacaaggtaataaggagatagaaaatgggaggagataaattcatgtaatgaaccaaaatatttggactttttaaaaggcagctaagatccactgaagtgttaagcaggaagtgttaactcagctgttatacgaatctgcctctgcagggttgagtatggattaaataaaggatggactagggacagggggaacagttaatggactaaggcagttgtccatgctagagataatgagggcctaaagtacggtaggagagagagagagacagaaggggatggatatgagtgacattaagaaggtgaactggccgggcgcagtggctcatgcctgtaatcccaggactctgggaggccgaggcaggcggatcacgaggtcaggagatcgagaccatcctggctaacacagtgaaaccccgtctctactaaaaatacaaaaaattagccgggcatggtggcaggtgcctgtagtaccagcagctctgggaggccgaggcaggcggatcacgaggtcaggagattgagaccatcctggctaacacagtgaaaccccgtctctactaaaaatacaaaaaattagccgggcatggtggcgggcgcctgtagtcccagcagctctggaggctgaggcagaagagtggtgtgaacccgggaggcggagcttgcagtgagccgagatcgtgccactacactccagcctgggcgacagagcaagactccgtctaaaagaaaaaaaaagaaaagaaggtgaacctgtccttgccttcaagaaacaagtacctccacaatctagtgggagatactaaaaaacaagtaaggcaataattaaaatacagtgtcctaaatgctgtgataggtgttaagtacagtagagcgccatctaatgctctaattagtggatgtgacattgaagctgagacataaaagggataaagaaaagaattctaacaatgtgcaacagcttagtggaaaaggagataggacccatgcaaataatttaattctactggctggttattaggaatacaagaatggggagttaataagaaggcaagagaagtagatgttagattataaagaaccttaaatccaagtgaaatgcttgaactttattgcccaggatggagtgcagtggtgtgatcacggctcactgcagccccgacctcctgggctcaagcaatcctccccctttagccagcatgtgccaccacgcctggctattttttttttttttttttttttgtagagatgaatctcactttgttgtccaggctggtctcaaactcctgggctcaagcagtcctcctgccttggcctcctaaagcactcggattacaggcatgaaggctttggatttatacttcagggacaccgcctagagattttaagcatggagaatgtacaatacttggcaataggttgaattagggtgagagaaagagaagtcaagcatcatgtcctttatgatataatgattacaagctcaaaccagagtgccctcattcaaatcccaactctatcctttatcagttgaatgacctaaggcagattacttttctatgtctcagatttgttatctaatatgtggataatgacaggactcatctcatattatcaggctgagtctgatgagctaatacatataaagtggttagaagagtgcctggcattgaagaaagtacacaatatgtgctaactattttattaatattatgccctgatttctggcctggcaaagaggtgaaatttcctaggacagattttataggaagaggaagtatggggttaagataattggttcattttgactgttgaactagcggccaacggcacagagctcaatggatggtaactgaggccacaggaaggtggttcagtgagaagatttaagggcctgcgacataagactgaagagcagcaacatttaacggacatacagaagaaggagggagagctcccaaaggaagctgaggatagaagaaaaggcagaaaaattttaaatatgctattatggaagcttcaaggagacaagatggtcaacagtgccaaatgccaaagattgagcaaataagatgagggttgaaaaggatctattaaacagtatcaagaaggttatcagtgatcttggtaagaaccagatgtactgagtaaataggaggcccaaggtggatacaatgagggtattctagttgtgaagtggaaaagctagggcagtaggtagaaaggaatgtggagttaggagaggacttaagatgcaatagatctgagcatgtttagatgctggtaggggagtcaagagagggcaacactggagaagggaggtccttgagaaagtgatggtactgggatccagagttcaggtaggggcagccttaaaggagaaagtaacaaataggagtggtggtcactaataagctggatggtgtctgtggatatggaaattgtcaaagatcttgtgaaatatcttttcccaagattaaggctcttactcttgtctgcatgtgcagagtgtggcaggatggcaaagtagttaaggacttaaatttttaatcctggctctgccacttactaatgactttagggaagtggtttaacctctagctgcttcagtggcctcagacgtcataaaatggttgagagaattaaatgtgttaatatgcataagccattcatgtttggcaaatatgaaatgttaactgttatgacagggttctccctttcccatctctattctgtgcttactgttcctatcatataccatgtattccctcaagtgaacaaagattcctaaccaagacacatcaaagtggcatttaccttgataaattaactatagtccaagatattgactttggtcaaaaatgtgatcttgttagggttccagaattgatccaattcatgtattgagccaatgcatgtattttaatagtgctcaaaatatctctcttcatccaggtattgtatatacagtgtgaataaaacacaacaaaggtattaattcaacaaagttttcatcaattacatgacagacattgttcttagcacttgggaatcatcagtgagtcaaatgaataaaggtgataaggagggctattaaaaaaagtagatggccgggcgaggtggttcacacctgtaatcccagcactttgggaggccaaggtggacagatcacctgaggtcaggagtttgagaccagcctggccaacatggtgaaaccccgtctctaccaaaaatacaaaaattacctgggcgtggtggcgggcgcctgtaatctcagctactcgggaggctgaggcaggagaatcgcttgaacccgggaggtggaggtttcagtgggccgagatgggctgggcaacagagcgagattcagtctattaaaaaaaaatgtagagctgataaagggaggattgtaactgtgtatgtgagaaaacttacattgcaattttaaatagggttgttaggctaagcctcattaaaaaggcatcatgtgagaaaagatgcaagaagctgttctaagcacctgaacacgtaaaccaataaacagacctcagtgaggatgtgacatttcaattgaaccccgaaagataagaaaaaatcacacagagtgagaaaaagtgaaaacaaagggatgtccaaaaatccctgactgccagcttattgatttacaaagagaactatagaccatctatcagatattcagatgagcctgtgcaattattcactgtaggtctggtgacaagccaactcttaagtttgcttggtgaatacataatcagaaaaggactgagttacatgatatgaacgtctgacggaatgggctctggggaagacacttccttaactcaggagagcccctgctcttaagccgggataccctctctcccctagagaaggcgtggattcatctggcacaggtgtgcccctctttttttattctatgctccagtagcggatcagaccccgactgagtaatgcacggtatttcaggatatttcacagtcgttgggatagtgtcaagcctttgaagttctggttaaattttgttccttcaaaatcactttgaatctttctactctcaccctttaatgactaattttttgaagtttttcctcggaagacttccttaccttccatgttcttgggacacttcgctacctctgcactgccaaacacggctccccatcactgaactgaaagcgaaaacagcacaatcccatctatctttctaggcaggcgcagcttcttcataagacctcgccaagaccctattattttgtcccctctctaatgatatacaacttactcagaatctcattacggtcgtgtgcatgttttacttcgcccttttggctcccagggggcgtgcacacagctagcgtccaacatgttttacgatatttaccctccctcctgtgttcgggatcaaccgttcctaacagtgaaattaggtcgtcccaagtgctgaggagaaagtgtgcacacaagaggcttcaacaccggcggaggcgacccgcaagtcctgacccaccgccagaaacaccgcgagcgcccaagaccccacggccgcccacgcgctacggcccgcaacatcccggtttgaaacgtttccgcttcacccacctgcggcttccggtcgtacccacggcctcgtgagggctcgagctggaaaagtgcgtcatacgaccccgagcaaccggcaggccttgcgcgcgatgctgccccgccccctgagggccggccccctgaagcgcaagagaaggaggggcgcgcagggatcgcgcctagtctctccgcctgcggagccgtggggtcccggcagcccgcaggagtgctaagtaagggtccttcagggcgggaaccagrttcsaggcagggacgcaggctacgttcgaataaaagtaccgaaggtcataaggccccagttcagatgggacttccccgcgtgacagcacagagataacggccagccctgggcgaaggtaggagagcgggcgtgccaggttggaggggtcatttcgtggagcgagtttagggggagcccccagaagcccagagcagtcaggtcacacgacgggcaggaaggagtaccagcaaatactttttattgagcatacaggtattacgctgggtctttacatatctcctccaaataagtgagtccaaatggcaggtaactcgaaaggtgagaaattcaagtcagctttgaaagacacattgcatttaaaggaaaaacggtattcgcagatgataatacaggatggagtggatcagaaaacacactgaggctactgatcattcccatttgccaactcactgcagttggcaagaaaactctgtgactccatgagatgggaaattacaccagcagtcaaggtagcaaggtaatagtttcggctaagttttgctgcataacaaactgcctcaaatagtggtttatatctctaacgtgggcaaggtgggtgattcttctgctagtttctcctgggcatattcatgtggcttcattcagcacaggttggctacgctgggcggtccaagatagccttattcatgctctggcaggtgctgcctggctgctagggcatctcaattcaggcctaatcttggaagcagcgcctcagccatattctattggccaaaacaacaacaaagccagcccagagttaaggcgtggggtaatggacttcacctcttgatgaaagaagcccaaagaatttgtggtcacctttttcaaccttgcayagaaattaatctctccttcagttaaaatagaaaccactaagacttgcctcttggagtaagaatcattcagtgttcagtttgctgatgctgatacggtaaatgaccagggcttcatataaagctacaatgaagacataatgacacctcctttctttattatcacaccttttaccaaggtcactctgagtaagtctatcttgtrttatgcasgtgggaatgaattttgttcasagttaactgcactakgaattttcctagttattattaaaaacagtcacagaatattgttgctctttgcttatattacttccttctaaattccctttctctgaaatctgagatggtacaactttggttttttttcctagtttcttgatgaagaggttttaaagaatcccattccctcctccctgctccaggacttctgtcccttggttattcttacctttacctacttcttcagcttctccactggaacctttcaagtgacactcaaacatgctgtactctttaacaatcctccagtgacctcatttctctttccacttgtcatcctgtctgctacccttctgagccaagcttcttggaaaaactgctatacatccagtatctactttctcacttcccattcattgtttcaacgtactccaaaatggcttttccccattattccagcaaaagtgcttttgctaaggtcacgggtgacattcatattgctagatccactggacttttcagtattcatctaagtgttcatttgactacctcaacctggagattcctgtggacaactttgacattaccctgtcaactcctcagtcccttttgccaggttttcctccagcctcactgccaactccgcagtcccctttgccagctaccctgatctagtcagccctaaatgttggagttcctcagatctttatctcacactacattttccttaagcaatttcattcattctatggctctaagtaccatttctgtatacaacttcaaaatttatattttttagttccatagatacaactgccttgtaaacctggtaagtctaaaagccatgctcctgaactcactctttccccccagggatcctgcatgcataaaggctaaagccttttttgccagaagccctttyttyttcctcactttccgcttccaaaccatgactacatcctgtcagacttcacstggactctatccccttctctccacttttatgaccatcaccatcattcacttagacaaccatgtcactgcaaaagctataaatgtcctcagaggctgctmtatggagtagccattctgtttctttactttcttaatcaacttgctttcaaaaatgtcmtgagatacgctttcccatttcccacgttaaaatcaagtttatggcccagtgggaggatcacctgaggccaggagtttgagaccagtctgggtaacattgtaagactctgtctctaaaaaaatacaaaaacatgctgggtatggtggcacatgcctgtaatcctagctactaggaggctgaggcaggaagatcgcttaagaacaggaattcgacactgcactgagctatgatcgctccactgcactccagcctgggcaacagagtgagaccatcttaaaaaaaatcagttttatgtggtatgtcttgtgttgtgttatgtccctctgaatgctatacgtttcttcatggcatatcacaatttgcatcttatataattactgtataatctcctgtctttcctagtagacaggcacaaaactctacaaggcactggctattttattcactactgtatctccagcaccaagcacagtgccaggctaggtgaacaaatgaatgatttatgtattttttttctcttctaaagaattacgttctgtaaataataaaaagcattgtctttttggcttatgtcccattcaacaattgtttttcactctcaatattccctacaaacacatttgttyagtatttttctgattaataaaatatagcttccccccggaaaagatgccctttcctcttttaaaatgaatattaaagagatttccaactaccagatattttcataactgatatacaaaacaaggtttttaaacaggttgttttttctcatattaaatattggkgacataaaatggtaccatctgcaagacaaactattaacacttggaaagaacacttttctaactctaaaatggattctatgtggggggaaaaagcagttttaaaggcrcgatttaaaatgtgaaatccttctgaagatatgcaatttattggtcttttgcagtttattggcagtgatcttttacagaacaaaartgcaaaatgtaagaaagtaaagtatcataaagcagaatcccaaaatggaaatgtaacatacaaaactgatacaccagaaatattgtgaaatacggatgtcacattgcttggacttttttttttttttttttttttgagacggagttttgctcttgttgcccaggctggagtacaatggcatgacctcagctcaatgcagcctccgcctccagggttcaagcgattctccttcctcagcctcccaggtagctgggatcacaggtgcccaccaccatgcctggctaactttttgcatttttagtagagatggggtctcaccatattggccaggctggttgcgaactcctgacctcaggtgattgacccgccttggcctcccaaagtgctgggattacaggtgtgagccactgcgcccggctgcttggacactttttttaaccacttgttaaagaaatacattaaaatgaaaatgttttgatgccattcaaatactgttacttaaaaactctggtttttaagaaggatataatataataccagagaaatctgctttgaatcttggaaggctttttcaccctaaagcaactgccttttgaataagcatcataaaaaaatgcagtgtaagatgattcacaaatagtgcaaaataaggcaatagtcttccatcattttgtcagggtttcctaataaggttaagttctctttcaacaccccccttagtcaaaggcagtttttggtttctttggtaatacgtacaaattgcttcattccacatctgtcatttctagtccatcactttctttgacatataccactgaacccaaggctttcccagaaagagatcctgtgccagtcccttcaatccttgtaaagttttcttgatttgtgtcttctaatcttattttcttggtgttttgaaataactgagtcgctggttccaacctgcttttttcagtccctcgtattaagtgatcatccacttttgaatccatatgtatagcagatacctgagtagcagatttactaagtgaaaatcccattaggatagctgaacaaatgtgaaagtaatttgcaggtacctttttaagtagtggaagtgtttcttcaacttgattactgaaaaaaaaaaaaaaagtaacaagtgaatgcagcaggaatttccctaacttcatggcaatgtttgtttgaatgaaaagctgtggtgatactagaaatataaagtaaaattgcctcctacctttcagtgtttacattttctttgtgggagggtttgcaggttctaaagatttatttgaaagtctttttaaaaggaaatttatctgattgtatgttttatcacctttcagaaaatagtagagcttctcttagtcctttctttcattcttgctagcgaaacctctttattcattactaatgggctaaagaaataacgactgaaggccaagtactctgctagtactttattttctgtaaaaaataaagatgtcctataaagatacttgtgattggctgggtgcggtggcccacgcctgtaatcccagcactttgggggccgaggcgggtggatcaccaaaggttaggattgagagaccagcctggccaacatggtgaaaccccatctctgctaaaaatacaaaaattagctgggtgtggtggcatgcacctgaaatcccagctattcaggaggctgaggcaagagaatagcttgaacctggaagacggaggttgcagtgagccaagattgcaccactgcactccagcctgggcgacaagagcgagactctgtcttaaaaaaaaaaaaaaaaaaaaaaaagatacttgtgattaaggatgtctagtctgtaaaaagagatgatcggccgagcgcagtggctcacacctgtaatcccagcactttgggaggctgaggtgggtggatcacgaggtcaggagatcgagaccatcctggctaatatggtgaaaccccatctgtattaaaaataccaagaattagccgggcgtggtggcgggcacctgtagtcccagctactcgggaggctgaggcagaagaatggtgtgaacccgggaggctgaggttgcagtgagccgagatcgcgccactgcactccagcctgggcgacagagcgagactccgtcttaaaaaaaaaaaaaaaaaagatgatcatgtagcatggagggaggccttgggaagtttcccaaaggaggggagcctaggttagggtttcgctttcaaagatgggcaggaatttggtaggcagagttgaccaggatggcagaagggacaggcttcctgtacagaaaaggtttgagaaagcccagggcttactggagaagagtgatctacccaagatgctatagtagcaacctgagatctggagcagattccacagcttcgatcgaaatccctcacccattttttttttttttttgagatggagtttcaccctttcacccaggctggagtgaagtggtgcgatctcggctcactggacctccacccggcaggttaaagtgattttcctgcctcagcctcctgagtagctgggattacaggtgcccgccaccaggcccagctaatgtttgtatttttatttttatttttatttattttttttccagtctatattttatttattgtggtaaaatatatataacatttaccattttaaacacttttaagtgtacaattcaatgacattgagtacatttacatttttgtgcaaacatcatggtcatccatctccagaacttttaatcatcccaaacagaaactctaacgtttgtatttttagtagagacggggtttccccatgttgaccaggctggtcttgaacccctgacctcaggtgatccacccacctcagctcccaaagtgctaggattacaagcatgagccactgcgctcagcctcacccactttttagaatgtattatgtctttaatatttacctactgtggtatctttgatagtttacaatttcatactcatcaagctgtaattactgactgaacatttctaaagaatcatcttgaaaccctgtttatccatatttgtgactgaatatcagtgtttataacaaaacagagtcctgggtctactgtagtagcctaaatatagtacttactcaaatattaatataacaattaggtaaatagtatatatttggctttctgggaatcaaatacaacttagctaaattttttaatatctctgatgaaattctgaaatatgggtatatttgatttttagatttggaacttgaagatgaatttttcttcctcatcaaaggaatatctaatactgccttcaaatgaataaaattgagtttattctatttggtttctctttttcttagaaaggaaatactcctgtcaaatgcataacttgaatctaaacatgaggaaacaatcagataaacccaaacagaagtatcttctatgaaacaaatagcttctacctaaaaatgtcaatgttatgaaagacacagagaggctgaggaactgtttcagattaaaggaggctaaagatacattatttcaaatgcaaccaatgctcttgaattgggaaggggatggaatgtactacaaagatcattacttagataactgaaacatttggatatgggacaatattagataataatattggatcaatgtgataaatgccatgaatatgataattgtattgtggttatataagtcaatgtccttgttcttaggaaatacatactgaaatagttaggggtgaagaattgtatctgcaacttgccctcaaattgtttagcaatagatagatagatacatagatacagaaagacagtaaaatatgcaaaatgctaacaactgttaaatctaggaggtaaagcttaaaaagttgttctacatattattattattacatttctgtaggtttaaaactttttcaaaatacaaaattgaaaaaacgttttaaaaaacacaaaactctaaaacatggcatttgaaatcaacaaacgtaaaagaatggtaacatataattatcaatttgcacattaaacttcaatctaataaaaggactgaggaggaaccaagtataatagggtagacttggccctgtgagtcttaccttaacttccccagagttgaggacatgaagggtgaacaagtctattgggggcctctttggactggcatttaggttgccattcaagaagaaatctggaatatatatgtaagaataaaggtacataaagagataaatcaatctggagaaaaagaacaaagtggctttctttactagatattaagataggctacgcggctgggcacaatggctcacgcctgtaattccagcactttgggaggccaaggtggaaagatctcttgagtccagcagtttgagaccagcctgggcaacatagggagacctcatccctatcagaaaaaaattaaaaaaaacaaaaagatatgccacaaagtgaaagtaataaaaataaccttgtacaggtacaggaacaaataatcagtagaatatgacagagctgtaacttggacttaggtatttcaggaacttcacatatatcacaggtggcactataagacaaaggagatagaacagactaagtttagtatgatggtatcgtgaacattggctaactatgtggacataagcaggatcttaaacacagaagtaggctgggcgcggtggctcacgcctgtaatcctagccctttgggaggctgaggtgggcggatcatgaggtcaggagttcgagaccagcctgatcaacatggtgaaactctgtctctactaaaaatacaaaaattagccaggtgtggtggcgggtgcctgtaattccagctactcaggaggctgaggcaggagaatcgcttgaacccagggggtggaggttgcagtgagctgagatcataccattgcactccagcctgggcgacagagcaagactccgtctcaaaaagaaaaaaaagtggagtgcaaatgcattaaagacctaaatgtgaatggcagaactgtaaatgcaatagaagaaaatatctgttaccttggagtgaagaaagatttcttgaacaagactaaaaagcttaaacaataagggaggaaaacaggtgagtttgattactcataattgagaatttctattcaatgaaaaaaatataaacaaaaagatagataagagactggaaggagatattttstgtgtccaaagctgatggtatttaatggctggaataaaaagagaacacctagaaattagcaaggaaaaagaaaacccaatagaaaaatgggcaaaggatataaaaacataattcacagattgaggaatcccaaacagataattaactaggaatcagagaaattcaagttgcaaagaaattgcaacctccgcctttctgggttcacatgattctcctgctgaggcctcccgagtagctgggattacaggcacctgccaccatgcccggctaatttttgtatttttagtagagacgatgtttcgccatgttggccaggctggtctcgaattcctgacctcaagtgatctgccctccttggcctcctaaagtgcttggattacagcatgagccaccgtacctggccacatctggctaatttttaaaattcattttttttgtagagacagggtgtcactgtgttgcccaggctggtctcgaatgcctgtactcaagcaatcctcccacttcccaaagtgctgggattactggcgtaagccaccatgcctggactggtttgaaccttttataacaaaacccagatcacagcagtcctctgctcaacacactctagttgcttcccatatcagagaaaaaaattatctacatatctggtccccagctgtggtaggcagaataatagtcttcaaagatgtctttgtcctaatccccagaagctgggactatgttatgttatgtggcaagggggaattaaggttgctaatcagctgactctgagggtgggaaaattctcctggattaattgggtggtactaatgtaatcacaagggtctttttttttttttctttttgggacagagtctcactctgttgcccaggttggagtgcagtggtgtgatctagggtgactgcagcctccgcctcctgggttcaagtgattctcgtgcctcagctcccaagtagctgggattacaggtgcctgccaccacgatcagttaatttttgtatttttggggagagacagggttttgccatgttgaacaggctggtcttgaactcctgacctcaagtgatccacctgccttggcctcccaaaatgctgggattataggtgtgagtcaccgcacctgccacacaagagtctttaraagtgaaagagggaggtagaatgtgttagccatgatgcaatgtgaggaggacttgactggccatttttggcgttgaatatagactgggatcacaagccaaggaacatgggctgccagtagaagctggaaaggcaagaaaggggattttcccctagagcctccagaaggaatgtagacctgcctgacatcttgattttagcccagtgagacccaatttgaacttgtaaatctccagaaccgtgtgataataaatttgtgttgcttaaagacaccaagtgtgtggtaaattgttgcacagccgtagcaaacaactctactagcaagcactctctcctgtctctttgccttattcgaccccagacctatcaccccattgctgttcctcaagcatattctatgccaaaccttctcctgcttcaggacctttgcacttacagttcccccagcctgaagcaatttttgcattgcaaaccacatcccttgaggatagttagtgacatggggcctggaactgtgaagaatggcagacttctgctgctagtcatgatggagtaacagagaccagacttatcctcatgctttcagcatcttttttttttttttttttttttgagacagagttttgttcttgtcccccaggctggagggcgatggcacgatctcggcttaccgcaacctctgcctcccgggttcaagcaagtctcctgcctcagcctcccgagtagctggattacaggcatgagccaccgtgccccgcctgctttcagcatcaaaacacaaaacacatgaagcaatggcttttagatattggacaacaggcagttcgggagagtgatccttgagaaacaggaaataaagtgagccctatgaatggacattgcctggaactttcaggcctcggcataaggaggaaactctctgatttaaaaaacggaacacaggccgggcgcggtggctcatgcctgtaatcccagcactttgggaggccgaggcgggcaggtcatgaggtcaggagatcgagatcatcctggctaacacagtgaaaccccgtctctactaaaaatacaaaaaaattagccgggcgtggtggtgggcgcctgtagtcccagctgctcgggaggctgaggcaggagaatggcgtgaagccgcgaggcagagcttccagtgagcggagatcgcgccactgcactccagcctgggagacaaagcgagactccatctcaaaaaaacaaacaaaaaaaaggaacacagcatcagtgagctgtggaacaagatcaagtggcttaacacatatggaattggagtcccagatttttttttgaggggatcaggaagaggacagtgaaaacaaaacaaaaaatagtaataacagaggtttttgtagtgaagcttttgaaatgatggaaaaattaagggactagaaaaccaagaccttagaaggtgtctgtcacgagagagcaagcacagggtactatataaggcttagcctgggccaggcacagtggctcatgcatataatcccagcacttgggatgctgaggtgggtggatcacttgagtccaggagttcaagaccagcctgggcaacatggtgaaaccgcatctctacaaaaacatacaaaaattagctgggcatggtggcacatacctgtggtcccagctactcaaggggctaaggcaggagaactgcttcaacctgaaaggtggagggtgcagtgagctgagatcatgccaacgcactccagcctgggtacagggcaacagagtgagactctgtcttaaaaaaaaggaaaaaaaaaaaaagtctgggcgcagtggctcacacctgtaatcccagcactttgggaggctgaggcgggcggatcatgaggtcaggagatcaagaccatcctggctaacacagtgaaaccctgtctctactaaaaatacaaaaaacaaaaaacaaacaaaaaaaaagctgggcgtagtagtgggcgcctgtagtcctagctacttgggaggctgaggcaggagaatggcatgaacccgggaggcggaggttgcagtgagccgagatcgtgccactgcactccagcctgggcgacagagtgagactctgtctcaaaaaaaaaaaaaaaaaaaaaaaggtttagttggggcagggtgggacactcactaccccttgggtttccacagagggaaggaaatttttactttctcaggttaggggagaaagtcaacagttcttgataggaaaaaaaaggaaaatcttttcaccctcttttggccttaaaatgatcatttccttatattctttccaaataatcttcagtaccgtctaggtggcatacataagtgcttaaacttttcttattctttctataagggaagtamtttcctacttcctatattaataatctccccacccccgaagtcttcaactccagctgatagttttaaacttagaacattctttcctatttgtttttaataatgctagataatgttttcaaaataatcttagtatctgaagaggaaatgagattatacattattccctctaacataacttctcagtttgttattttgtgcatttaaaaaattacatttccgaggatatgtgctccttgtgtcctctaacctcttaatctaaaataacagggacacttaattttttttggtatctaattatacttacaaagtatatgatatctgaaaataaatgcgacaaaatatgagaccatgtaataacacgatgaaaagacattggaaaaacatggcatttatattaaatgtatttttatgactaaatttgttctacacaaaagttgtttatccctgccaatgatatcttgtggggggaaaaatgagtactcacctggcgaaaacaggaattgttagtctcctcaaacgagagcttactcttgaaatacacagcgttctaccatatcaaggtcatcagagaattgctgtaaaaacctagtgtctatgtcatctgcaggaaaaggagataaagtcaccattatcatccagaagctcttgagttatttaagaagggacatggtaggtattaagaaaaattaagaagacttttttcccccccattctgggctccaaaaaattggtagaagaatgcagcgctcattctttttcactaaaaagctcatttgtcactttaaggtgaggggatttggaaaaggactggcatgtggagaaggaatatcggtcaggaatctggactttgttgctagatctgccacttyctgattcagccctgatcgtgcagagctgaccaaggccgtggtccccaggctcccctgactccaggctgcccacgctcaccgggacaggccggctcgctccctgcaggctgcagcgggagggctggacctggaagcctctcttaaaacgggccctggctgcagcaggagctgcgcccsaaagcagctctgagagtaaccggttcaccgaacatgggtccagaatgatgcccaagccctgggaaaagtggcacaaagccaccgccgcgaagcagcaggtgtttcaagctgagggaaggcggggctgcgagagacagccttgcgcatgcgcgttccatccaggtgcggcagcctcaggcagagattaagaaatgagtcgtggaaaagggggctagcggctggttactakgagacggsacgctcggctcgggcgtmtaggcgctgcgtgggcgtgcgcctgcgcggcgcggatggsccagraaggggtccctcctakgtgccctgtaaggcaggcaggtagacgtacgcgtcgctccgtgcgtaggagcgcgcgcacggcttgtagaccccgcgagaaggaaggtcgagccaggtacgcgtgcgcaccgggcctgggggcgagcgggacggaagcaaagctggggcgccggggaggtggaagacgagccccactccggtacagagcgtgagggcggggccacggcggcactggctggcgctaaccgccccctcctccttcccgcgggctccgtccttcctccgatccgccggggcggggccaggacgatttgggggtgggaagggaggagaaaggggcggaggatggagagtgggcggttcttgtatcccccgctgaggccgagagctgacagtcgcggggatgagctctgggcaggacggcgggccgaggagcccggggagggacccggagctccaggtagaagctgcggaggtgcgcggggtggggagagtgctgctactggactggaaggtctctgagaaggcgkctgcaagcgggcaggagtggcgggtgcggggccgtggcgggcggagttgggcgctarcagcgggagcgkctgtgagggrcagcggcgggcacagctgccggccggaagctcggcagcacgagttgcccctgtttcttgggaggttaggtttgagcccagttcmtatggtcastgcttcgygtcctcccgcagctctccgcttggttgttggggagactgttcagtttagaaacgctctggaagctctggtggagccgaggaatttggaagtcacagatttgggagttcagcctgactcccgatcgctcatttctgagcctctttmtagacttggggtggtgaaaggctgagattacataggcatttgcatgaaaatctcagataattttagtaaaaattatacacagtaaaggcagggaaagctggcttttgttgaaaaactatttgagacttaaattggataactaggtgatcatggacttgatacctaaaaactcacagaaatatggttttttttcactttttttttttcgcagcttcgggaaagtttgcatagattatagtgtcccaacgttttccttcttccattccaggaccttatatcctaggagatttccttgtttaaaattttctgtastggtgttcagcatttcaagtatactttgtttacgtgtaaggacataagtagaataacaataggtttgtaagtagaaaaaaacaggttagttatagaagtaggatgtcgcattcgaatctgcttccaggataagacagattcttgtttgtattttaattgattaatgagccaaactcttcagtcttaattagtgggaaataactaggacggtacattaattaaatattaattttaaatcctaaactttggcattatttaatggcagcttccacaatatctcgcgtactgtttaccttctgaagaaaaatcactgcctgtagcccagaatataatcaggtgtagagattctctgggagatcttttctgtcttctttttgagttgcttagactagtttgtttaggacgatttggttttgaagtcctccatacacagaggcagttagaggtattactatttatcaccttttcagattacatattcctttccctccccagagatagccactctcctgacttctaagatagccacttccttgattttccttaatgtttcacatcattgtatgtgaacatgcacattacagtttggcttgtttttgaacttcgaatggaattgtactaagtattcatttacatcttgcttctttactcaacattttttttaagattaatctttattgttgctcgcagtatttagtttgctgattgtttcccaaaatatttatccacttatttttattatataaaatactctctcagaattattcataaatcttgtatggttttccacatccttctgttagtgaggcagttcctttctacttcaatgtctataagtctacacttttggagacaatatttttaaaaagaaaaacccacctcaactgtagtaagcttttgtggaaccagatttcagaattccattgaagtactccagtattttccattctatcaaaaaatcaataatttgttgaatacatattatgtgcttcatattttgctcaacaccgatgatactttttattatataatcttagctcctgtttcactgaaaaattaaaattcaaccagacagaaacttcctcagatttccatgacacttaccttttttttttgagacatgatctcactgtcgctcaggctggagtgcagtggtgcgatcatgactcattgcagccttgacctcccgggctcaagtgattctcctatctcagcctcccaagtagctgggaccacaggtggatgccactatgcctggctaatttattttttaatttttgtagatacaggaactcactatgttgtccaggctggtctcaaattcctgggctcaagtgatcctctggccttggcctcccaaagtgttgggattattgggattacaagtgtctaaatcttcacctgtccttgcttttgtctttcttgtgtcggggcaatacatctttatctgggtttcctcttattacctcagctgtctttctccatcaattaacattaactcatgccttaggaatcttcattgtttctgtactgtagggcttcttcacctggagtccaaggaccttatagagtcttaaatcccctgaaattgtttgtaaaggtgtatttgcatttttctgaggagaggatgcaggacttttaattctgaaagaggatccttatgtaaagagaattaaggaacaagtttttctcttcccataatgacgtttccacaaccttggttgtcttccacctttgttgtacctctcttcctctcacaatcatgcttcctaaaagaagtttacattttccatttctttttctttactattcattcattagtccccttcagacttgttttcacccaccattgaaactgctttgttcgaatcattaaattttcttattttgaaaatgttttattgcgtttcacctttgtgctgggcacttttaaggcattagggataaaacagagacaagacaaaagcctagagctcttgaattttatattctagtatggggagatagtaaacaagtcagcaaatgatataatttcaagtagtgataagtgcaaatagcttatcacttatttgagagagtgactaggagagaggctactttaggtaagaagtcagggaagaccctctgacatttcagccaaagagctgagggtgagaagatagccatgtgaaaggctgggtagaaagtgttcctgagagaggaaaagcaagagcagaggacctgaagtcaaatgttactggcaaatatcttagtccattcaggctgctataatgaaataacatataagcaacagaaatttaattcttacagttctggagactgggaattctaagatccaagttgccagcagaatcaatgtctgaggttttttggttcatagatggtaccttcagactgtgtcctcatatgttagaaggggcaagggagctctctggggcctattatatacaggcaactcatcatggctgtgcctttttttttttttttttgacatggagtctcactctgttgcccaggctggagtgcagtgacacgatctcggctcactttaataaatcccttctaatttattagcaaatgttgttggttcaaatatatatcctaaatccatccacttctctatatttttgttaccacctccctggtccaagtcaccatcatctcccacctaaaatactgcaaccattccctgctatctttccgcttccactgttgctccctacaacctattctccacactgatatcatatcaatcacttcaaaataatgagatcctgtgggaggggagaagggagagggaaaaaaaaatgaaaaagaaaattataataagatgatcctggctcaaaaatacaccaatggcttcccactgcaattaaaaataaaatccaaactttgtaaggccttacatgatttggcccttgtcttcacttacaagatctagtactcccttctttgttcgcccaatagctttttctttctgttcctctaatgtgtggcttcagtccgaatttctgtgtcctcacaaaatttttaggttgaaattctaacccctaaggtgatcacattaagaggcagagtcttggccgggtgcagtggctcacgcctgtaatcccaacagtttgggaggctgaggcgggtggatcatgaggtcaggagtttaacaccagcctggccaagatggtgaaaccccatctctactaaaaatacaaagttagctgggcatggtggcaggtgcctgtaatcccagctacttgggaggctgaggcagggaattgcttgaacctgggaggtggaggttccagtgagccgagatcataccactgcactccagcctgggtgacagagcacgactgtctcaaaaaaaaaaaaaaaaaaggaagtctgttttagacacgttaaagtagccatggctgtggacatcccataaaagtaatataatgcattaagtgctccagaagggatatgttcatagttcttttggaatgaagagtagatcctaagtcttttttgaagaagtagaagtcagaaatactttttttgtagcttctttctcagtgttaccttagcatctgtgtgcattactctgatgtagcagtaatcatgctgtggtgtaatttctgatttatttgttctggactttcctagattcatttagggttgaaattgtaagattctatttgttttacatctttttatccccagaaacatatttctggttcattcttattctagctatttataagtttacatataaagtgaatacatgtgactgctacagtctgaaagcatgaactaaaacagtgatagtagggatggaagaaatgtaactgagataatttttagtgaaaagagcagtaggacttgatagccaattaaataagttgactcagtgagaggaattagtaataatagtaaataatatatatagtgcttatcatgtgccaggcactattctaagtgctaaagttaaaacatatattaattcatttactcctcacgcaactctatgatgcagaccgttttttttttttttttttttggtacgaagtctcgctcttgtcccccaggctggagtgcaatggtgcaatcttggctcactgcaacctccacctctcaggttcaagtgattctcctgcctcagcctctcgagtagctgggattataggtgcctgccaccacacccagctaatttgtgtatttttagtagagatgggttttcaccatgttggccaggtgggtctcaaactcctgacctcaggtgatccgcccgcctcagcctcccaaagtgctgggattatgggcatgagccactgcacccagccaatgcagatactcttattatcatccctgttttataaatgaggaagctatagtcagagaagtaaccaggtcgcccaagatcacacagctaagatgtggcagaactaggataatgaatgtaggcaggctgataccaaaatacatgatattaaccactctgctgtgtgacttcctaattgagaataaaagttcttccttattttagacttcacattgaaaaaaataaagaataaattaaaaataattttttagtggctggcaagatggccaaataggaactgttctattctgtctgcagctcccagtgagatgaatgcagaaggcaggtgatttctgcatttccaaatgagtgtaaacaaagctggtgggaagttcgaactgggtggagctcaccacagcttggctaagctgctgtagccagactgcctctctagattcctcctctctgggcagggcatctctgaaagaaaggcagcagccccagtcaggggcttatagataaaactcctatctccctgggacagagcacctgggggaaggggtggctgtgggtgcagcttcagcagacttgaatgttcctgcctgctggctccgaagagagcagcagagtgcccaagctctgctaagggacagactgctgcctcaagtgggtccctgacccccatgcctcctgactgggagacatctcccagcaggagtcaacagacatctcatataggagagccctggctggcatctggtgggtgcccctctgggacgaagctttcagaggaagaaacaggcagcaatctttgctgttctgcagcttctgctgtttgctggtgatactcaggcaaacagggtctggagtggacctccagcaaactccagcagacctgcagcagaggggcctgactgttagaaggaaaactaacaaaaggaatagcatcaatatcaacaaaaatgacgtccacacagaaaccccagaaaccccatctgcaggtcaccaacatcaaacaccaaaggcagataaatccatgaagatgaggaaaaaccagcacaaaaaggctgaaaatttcaaaaaccagaacgcctcttctcctctaaaggattacaactgctcgccagcaaaggagcaaaactggacagagaatgagtttgacaaattgacagaagtaggcttcagaaggtgggtaataacaagctcctctgagctataggagcatgttctaacccaatgcaaggaagctaagaacctttaaaaaggttagaggaattgctaactagaataaccagtttagagaagaacataaatgacctgttggagctgaaaaacacagcgtgagaacttggtgaagcatacacaagtatcaatagctgaatcaatcaagtggaagaaaggctatgagattgaagatcaacttaatgaaataaagcatgaagacaagattagagaaaaaaggatgagaagaaacaaacaaagcctccaagaaatatgggactatgtgaaaagaccagacctacctttgattggtrtacyctgaaagtgacgagaatggaaccaagttggaaatatcctcaggatattatccaggaggacttccccaaccaagcaaggcaggccaacattccaattcaggaaatacagagaacaccacaaagatactcctcgagaagagcaaccccaagacacataatcgtcagattcaccaaggctgaaatgaaagagaaaatgttaagggcagacagagagaaaggttgggttacccacaaagggaagcctatcagactaacattgggtctctctgcagaaaccctacaagccagaagagagtgggggtcagtattcaacattcttaaagaaaakaattttcaacccagaatttcatatccagccaaactaagcttcataaacaaaggagaaataaaatcttttacagataagcaaatgctgagatattttgtcaccaccagacctggcttacaagagctcctgaaggaagcactaaacatggaaatgaaaaacataccagccactgcaaaaacataccaaattgtaaagaccatcaacactatgaagaaactgcatcaactaatgggcaaaataaccagctggcatcataatgacaggatcaaattcaaacataacaatattaaccttaaatgtaaatgggctaaatgccccaactaaaagacacagactggcaaattggataaagagtcaagacccattgttgtgttgtattcaggagacccatctcatatgcaaagacacacataggctcaaaataaagggatggaggagtatttaccaagcaaatggaaagcaaaaaaaagcaggggttgcagttctagtctctgataaaacagactttaaaccaacaaagatcaaaacaagacaaagaagggcattacataatggttaagggatcaatgcaacaagaagagctaattatcctaaatatatatgcacccaatacagggcaccctcattcataaagcaagttcttagagacctacaaagagacttagactcctacagaataatagtgggagactttaacaccccactggcaatattagatcaactagacagaaaattaacaaggatattcaggacttgaacttagcactggaccaaccggacctaacagacatctacagaactctcttccccaactcaacagaatatacattcttctcagcaacacatcacacttattctaaaattgaccgcataattgaagtaaaacactccccagcaaatgcaaaagaatggaaatgataacagtctcgcagaccacagtgcaatcaaattagaactcaggattaagaaactcactcaaaatcacgcaactgtatrgaaactgctcctgaatgataatgggtacataacgaaattaaggcagaattaagttctttgaaaccaatgagaacaaagacacaacataccagaatctctgggacacagctaaagcagtgtgtagagggaaatttatagcactgaatgcccacaggagacagcaggaaagatctaaaatcaacaccctaacatcataattaaaagaactagagaagcaagagcaaacaaattcaaaagctagcagaagataagaagtaactaagatcagagcagaactgaaggagatagagacacgaaaagcccttcaaaaaatcaatgaatccaggagctggttttttgaatagataaacaaaatagaccgctagccagactaataagaatcaaatagacacaataaaaaatgataaaggagatattaccactgatcccacagaaatacaaactaccatcagagaatactataaacgtctctacacaaataaactagaaaatctagaagaaatggacaaattcctggaagggtatatacccttccaggactaaaccaggaagaagttgaattcctgaatagaccaataacaagttctgaaattgaggcagtaattaatagcctaccaaccaaaaaaaaagcccaggattagatggattcatagctgaattctaccagaggtacaaagaggagctggtaccattccttctgaaactattccaaacaatagaaaaaagagggaatcctccctaactcattttatgagtccagcatcatcctgataccaaaacctggcagggaaacaacaacagcaaaaaatttcaggccaatatttctgatgaacatcgatgtgaaaatcctcaataaaatactggcaaaccaaatccagcagcacatcagaaagcttattcaccatgatcaagtcggcttcatccctgggatgaagttgtatggttcaacatacgcaaatcaataaacataatccatctcataaacagaaccaatgacaaaaaccacatgattatctcaatagatggagaaaaggccttcgataaaattcaacaccccttcatgctaaaaactctcagtaaactaggtatcgatggaatgtatctcaaaataataagagctatttatgagaaacctgtagccaatatcatactgaatggacaaaacctggaagcattccctttgaaaaccagcacaagacaaggatgccctctctcaccactcctattcaatatagtattggaagttctggccagggcaatcaggcaagagaaagaaataaggggtattcaaataggaagagaggagtcaaattgtctctgtttgcagatgacatgattgtatatttagaaaaccccactgtcttagcccaaaatctccttaagctgataagcaacttcagcaaagtctcaggatgcaaaatcaatgtgcagaaatcagaagcattcctatacaccagtaatagacaaacagccaaatcatgagtgacctcccattcacaattgctacaaaaataataacatacctaggaatacaacttacaagtgatgggaaggacctcttcaaggagaactacaaaccactgctcaaagaaataagagaggacacaaacaaatggaaaaacattccatgctcatggatcagaagaatcaatattgtgaaaatggccatactgcccacagtattttatagattcaatgctgtccccatctactttcttcacaaaattagaaaaaacttccttaaatttcacatggaaccaaaaaagaccccatatagccaagacaatcctaagcaaaaagaacgaagctggagggatcatgctacctgacttcaaactatactacaaggctacagtaatcaaaacagcatggtactggtaccaaaacagatatataccaatatatatataccaatggaacagaacagaggcctcagaaataacgccacacatctacaaccatctgatctttgacaaacctgacaaaaacaagcaatggggaaaggattctctacttcataaatgatgttgggaaaactggctagccatatgcagaaaactgaaactagaccccttccttacaccttatacaaaaattaactcaagatgtattaaagacttaaacataaaacataagaccataacaactctagaagaaaacctaggcaataccatttaggacataggcatgggcaaagacttcatgactaaaacaccaaaagcaatggcaagaaaagccaaaattgacaaatggatctaattaaactaaagagcttctgtacagcaaaagaaactatcatcagagtgaacaggaaacacagaatgggagaaaatatttgcaatctacccatctgacaaaaggttaatatctagaatctataaggaacttaaacaaatttacaagaaaaaaacagacgaccccatcaaaaagtgggcaaaggatatgaacagacacttctcaaaagaagacatttatgcagcgaacaaacatgaaaaaaagctcatcattggtcattagagaaatgcaaatcaaaaccacaatgagataccatctcataccagtttgaatggcgatcattaaaaagtcgggaaacagcagatgctggagaagttgtggagaaataggaacgcttttacactgttggtgggagtgtaaattcaactaatttgtggaagacagtgtggcgattcctcagggatctagaatcagaaataccatttgacacagcaatcccattactgggtatatacccaaaggattataagtcactctaaagacatattcacatgtatgtttattgcagcactgttcataatagtaaagacttggaaccaacctaaatgcccaccaatgatagactagataaagaaaatgtggcacatatacaccatggatactgtgcagccattaagaaggatgagttcatgtcctttgcagggacatggatgaagctggaaaccatcattctcagcaaactaacacaagaacagaaaaccaaacacagcatgttcttactcataagtgggagttaaacagtgagaactcatggacacagggagaggaacatcatataccagggcctgtcagggagttgggggcctaggggagggatagcataaaaaagaaaaaataattttttttaagaaggaacattgtttcacttgccttctctgagaacggtacaggagcacaagttccattctaatgatgagattgcagcaaggttgaggatatttatgtggcctgaggtagggaagctggcagaccaggcatgggaatttcagatacactgatgtgtctttcctctagtgatattgcccccaaagctggtggagggaggatagcaactccagcatgattggttaggattgtcaggtggacttgtggtctcttgctatttttaattcctagctgggcctgataggtaattttgcaaaagccccactttattyggtttaccaaagaggaggaagaaagtttaattttgtakgctttatcacactgcttcattatcaacctcaacaaattttttgacactttttattacgtaaataactgtgcaggttaatggggatagagagagtttttggacattgcttgttcttaagagtctaataaatgtgtgaggaagacatccagaaaaatttagaacataaattcttctatatatataaatatcaattaagagatgatcattatgcagtggagaagacagagaaaacctggagaatatggaattccagctgagccttaaaaatgtcttaagttaaatggagaaaatagtgagggcaaggctcattgaacagatgataaaatacttttgaatatatgtattaagaatgtgttggctgggtgcagtggctcatgcctgtaatcccagggagacctaggcgggaggatctcttgagcccaggagttaaagaccagccagggcagcatagggagaccctgactctacaaaatttaaaacaattagccaattgtggtggcacatgcctgtgttcccagctatttgggaggctagggtgagaagattgcttgggcctggggttcgaggctgcagtgagccgtgatcatgccaacctgggtgacagggtgagacccttaagtgttgcatagtttgtctttcatagagggattcttggaggtatcaagtaggaggtaaatttggagaagtaggaagggacaaaattacagaagtactctgaatattggatgggtttagacttaaatagatccttgctattcaaataaatcagaaattacagcacagcatgattcaacatgtggtctctgtaccaaccaaatagggatctccaagcagctttatagaaatgtcaaatctcagcctgtaaataagaatctgcattcacacaacattcccagatgattcttaaattcagtaaaaattgaacagtactgctctagtgaggagtcgtttcattctgttattctaaatcatgtttataactagcaatacatttttaacagaaaccatgtaagaaatggtagttaggagttcagtccagcccctgggggtttaaatgcttcataatttgaaatattctgtgagatctaatgttgaggttccaggtggggcagtaactgttgcaatgaagaagagttgtgtcttgtttagagaagagaaaaaagggaaataaatctgccggcctgtctaagtgctgggttacacagagtgcatcataaggtcagtgactggggagatcctgattctgtaattccctaggtaggattttggagaacagcagctgtgttttgaggaaagatctaagatgctcataacaaattcttttttaacacaatggtagccttgattcaaggaaagaaaaaattgttttcctaagttacacagtctctaagatatgttgtcaagtaaaatagcgtgatgcagaatagtatgtatagtatgctaaagtgaaaaatctctaacatttgttattttgcataagtgtacatatatatagctgtagtataaatttctagaaatgaaattatttgaacagaagctatgtgcatttgtcatgttgatagattttataccattgttctccataaatattgtatcagtttactctcccaccggtgatacgtaaggacgctatatccatgttactgatctttgccatgtgatggttaaaagggggtatctcagtgttgttttaatttgtgtcactaaaggttgagattgaacatcttaatatttaggagccgtttctgtaaatgttcacattctttgccaatttttctattagagtacttttttaatcttttttatttctagggattatttctatattcaggaaattcactctttgtgatattaattgcaaaccttttttcttgtatagagtagcaacagcaaacgtaactcactaatagctattttggacaacacaagcctagaggtagactctttaatttgctactgatccatatttctgtagaaccatgattaccaaaaggatagtgtagggaatgtctttgaaaagcatgttcagtaccatttggacaacacacagaaaaagttttataaattttaagaaggtaaagtttgatgaaatcctcttagctggtgggaaatggttaaaaaaaatctaagaatattatcaattttcaaaatgtattgatgtaagaaatcacagagctgttttaaactgaatgcctctgtattatttcccattctttgtactaggttaccaccaaagaatatgattttggtctaggggctccagtttctgaagctgaaaactaccagaatactctccagctagaacaagaagtgagaaaccaagatagattcatctcgacactgaaattacaggttgcgtttagttacaacatattttcctgacttaatttggggtgggagcctattttgaaacaagaagatagagaataaataactactaattyagagctcatttaaatgttatgggtctaaaatcattcaatttttatcttaaccattttgataaacatagagtcagagtcagtgagtgcaaactacgtgtcaagtgttgtgtcagatgttttcaggtatacagtttttacttaatcatccccaacttgcgaaaaagtgatgccgtttccatttatagatgtggaagctgaagttctaagaggttaaataattatgacacttgagtaacaagtgacagaactacgatttctccaaactcccgtgttagccgggatttgaactcaattctctgaacttcaagttcagtattgttcctgttctcctgatgcttgacatgtaatatagctattaataaaggctattaaaagagatttctttttccaggaagatagagtagacttacttttttttattcctcctgctaagtacagctaaaaactctgaacattatgtataaaagaatttaagactttgaaaggtggagaggagaaggaacattggctaaggatctcaagacacaaagaacaacatgtttgttcctgggtttctttttctccgtatgtcgcagacagctgctagaaaaactggcaactagaaataacaataggcacaaaagaaagaccgaagaaaaggaccaggaaaggagcagcctatcaaggcagacaacttttaagagagtaactatccactccaagcaaataccacagaaaaaactacagccccattcctgccagctcaggccaagtaaagagcctacactttccacgcttgccagactataacaaggagccccacttgtgcctcacctacacacttgtgccccacttgtgcctacacctacccactcctcccacaccagggtgatatcagagaaggctaagtgggaaactaggacttttatcctcaccaggggataaggaggccctgaaccccgtgatgtcagcagagacaacatgaggagccaagccatctactcctactttatagtaagaggcactccttcttgctgtggtggagacctgaacttctaccacctatcagcagtaaaggccacccatccatggtgtcagtgggggacacgtagggaactgtaatgaggcacctctgggattcttcccaggctggtggtaatggcagaggcctagtggggagcctgaactcccattcttgcctagcagtatctaggaacaccaccctttccagatatcaacagatgccaagtagaggaactggacttctactttgatctarcagaaataaggcaatgtcccttctttttagttggagcattgtcacaggaggcctgctaaaacataagatccagagtcttacaatgctaggtctcaatttttaaaaaaggcattgtaatccaaagaatcaggaagatttgagaaaagacaagagaagccaacactgaaatggaacggmtgttacaattatctggcaargactttaaagcagtcatataaatgcttcagcaagcaattatgaacatgctggaaacgaatgaagaaaagttgtctcaggaaaaaataagagatgtaaagaagaaccaaatggacattttggaactaaaaaataaagtaactggtccacacaaaaatcagcctatgaatgtttatagcagcattattataattgccaaaaacttggaagcaaccaagatatctttcaatagatgaatggataagcaaactgttgtacacctatacagtggaatagtattcagtgtattttaaaaatgagctacgtagccatgaaaagacccagagtgaaccttgaaaacatgttacaaagctgaaaaggctacgaaatgtatgattccaactatatggagatgataaaactatagaaaccataaaaagagcagtagttaccaggaattggagggagaggggatgaataggtggagcacaggatttttaggggagtgaaactattctgtatgatatactaatagtggatacatgtcatcctatgtgtgtcaaaactcacagaatgaataacgccaagagtgaaccctaaggtaagttatagatactagttattaataatgtaacagtaggccgggcgcagtggctcacacctgtaatcccagcactttgggaggccgaggcgggcggatcatgaggtcaggagatcgagaccatcctggctaacacggtgaaaccccgtctctactaaaaatagaaaaaaattagccgggcatggtggtgggtgcctgtagtcccagctacttaggaggccgaggcaggagaattgtgtgaacccgggaggcagaggttgcagtgagccaagatcatgccgctgcactccagcctgggcgacagaccgagattctgtctcaaaaaaatatatatatataatgtaacagtattatttcatcaattgtaacaaatataccacattaatacaaaatgtaaataatagaggaaactgtgttgaggaagagagagaggagtgtgtgggaactctttgtacttcctaatcaattttttgtaaacctaaaactactccaaaaacttagtctgttaactacatgagagaaaatatttccaaattacatatctgaaaagggcttaatatctagaatatacaaaggactcctacaattagcccctttccccccagaaaaatctaattcaaaaatgggcaaaggacttgaacagacatttctccaaagaagatatacaaatgtcaataaatacatgaaaaagatgctcaacatcatcaaccattaaagaaatgcaaatcaaaaccatgagataccacttcatacccattagggtggttgttataatggaarataacaagtgttggtgaggatgtgaagaaattggaacacttgcattgccgatgggaatgtaaaatggagccaccttggtgaaaatcatttgatggtttctcaaaattttaaagacagactaataatatgatccagctattccactcctaggtatatatcctaaagagttgaaaacacggactccagtagatacgtatatacaaatgctcatagcagcattattcacagtagccaagaggtagaaaaaacccaaatgtcaacaaatgaatggataaacaaaatatggcatgtgcttacaatggaatataactcagattcaaaaaggaatgacattctgatacatgctgcaaaatgaatgaacctcaaaaacatactaagtacaataagccagacataggaagacaaataatgcttgattccacctctgcctggaataggcaaattatggagatagaattgttgtttaatgggtacagagttttttgggggaggggaataaaaaaattctggaaataggtagtggtgatggttgtacaacattgtgaatatacttaatgccactgaattatatactttaaaaatgttaaaatgaaaattatgtatatatattttgtgacaataaaacaagctttaaaaataaagtaactgaaaataaaagctcaatgttctcaatagaatggaggagaggaatgaatcagtgaacacgagactagaaaaataattacctaatgtgaacatcagagagaaaatagatggaaaaaaatttgaatagagcctcagagacaggtaaaactatgttcgacaaaaaagtgagagaaagtggtgctaaaaaaatttgatgagataatggctgaatttcccacaaatttgacacaaagacataaaacagatgaaagaaggtgatggaatacctaacaggagtcacccaaagaaatgcatgccaagacactaaaaaaatcctgaaagtaaccagagagaaaccatgcattatctatagaagaacaccaattcaagtgacagcagttatttttcatctgaaaaactggaggtaagaaggaagtggcacgacatttttcaagtgctagaaaaaagcaaacctgtcaactcagaattttatatccagagaaagtatccttgaaggttgagggaaagtaaagacattctcagataaagaaaaattaagataatttgtgccagcagagctaccctaaaagaatagctaaaagtatttctctaaccagaaaggaagtgataaaagaagtaatcttggagcagtaggaaggaagaacaatatatagagcaaaaaatatgggtaaatgaaacagaatttctttctttcttttttttttttggagacagggtcttgctctgtcatccaggctgtagtgcagtggcatcatctctgcttactgcagccttggcctcctgggctcaagcaatcctcctacctcagccgttcaagtaattgggactgcaggcatgcaccaccatggttggctgattttttttttttttttttttttttttggtagagatggagttttgccatgtttcccaggcttgtcttgaactcccattcttaagtgatccactgcctcagcctcccaaagtcctgggattacagatgtgagccactactccgagccaaatttttttttaattttacaaaattgtatttaactgtcgaatgtggttttaaatgcatgtacaggaaatatttaaattattttattaataggggagagtaaagggagctaacaggtaaggtttctgtactttcacttgaactgttaaaatgtaggctatgataagttctgtatatataatgtaatgcctagaacaactggtagaaaaagatcaaacaagagttacactcagaaacactataaataaatcaacgtagaattctaaaaaatgttgagataatccacaggaaggcaccaaaaacaaaactcttcatgatttcaacacttataactacagtaatcaagactgtgatattggtgagggatagatacatacatgaatggtacagaacagagaatctagagatagtcctatacaagtacagccaaacgattttttgacagagatgcagatgcagttcagtggaagatagtcttttcaacaagtggtgttggagcatttagatacagggaaaacagttaccctccacttaaatctcacacttcataaaaaattaaatggaccatagatgtaaatgtaaaacataaaactatgagacttttaggaggtaacataggagaaaatttgcaggaagttaggcttggatggaaagttcttagatatgataccaaaagcatgactcataaaaggaaaaattggtaatatggacttaatcaaaattgaagtttttggccaggtgtggtggctcgtggctataatccctgcactttggcaggtggatggatcacttgaggccaggagttcaagaccggcctggccaacatggcaaaaccccatctctactaaaaattacacaaattatctaggcatggtggtgcatgcctgtagtcccagctacttgagaggctgaggtgggaggatcacttgaacccaggaggcaggttgcagtgagctgagattgtaccactgcactccagcctgggtgagaatgagattctgtctcaaatatatatacacacatatatatatatgaatatatatacttcacagaaggatgtctggtatactagaaaaagatgttcagcctctgtaaacatcaggggaatgcaaattaaggccatgatgaaataacaatacagtaactaaaataaaaaatagtgacaataccaaatgctggcaaggatgaggagaaactggatcactcatccattcctggtaagaatatgaaatggtacagccactctggaaaatgatttggcagtttttggtaagactaaacatacatttaccatacaacccagcagttgtgctcccgggcatttattccagagaaaggaaaacttatatctactcaaaacttatatcctactcagttgttcatagcggctttgttatattcccaaactggaaacaaccagttttccttaattggtgaatggttaaactgtggtattccataccatggaatattattcagcaataaataggaatgatcctatttggttcaaataacaacktgcgtggatctaaaggacgctgtgctgagtgaaagaaagcaatctcaaaagatcacatgctctatgattttgtttatgtaacattctcaaaatgacaaaattgtacacattggtgggaagaattgagggcggggaaggagaatataaaggggcagcagaagaatggtctygttgtaatggaacagttctatatcttgaggtggtagttacagagatctgcacatgtgagaaaaatcatatagaacaccatgcacatggtgtatctgggtatgatatactatgttgtttatgacacaactatcagcggaaactgagtaaagggcgtatgagacttctctgtactacatttgcttcctgtgaatcttatttaaaaataaaaatttttaacaaaactaattgagtacctataatactggaaattttacttgagctcttatataatgtctaatgacaattctgcaaattctaggcattctgtccctttaacagaagaaactcaagagactctcatttattttttttcttaagtcaggtgcatcttctaggatcaagaaaatatggtaaattccccaattacataactggtaaagaactacaacaggatttaaacctaactctgccgaagtccagagcccatatcctttgtgttactccagactgcctcttctaaagtacttttgtcttggaattgagtaaaagtaaagttcatgagagaagggaggggagtgttcatttatattactaataatttgttttatttgcttacttaataatttgaggattatatgtgagatacgtaataaatgatgcagaaacaagtgatgtgttgatacagaaatgagacaatacagtcttttaagttgtttagaatctagtagaagggacagggaaataaatgattttaatgcatcttataaaatattgagataaacttatataagaggctttatgggcacacatactggaaaggagaagcaccaagaacatctcctggtgcagtgggaagttaacagacatttttagtgtgctcttgttgctgagaaacatggcataggaaaagccacgaacaaagatgaaaaacacaacttgaagtttatctgtttcacgtcctgtagtttgtctgtttgttttaaaagaaagtagctgaaataataagggtagggtaaaataagtaaacagtgaaagcctgggatgacaataacgaacagatcattgtacctagtttctgtgcatgttgctagaggtgggctttggattaagctttaaaatttctagaggcaaaggcaaatagaaatattagttaaataattaatgattgttagggtaagaacaaaccaggtttccaaaaaaggcacgtattttcctgaaattgaagcctaagtagggttttccttgaggattctcataaggagggttctttgataacacttcaatttcaagtgtgtacatttcaataactcccctaaaagaagtttttaaatgaatttaatgagattgttttttatagtgtgtctggtggtgggaagttaggttggacagctaagtcgagttggatcataaatggcattttaaaatttcattctcagtgtcatgaggcaacataaggttataggaatgacctcaaatttgcattttcgaagaatttttgagagcagatgggagaaggccaaaagagaagagagtaggagacactggattaaaataatgactttaattatgcctcttggtgggctatttactgggtayaataaatggcattgtagcatatttaaaaataattcatgacttaggatatttttatgtagtgacaacttataaagtttttttgaagacaactttgtttttaatggtttggaagacgataactctatagctgtttgaaaagggcaacctcagggcaagaataatgctagaactaagaggtcaggtatttagcaatttcagatgctccttacagactgaaacttctgtgtgcgagtgtttttttttgttgctgttgtttttaatgcatcttttacagggtactaacacagtatcttagacacaataggtgctcaataaatatttgttaaatacacaatgagagacaagtactatggaaaagaatttgtaccatgactttacctcgtagttatttttgttattgcacttaacatgttgtctttgtatttcctcaagtaaacaaagagttccctgagggcaggtatctaacctatctttgtatttttggaatttaatatagttcctgacataatcattgttcaatgggtctaattttttttttcctttaaaggcatttggatacctttgtgatagaaaaggcccttttcttcatccattgatggtttgatagtgggctgggaaggaaagctgtgttcctccacattaggaagcaaatacttgattgatttgatatttagcttagtcaagtaagttactgatactttcaaaaggactttttaaaaagttaataatacacatatatatacgtatatatatatgtatatatactttttttttttttttttgagatagagtcttgctgtgtcaccaaggctggagtgcagtggcaggatctgggctcagtgcaatctctgcctcccaggttcaagcaattcttgtacctcagcctcccaagtagctgggactacgggcactcgccaccatgcccggctgatttttgtatttttagtagagatggggtttcaccatgttggcgaggctggtctcaaactcctgacctcagatgatctgcccgcctcagcctcccaaagtgctgggattacaagtgtgagtcaccatgcctggcctaaaagagttaatatattttaataacaataattagaaatttaattaaaagaactcttaatggtattaaaattaatttcaaagctattgaagtttctttattgcagatataaatatttggccatttttctaatagattggctaaaaatcaatagtaattaagttctttttaaaataaactataaattgtcttgaaagatattgctataaaatttaaaatgtttatttaatatattttttcaaataggtaatacattcacatggtacaaaattcagaaggcacaaaaaggtatagagttaagtttctttgccagggaagcaaatctcccttcctgattccagtcacacagctgctccccagaaaaaagctaaggaattattttaatgtgattttttttctgataataacagattgaagatctcaaacagacaaatcatggcttggaagaatatgttaggaaactcttggatagtaaggaggtggtaagcagtcaagtagatgatttaaccagccacaatgagcatctttgtaaagaattgattaaaattgaccaactagcagagcaactcgaaaaagagaaaaattttgtggtggattccgccaacaaggaacttgaagaagccaaggtaccagatttaccacggataaggattttaattttactttaaacatcatgtaatttttaaatgcaatggaaaaagtagcattctcatttgtataatttggaagctttttagatttgacagtatatttaaatgtctgttctaaggattaaattgtttctcacattttacttcttttaacaaattctactcaaaacatttcctaagtaatatgcagtcattgtaaaaaatttgaaagcaacaggaatgttccgtgaactaaatgttgctcccacttcccaattcctctctcctctgcagagatatctacaaactaatagatacatttattttcgtctattttcacatatgtaattgatttcaatacccattaaaaaagatttttaccaaactaaaaatagaactgccatgtgatccagcaacaccgcagccgggtatacatccaaaagaaaggaaatcagtatgtcacagaggtatctgcacttccgtgtttatggcagcactattcacaatagccaagatatggaatcaaggctggttaattggtacaaaaatacagttatagagaagatataaattctagtgtttgatggcacagtagggtgactatcattaacaatttattgcatatttaaaaatagctgaaagagaagatttggagtattcccagaacaaagaaataatttttaaggtgatggatatccccattaccctgatttgatcagtatacgttgatgcatgtattaaaatatcacatgtaccccataaacatgtaccattattatgtatcaataaaaagtcaatttaaaacttttttttaactaacatttgaaaatttgccaatcttttttttttcttactgatgtctgagatttggttcttgttcaggaaggtttttttttcacctcaagaactacagatatactttctaaagttttcttttaatactttttaatagttttccttctgttgatactgctagtttctttttgttctaatatgaggtagggttgcctagtcctttctccactgacttgacatatcattttaacagatactaaattctcagatatctgtgactttctggactatttgttttcattgattcatttgcctttttctgtgccaccatcacattgttttagttactgtagctttatgatattttgatcaacatttttttcttgattgagtactttgccatgaaatttagaaactagagattaaatgtaattataaaatgacagtctcacttctccattgctgcttaatggctgataagcaagatagagcatatttgaaggccaaaaaacaacctgttgaatttttaaatgatagcttgtgaacatgcttatttgtcttgattttattaatcaccaaattagtaaattgtgtctgtaacagagtaatttcccaaagctaattgttattacgtgttatttcttaaacattcttttaatgtaacaggactcttatagcaaataataaagcaattaaattatcaggtgaaacgttattgaagtcactgttaaagtaatttgaaatatgagtccaattgatgacctctaggattgtatgtatttttatgcagtaacctcattgagactgcttaatggatgagtttaaattagtggaaagtcaaataatasaacttttttgttgttgttgagacagagtttccgtctgtcacccaggctggagtgcagtggcgcgatctcggctcactgcaacctccacctcccgggttcaagtgatttcctgcctcagtctcccgagtagctgggattacaggcacccacgaccacacccatctaattttcatatttttagtagaaatagggtttcatcatgttggccaggctggtattgaactcctgacctgaagtgatccgcccaccttggcctcccaaagtgctgggattacaggcatgagccaccacacctggccataatagtgcaatatttaaatacacgagttattactttaaggatacagtcttctttaaccatgttgtctggaacaggtccttagaactgcttgaaatactagataagaatgatttgtttttaacttttgaattatttatcttcaaatggatgctgttaaagtatttgaaggatatttaaaagtagcttgaatattttaaacatttttcaatacttttgtttgtattgttactttaaaattttttttaacttaattttttaatgccacttcaggtggaatgtattgttactttttttaaagtaacattcacagtttaatggtaaattgatttccatctgtcttaattataaaaattatcaaaattgggccaagcatggtggcttatgcctgtaatcccagcactttgggaggccgaggcaggtggatcgcttgaggccaggagtttgagaccagcctggtgaacatgatgaaaccccatttctactaaaatgcaaaaaaatagctgggcatgttgccatacgcctgtaatcccagctacttgggaggctgaggcacaagaatagcttgagcctgagagacagaggttgcagtgagccaaaatcacgtcacgctctagcctgagcaaaagagtgagactctttatctcaaaaaaatatatatatatcaatattgaagagttttagtatgtcttccttgtttttgttttcaaattaaaaattaactgcactccttcccagactgcgggaaaccaagttgactgaattccaacaatgagaatgccctgtttagaagtcatcacatcacttttaaagggttgttagggtttatgttstrgagagagtaagtactatgtcagggtaaattctctgctatcaaaaggaagaatttttggaatggaaaacatctaaaatataagagctaggatttacctaaaactgtaagtattaaatttacaggtggaattttgcctggtttggcaaagagtatttctagaaaatagatcttcataaataatgtggaatgttgggtgtatttgagggttggaaagctattgggtgaaaaagaggtaagcagtaagtcttggagtagagataccattgctgacacaggaaaaacatcagaaacttaataaagagagaacaaaatggaaataggcctttgggttggtagaatgccctgaaatgaggaaatcaccaacctcagttaagtgaatgtccccaagtagaatggggattagaaagatgcaaaaccaacactggggatatgaactccagtgtgtgttgtcatcatcctaagacattagatatgcattttaggtttatatttatgtgggagagattccttgcctaatttgtggggtggcacttgaaacaagatttctaattcgattgctgagaaaaaatrtttgggtttctagtgtttaagattatactctgggtatgcggaggtagagtctgaggctaaagctactgttagtttgtctggaattgagatagtattaaatgtattcactgggaagtatttacttttagtcttatttttaaaggtcaacagtaacttcttccatgatttacttcattaaaatattttcaatattaactattggctattgctatgtaattactttgaaaccttaatgccttcaaacaacaaatattgatacctcacaggttcttgggttgggaattcaagagtggcttagctgggttgttctggttcactgtttctcaggaaattgttatcaagatgatggccagggctggtggtttacacctgtaattccaacactttgggaggccaaggcaggcagatcacttcaggtcaggagttcaagaccagcctgaccaatatgatgaaacccggtctctactaaaaatacaaaaaactagctgggcatggtggtgggcacctgtaatcccagctacccgggaggctgaggccagagaattgcttgatcccgggaggcagaggttgcagtgagccgagatcacgccactgcgctccagcctggatgacaaagagagactcgatctcaaaaaacaacaacaaaaaagctgattgccacagtcatggcttgactgctactggaggatctacttctaagatggctcactcagatggcttttggctattggcaggaggcctgttccttgctaggtggacctctctctagggttgcttcatgtattctttgtggaagtttattctccctccaccttcccctctcccccagccaacaatccaagagataataaggaggatctgcagggcttagcatgacccagtctcaaaagttatatctcatcacttcctccatattctaatctttaaaagtgagtcactaagtataacccacactctaggggagggaaattaagctccagctattgaaggaaggagtattagaatttgtggacatacattaaaaccacctcaactatatgccttcgtttattctctcatcttgagttgtttatcattcatgtgttaacatggcatttcccagataattgaacatgacactatgaaatgtgaagcagaattaaaattttaccattatttcttcctataatttatatttttaattgacctaggggctatgttactggactggatctctgatagtccttatcattattgttacttttgtgtgtgattcaataaaaagtatttcagagcccgctgtgtggaagacattgtgtaaagtctttgtttgtcccccacaaacaaagggtggggtgggggacaacaaagactttacacaatgtcttccacacagcgggctctgaaatacccatccccacattccctgcacacactccctgtctttctccttcgctttatttttccctgtagcactttgctgttcctttccccttccctcactgtgctccagccatgccggtctccatacttagaaccaaccagaccttcttttgccttaggacctttgttagagctgtaacttttgcctgcaatgttttttgcccagattttcacatgattgacttcctttcctctgaagtttttggtcaaaggtcacctttcaatgaggacttcctgaccaccctatttaaaattccaacctgttcctccataaatattcccagtatccttaactctgctcttctttttctagtatactatataattatttgttaggtttattattgtctattctagctggaatgtagaatccacaaaggcagaaatctttgtctctcttgtttacttaactcaagtgcttagaacgtgagcgctccttgtattatttttttgagggatgcaatcactaacatattttgactattatcttttgtttttctttttttggctagaatatatactacatgagggcagagatttttaccttttttattcattactttacccagcacataacacaatggcaggcaggtagtaggcattcattaattgttaagtaagtgaaaacactgagttagcagtttttcatttgggccagttattttgtttttcagagtggaatcaacatttttttaaatcactgtaaaattaatgcatatttattatacaaaattttagtccatatagaaaagtaaatgaagaaaataacatctaccataatcataccttgttatacctagacataatcttcagtttatttggttatgtttatatgtaggatgtctgcgtataaatttattttttatgagaatgtgtcataccagatactctgttttgcagagtgaatttttatacttaatgtggaaatcttaacacattcaragtagacctgtatctttttagtgtctacttagtagtatacattaaaacattgaaaattgtctattcaaggctatacataaggttatccaaactctatgtaattatgttctatttctaagtacttcacttgtgagaaaaacgttgcaaataatagcaccccttaatatttcataaacttaaaatatgactgccagaaaaatcgtagaagagaacgttggtctaaaggacaaatgaagtacaataattccagagaattcaaattaaaaatgtagtaggcaagatcaggatgcagtttagaataatgagggaaaggttgatgaattgcaaaatacattaagtgaatatgctattagcaaagaactttactgctttgcataaaaacttagtcactgtcctgtaggaacatataatgtagtcatatgctaaatatatgactataggtacctatcttataagactgggtatgttcactgtcataaattgatacaaaaagtattttgtggrttgaattgaactaagcagttgagttcagaagagaaagcaatcttttctgaatggggtaatttgggtcaacttattttattctagtcattcttttattgctttcctattatcttcagaattgtaattagtactaacattttgttccagtttatggggaataatttggtaaaatacaatcaattaacattttatacaaaagattgaatttaagagaattgttatttcattctgggtaaatcatcttttatcttttatcatcaaaggttgctaaacaggttatttcttctttaaaatattcactgccttcatgtttttattttaagtggcttccttttttttgatgttctttttccaattagtttaaacatctttaatagaaataattttttttttttttactttttcttcagattgatctcatttgccagcaaaataatattatagtattggaagatacaataaaaaggcttaaatctgtaagtacatttttcataaatatgtgttacggaatcatttttatttggtcagtaagctataaaaaattatatctttggctctcacacgttttgtgaggaataaaatatgtttgttttctaaaatctgcaccaactgctagggacacaggggaacccccatctgtaagagtgacttttttttgctgctttcatcactattcctttgtttcctagaggcaaagaacaacttttggttggttttattaatgtccttatctgttaattgatttaaaatgatgactgaataattctcaaaatatgaagtttgtttacacattaacttttatcccccttaatagtaaatacttttaagccataaattttgttacataattccaaacaatgttttatttatctaacaatgtgaaatgaaaactgttctgtttaaacattttagtgttatttaaaatatttaaaaccctctatctgaaagtatatctataattttctcccaataaagtattgttaaataaatgttgtcaaagaagtgtttctaaatatatgaaagtgaatgcaaatttgtgggaatgcttacaagtatggaatatccagcattcagttaatttattcacgcattgaacaatattggacaaaacttagatgctataacagttgctttagtagtagcatgtgtttttcttcttttgagatggagtcttgctttgttgcccaggctggagtgcaatggcgcattctcggctcaccacaacctccgcctcccgggttcaaatgattctcctgcctcaacctcccaaatagctgggactacaggtgcacgccaccatgcccagctaatttttttgtatttttagtagagacagggtttcaccatgttgaccaggctggtcttgaactcctgacctcatgatctgcccgcctcggcctcccaatgtgctgggattacaggcatgagccaccatgcccagcctagtagcatatgtttttctaaagcaaatccatgccatttctaggatgtgtgctaggtctgtggacatttctggcctctctaaaatttctttaccattttttctccaaaattatctttcagttaaaatatagcatacccagaaatcctggaaaagaaagatatctaactgctttttaaaaattactgatatataattttttaaatgttgyatttaaaaaataccaaattaaatgtttttaaggatcctgtttgttttcaatttcacttagaaaatgatgctatagtttagcttgaaataatggcctaattttttcctctttggcaagataattttagatactgaaaaagcacaaaataaatctccttctagacttgattcctttgtcaagactttggaagcagacaaagatcactataagagtgaagctcaacatttgagaaagatgatgcgaagtaggtctaaaagtccaagacgcccatcaccaactgcccgggtaggttttataaacttacaaatattttggagtttgttgcccagacactggcttttattctttgttttacctaatttgaaaataatttgttttgatttgctgtgaattgctgtttcaaaggggttgagagacagaggtctctttgatggcacagtagactactgatattggttctttatcctcagcataattagcacttgggaggtaatcaggcaaatgtggaataatttggaatgaagctgttttaaaaagatgtggtttttaaacttattttttrtaatttcctttcattatatagtcttattttcttaaatagaaattgggcactaccatcagtagcacctttctatcagtactatatatcaaagaagatttcaaattccttatataattatagggtgcaaactgtgatgtagaacttttgaagacaacaacaagagatcgtgaagaacttaaatgcatgctggaaaaatatgagcgccatttggcagaaattcagggtaatgtcaaggttcttaaatctgagagagacaagatcttccttctttatgaacaggtaaacttacaaaaaacaaattatataagtaataacattgagttctagagttatgtaattcttctttgagttytatgagactgcttaaacctgcaaatcaagttaatctaacatttggggattacatatgtttttaagatattcttaatgaaatgtaatacatttccaatacagtaggtatgtgagtacacacgtatgttatccccatagccaaaaatcatacacatgtataaaaatagtcttatttttggaataagatatgaagaaaccrttaaatgataagttgttatgagttcaaggtaaaaagatcaaatcctgacctttttaccttgaacttgccacaccttatcacatcactttaggaacttttatataatttgcttaattttagagaataaaagaagtatgtagtttatctctgctttctagcttagaattgcatagcttttattaatcaaataccttctttaacccaacaagtattaaatcctataaatcacccatataacttcttttaaaagtatcacaattttttaacaaattatagctactatacacagggttctaggctcactactctaagggatagaaaaatgataagatgctgaccatgttttcctataaatttacagtctagttagggagataaagtatattgtatttattgatttttattaagtggtctagaagatattataagaaacaaaagaagtgggcatttttagatatggtgatcaaggaaatctttattaaaagatacaaagtgtgagccctgaaaaatgartggagtttctattaccctgaaaggggctagaaggaacaatccaaactaaaggaatggtatgaggcaaaggataaaggtaggaaaatcagcagataaataaattggtttaagactagaatagagggtatgtgtcagtggagaagggagagagctaagacttgaaaggtaagattgcactagagcaggaatcaatatactttttctgtaaggcccagacaaaaaatatcttctgctttgcaagccatgtggtctctgttgtaactaatcagccctattgttgtagggtgaaagcagctttggacaatacataaatgaataactttggctgtattacagtaaaactttatggatactgaaatttgaatttcacatcatttttacttgttttaaaatactcttttgatattttccccaaccatttaaaaatgcaaaaatatttctccacttacagacctacaggaggcaggctagatgtggcctgtgagttatatatagcttgctgacttctggactaaatggtacaggctgttcaatgggccttatatggggtttatattttgcttcataagcaacaaacaatcttttttttttaaaggcaggcaaaatatgaacaaagtatcatttttacaattttacaattttaaccttatggcaaatttttatttctcacataatctttctatactgtcttcttatttaacaatttctcctttgagagaattgatggagggagagaccatggactcctctttagaaggctgttacactagtgcacatataaggcattaagggactaagcaagggtgtttcaatggagataaatatagggacagatgcaaaagaccctgtgaaggaagatttgacatgatttgcttttaggaagaaggagggttgcatgacagtgactaaaattctgtcttgaatgactcagcaatgtggtaataaaataaaaaataggagagtcattggtggtttgaggaaaaagatgtgagtttgtttttagacagagtaagataatgatagcacactcaggtcgtaattgccatcagactgtaagaaatgtgggactggagtagagagaggcaagagttaaatagttagctttggaagtcatctgcttagaggtgagcttcgagccttcagagtggatgaagtctctgaatgagaaaactgtacatagaggagcagaaacgttaagttataatattcaagatgcagaagggaacctttgaaagagacaaagatgacagacagctagggaggaacaatgttaaaagggaggaaggaatctcaagaagaaggatgttgtgagcagcaacagaccactgaaatatcaaggagaacaggaactgagaaaagaccattatatttggttaggtctttagttgaaattccacagarggtgggagggtgggagccaggttgttctggggtgatagaatggatggtaaggaaccattggcaatagttatagaccatgggactttttttttttaatgtgtcgcaggaagaagagacataggatggtaaattggtcagcaggatcaagtgacaggttttcaagataagggagcactgtacatgactgaaggcaggggagaaagtgccagtggagagggtactattcaagatgagaagaaataattataattgagtcagggagatcttagaagacactttaggagatgaggtttggggttctggtgaaggcttagctgtggaaattgggaagttatatattttcctttggggcttggagactatctgaatagacagtgatcaaaatcaagaggaaaagagacctgtgcagcgaactgtgatattaaataatctgcaggtttggaatagatttgggacccaaggatggttgaacagacgtgcagagactctgttgggttatcagtaaggattggtgggcctttctgtcagggcagaagtagccaagacataggaatggcatatgcatttatatttaggaagactgaaacactatgataatattcattaaaccggtagtctgtctaaattgtgctgaatttaaatttacactacaaaatgaataaatggagtataccaaatatatttcttagcaaaacattctctgttgcaatgacttcctccaaattaattttattttagacttttggcaaagatgttgtaacatgaacttctatttaaatatattcattttcatttatttgtataagcttattttaaaataaaagcgataccattaccctgctgcatgcatgttgatgtaggtttgcattttaactggctagatacataaaattttttatgtttatgtgttctaaagcttgttcaaccaaagtctatgatttaaataataggcacaggaagaaattacccgacttcgacgagaaatgatgaaaagctgtaagagtcctaaatcaacaacggcacatgctattctccggcgagtggagactgaaagagatgtagcctttactgatttacgaagaatgaccacagaacgagatagtctaagggagaggctaaaggttggaaaggattttatttacgtgaatatatgtgaaacacaaattcagggatattgaaatcactttattttgtttttgctttttaatcagattgctcaagagacagcatttaatgagaaggctcacctggaacaaaggatagaggagctggagtgtacagttcataatgtaaaaaaaaaaaaaaagaaaagtctcttttggctataaacactcaatggctttcccctttctcctttttctgtattcagagaagttattttatttttctaagatagtgtttatagtcctaaaatacttaaggtattttatagtgtaaattgtcactttttcatttgtttatttccttctaaaaatgtgagtaaatgttttttggtgttaggttgcaaagtatgtactttaaaaaaatcattaggcattcattttcagggatcttatctactttctcatctccatattttgttaaagataatattgccagatgtaaagaaaatggtttattctacctaaagagtggataaggagagaaaattatgatgaaataaaaattataagcaaagtttatttaaactaaatttaaatgtgaaacatcacctttttcctaatcagatttgatattgctacgaatatatattgatgatattgtcactatataaacataagagaatttaactttctattaccaaatataattgaatatatttataagttcatctgtactgttttattgtaatgagttaaaaatatgagataggggctgggcacggtggctcatgcctgtaatcccagcactttgggaggccaaggcgggtggatcacctaaggtcaggagtttgagaccagcctgaccaatatggtgaaaccctgtctctactaaaaatatgaaaatttgccaggtgtggtggcatgcgcctgtagtcccagctacttgggaggctgagacaggagaattgcttgcacccgggaggtggagattgcagtgagccgagatcgcgccactgcacttcaacctgggcgatggagcgatactctgtctcaaaaaaaaaaaaaattactagacaggagaaaataatttttgttttcataattctacattatatgtgtaatttattaatgttgggcaacaaataaattcttttgcaaacagcatatttatactatagtcaaattgaaccagattgaaaaatatagactgatatactgtgataagctttactttgcagtggcttttccttggtcctacttcacaacaccttatctgtaaaaccttctacagcagtcaggtctaacctgataatctcatcctgtcagtcttgccataaaccagtttgtacagagggagtatgcccttcaggaagattactaaggtgtttttagtgatggcagtaaccttgtcattctacttgtatagcttgatgatgaacgtatggagcaaatgtcaaatatgactttgatgaaggaaaccataagcactgtggaaaaagaaatgaaatcactagcaagaaaggcaatggataccgaaagtgaacttggcagacaaaaagcagagaataattctttgaggtaaactaaatcacctttaaacaaccaacagtttactataactatagctctgctttttatagtgtattttataatgaaaattatttgttgagttcagtttctgagaggattattgaaaagcagttgtaggaacccttggcacacagtgaacaattttcctgasctcaatcacaggctggtaatgccacacttaactaggaatcacacttctagtaatcttactttacatttgtaaaaaacttcaacttttaactgaaatagcttttacaaagctcttctgggtacagaatatatttgactttgattgtttacctttataactttaaattctgtttggggatatgaacagtataagaaaacacaaagcacaggtttggcagttgcttagaaaaagggtgatttagaatataatgaaaagccgtaacagagaaataggagcacgtgatggagcatctattaattgaatgcaagtactatacttagcctttcctgtgtactggcatggttgccgaagatgtatcaattgaagcagcctacagcaataagcttgggagaatgagtttttgaagacctctacatgagtggttttacttttagtatctgttgctgtgagaaacagaggttctacagattcagtaaggttgaatttcattgcatctatgaacattgaaaaatagtaatagcttaatatctaggtgacgggttgatctgtgcggcaaaccaccgtggcacatgtttacctatgtaacacacctgcatgttctgcacatgtaccccggaacttaagaaagaaaaatagtagttcacactcctattaatgctgagattacaggcatgagccaccgggcctggtctttcttaacaattttttttttttttttttttagtcataaaaccaattatttaattgaagctataaaaaaggcagtataagcgataaaataattaggaaagaatatttagcatgtttcaaaacatttaaaataggagcagaacattttacaaaaagttgtacaggaaattaaattctaaaactgtaagtacaaacatgacattacagagtatcttataaaatacaaagacaaatataaaaggactatgatgctttaagtctgaaaactattggccaaatatttaggtttatatttacagttctgggtatgagaatcatattactatacacaactcccaaaccagtaggtagtattttccaattaaccatgtgtggtatcatcttctacaaagtctttggccatctccgctgtgatcacatcaatatgactaaccttatttctgaactttacaccatagaatttgtcagctgactcaagcagttcaggcctaaaagtagttgtaataaactgagcatgtacagcaagttccataatcatatctgacacagcctttctgtgctgagcatccagagcctggtcaatctcatcaaacaagtaaaatggagccgggtcacatttctgaatggcaaaaatcagagcaagggctaccaaggatttctgtccmcctgaaagctgttgcatttctctcatttcaccttgttttcctgtaaatgacaccctaattccaactccagtaaactgctcaactgatgggacactgctttgtgagctagaacccctctcactctcaccactcccttctccttcatcttgagactgactgccctccacatctcctttcttcatcaccaaagtagctttgccaccaggtactaacttctggaatacttcactgaagttcttggatacctgtttgaaagttaactgaatagcttcatatttccgaagttcaagtatattcatcagctccatgatcgatttgtaacccctatctaactcttcttgtcgctttattaacttttctttctgctcagagaaatttacaaactgatccaaagcctttttgttaacatggctgtacttctttaattctgttaacaaaattttaagtgtataatccggtattgttaaatgtaagaacagtgtggtaaagcagatctctagagtttttcgtgttgcacaactgaacctctgtatcctttgaacagcactccctatttccccctccagtcaatccttggcaactaccattttactttctgtttctgagtttaactrtttagagacatcttgtaagtggagtattgagtagtatttctctggttgtcttatttcacttagcataatttcagtgtttgtccacgttgtagcatatgacagaatttcctcctttcttgaggctgaatctttagttctttatctttttgttcttttctctctctctccttttgtttttataattctttgttaatgttagctctcttgatagtgtcccatatatcccataggctttcttcatttctttttactcttttttcttttttatcctctgggtattttctaatgacctgccttcaagtttacaaattatttttttctacttcatctagcctactgttgatgttctccaagaaagcttgtcttgggctggggacagtggctcatgcctgtaatcccagcactttgaggggccaagggaggaggattacttgaggccaggactttgaaataagcctaggcaacatagcaagaccttgtctctacaaaaataaaagtatctttttattaacagacgttatttatgtagtcagatttattcatctttcccatttgatttatgctttttttttttttttttttttttttttgagacagagtctcactctgtcgcccaggctggagtgcagtcatgcaatctcggctcactgcaagctccgccttcccgggttcacgccattctcctgcctcagcaggtgcccgccaccacgcccggctgattttttttgtatttttagtagagatggggtttcacggtgttagccaggatggtctcaatctcctgacctcgtgattcgcccaccttggccttccaaagtgctgggattacaggcgtgagccaccgcgcccagcctaatttatgctttttttttttttttcacccagcctaatttatgcttttttttttaactgagaaaatatttttgtaccttaagatcatgaaggtatgttcctatattatcttcatatttatatgtgtaatttaccaggagtgtattttttttttttttttttttgagacggagtctcgctctgttgcccaggctggagtgcagtggcacaatctcggctcactgcaagctctgcctccggggttcacaccattctcctgcctcagcctcctgagcagctgggactacaggcgcccgccaccgcgcctggctaattttttgtatttttagtagagacggggtttcaccatgttagccaggatggtctcgatctcctgacctcgtgatctgcccgcctcggcctcccaaagtgctgggattacaggcgtgagccaccgcacccggccctaccaggagtgtatttttgtgtatgttgtgaggcagtggtcaagttttgttttattttgctttttaatacatgattactcaattttcccagtaatatttgttgaaaagattgtcctttactgctctgcagagatgtttttcttaaaaataaatatctatgtatgtgtttatttctagggtcaataatctgttccatttgtcttttacatggttcttgtaccattacaaaactttcctaattactataactgtaaaagtgttaaacctataagaacaaatctaccttgttattcatcaagaaagtcttgactattgccggccctttgcattttcaattttcatataaattttagagtgagctggtcaaagtccaccccaaaaaagaaaaacactattaagattttaatggcattgagttgaatcatagattaatttttaaatcatttatttttatgttatttgagtcttctgggccaccataagcattgtatatctctctatatttttcagttttgctctataatgtttcctattttttgtgtgtagagaggtcttacatttattttgttaaattcgtaggtactcagtattttgagatgattttaactgtttttaaaaattgtggctgttatgtaaaaataaaattgatttttgtattttggtgtggtatccaacagtcctgctaacttttcattaattttaataacccacctacagaagtttttttatttgtgtacataaaatcatgttatctgcaagtattcttttcctgcctctctaattcttatacattttatttttcttgccttgttatatgtgaattacttctaattaactattcaatatatttcttgtaggttctttgataactatgtaatattagatttaagaaaattttctcctatttttattttgcccagatactaaaaaatcatacatgaatgttgaaattgatctgataatttttattcatgtatttagatggtcacattatttttctcccttattctgttaaaatgtgaacttgcactgattaattttgtaatactaaaccaactttacagggtagaataaatatagattggtcacactatattatgcttgttacttattgttggtctatgttaactaatactttgttttgtatatttacatctatttttgtaatttagattggctgataatttacctttcttatggctttattttattttttattatttttgagacggagtttcactcttgttgcccaggctggagtgcaatggcgcgatcttggctcaccgcaacctccgcctcccaggatcaagtgattctcctgcctcagcctcccgagtagctgggattacaggcacgcgccactacccccagctaattttgtatttttagtagagatgtggtttctccatgttggtcaggctggtcttgaactcccgacctcaggtgatccacctgccttggcctcccaaagtgctgggattacaggtgtgagccatcacgcccagctgtctcttatggctttttaaaatcagattttgatagcaaggtaatgtaaactcatactataatactcttttcaattcattttttcttctgtcattttgtggaacagtttgtataagattggagttgtagaacttaccaataaagtcatttggatctcttctttaagggaaggttttatttcatttatttattaaagaaataattagaatttccttcttacgcaagttagtatatatatgtaagcagttttcattttgtctaaatttaaaaggatgtttagtataatgttatttataatatcctgtggacatttgaatgtacatagagtctgtagttatttcctgtttttctattctgcagttggtggttattattagttttttccaaagaccaacattttgctttggttttgatcctctctattgtttgttttttgtttttattatttcattacttttgttcttattatttcctttcctctattttttttagatttctttttttcttgaattttcttcagatgaatgtttacatttttactttttaggcctttttttcttttttcttttcttttcttttcttttcttttttttttttgaggcagagtctctctctgtcacccaggttggagtgcagtggtgcgatctcggctcactgcatgctccacctcccaagttcatgccattctcctgcctcagcctcccaagtaactgggactacaggtgcccgccaccacgcctggctaattttttttgtatttttagtagagacagggtttcatcgtgttagccaggttggtctcaaactcctgacctcgtgatccacccacctcagcctcccaaagtcctgggattacaggtgtgagccaccgtgcccggctaggcctttttttctaatagaaacatgtaaagctttaaattatcctcaaaatacttctttaggtatattctaaaggttttgatatttactattttctgtataaaaattttttgtccttggagacctgtcaattttttcattatatattttgatggtatgttattaggtgcatatacgtttacaatttttctattactaagtgactttctttatctctactcatatttcttacctctttgtgtgatattaacatagctataccaattttctttcagtattcattttcatgaaaaatattttcttttgctgtcaacctttcagtgtccttatgttttagacatctttcacaaatagcatatgttaagtttttaaaatttaatctgacatcttttgtattttaactggatcatttggtccatttgtattttatttacttatatctttgggtttaaatctaatgtcttgtatgctttctgttattatcaattgtatgattcttttcttgccttcttttggattgatggggtatttaaaaaatcattttattgttttctgtcagcttagaaatcattctagaagtcataaactcatttattattcttttagtgattacctgagaattgcaagaaccttagaacagtaactccatttacccatcttaacttctgtaccatttttagccaaatattttaataacacatatacatacatgtgtgtataactatatatataaactgaataaaacacttactgttgtttgctcagtcaatatttgtttagatttacctgtacatttattcttttcattgcccttcattccttttgttgcctttgagtgatctggggtcctttattttctgttagaaaaaatatcctttagaatttattttagaattttgtctgaatttaagtttttggggtcctatatatatatattttcagattcaggtcattaatatgcaataacatatggtcagtttgatgaatgtacacaattgtatataactgtgtaaccatactttaaaaaagatacagagcgtttccttccctccagatagtttccttattctcctttccagtcagttctcctcctccccattgcctgacacttattaccataggtaaattttgcctgtatctgggtttcttagagggagtccccactttgcatggtttctatatgcattaatttggttagtagggtttagtttagtaatatcagttctctaccaacacagtttcagttaccagagtaattactgtgagtaattgcatgaagtacaaacttactgctagctctttaatctacaaatccctaagaaaataacagatataaatcatgaccagtgaccaatcacatcacttcttttaaagtgtgtgggtgattgatcagtgacatgttaatcagtttatgcttagatagcaaagtctgttttctgttgcctcctcgtttcccagtgatgaacatgtgacattttataaaatggatagttgaaaggggggaattggccatcaaagatgaaaatgctacaaagaaaccaagagttacaacactggaagcaaaatttgagtcaaatgtaaagggaattaaggaagaaatagctgtcatggaaatgttgacactgctgccattaaagagattctagatatgcagccagggaaactaataaaggcaaccttatcaacataattgaagaaagtgattgtgacaaaaaggatgaaggcagcccagtagacgtgacattggcaaaagccatcacattaaaagaactctccgagatgtttcatgccattgaaagcataaagggtaaaacacggaagctgatccaaacttagaaaggtgtataacaacttgccaagacataaaaaacatgcttgctctgtattttgttttgataaggggcggcaagcactgttcaaactactcttgataaactttttataaagaataaaacatgttaattctcaatgtacctaatgttttaatttacaatgtactcaataaatactagtttttaaaattttgctatacacttataaatgacagtaataaagttatattttgacttaaaatttaaaaattatggaaaaattatttttctcattgattattaaagattactttgcctggacagcttgtacagtcatttttgtggtcctgcatggctgtcaaagttggggctgcctacatacgtactgatacaatatacttttttttggctaggcacagtggctcacgcctgtaatcccagcactttgggaggccgaggctggtgaatcacgaggtcaggagattgagaccagcctggccaaaatggtgaaactccatctctactaaaaatacaaaaattagctgggcgtggtggcgtgtgcctgtaatcccagctactggggaggctgaggcaggagaatcgcttgaactagagagtcagaagttgcagtgagccgagattgcaccactgtactacagcctggtgacagagcgaaactctgtctgatcttttgtatttctgtgatgtcagttgtaatatctcccatttcatttctaattgagcttatttgtatcttctgtcttcttttcttagttaaatctcactaaagtatatacttttttaagtataaagtatatacttttttgtatctggcttgtttcaatagaattttttaaagaatcattatcacttaaaaaagtattaatagtacaatctttaatatttctaatatgaaccttttattttttattttattttatttgtttaatttccataggtttttggggaacagatggtgtttggttacatgagtacattcttcagtgatttgtgagatcttggtgcacccatagcccgagcagtatacactgtacccaatttatagtcttttatccctcaccccacctcccatcctttcccctaaatccccaaagtccattgtatcatccttatgcctttgcatcctcatagcttagctcccacttatgagtgagaacataagatgtttggttttccattcctgagttacttcccttagaataatggtctccagttccatccaggttgctgcgaatgtgattatttcattcctttttatgactggattgtattccatggtatatatataccacaatttctttatccatttattgattgatggacatttgggctggttccatatttttgaaattgctaattgtgctgctataaacgtgtgtacaagtatcttttttgtataatgacttcttttcctctgggtagacactcagtagttggattgctggatcaaatggttttacatttagttctttaaggaatctccacactgttttccatagtggttgtactagtttacattcccaccagcagtgtaaaagtggtccctttcactgcatccccaccaacatctgttggtttttaatttttttgattatggccaattcttgcaggagtaaggtggtatcacattttgtctttgatttgcatttccctgatcattagtgatgttgagcattttttaatttgtttgttggccatttgtatatcttcttttgaaaattatctattcatgtccttagcccactttttgatgggattgtttgtttttttattgctaatttgtttgagttccgtgtagattctggatattagtcctttgtcagatatatggattgtgaagattttctcccactgtttgtgttttctgtttactctgctgagtgtttcttttgctgtgcagaaactttttagtttaattaagtcctacctacttattgtttttgttccatttgcttttgggttcttggtcgtaaagtcactgcctaagccaatgtctagaagggttttttcaatgttatcttctataatttttatggtttcaggtcttagatttaagtgcttgatccatcttgagttgatttttgtataaggtgagagatgaggatccagtttcattcttctacatgtggcttgccaattatcccagcaccatttgttgaataaggtgtcctttcccctacttcatatttttgtttgctttgtcgaagatcagttggctttaagcatttggccttatttctgcgttcttattctgttgcattcgtctaagtgcctatttttatatcagtaccatgcttttttgataactgtagctttgtagtatagtttgaagttggataatgcagtgcctccaggtttgttctttttgcttagtcttgccttggctatgtgggctcttttttggttccatatgaattttgggattgtcttttctagttctgtgaagaaagatggtgttattttgatgggaattgcattgaatttgtatattgcttttggcagtaggttcattttcacatttttgattgtactcatccatgagcacgggacatgtttccatttgtttgtgtcgtctgtgatgtctttcagcagtgttttatagttttccttgtagagatctttcacctccttggttaggtatactcccaagttgttttttttttctttgcagctattaaaaaaggtgttgagttcttgatttgattttctgcatgattgctgttggtgtatagcagtgctactgatttgtgtacattgattttgtatcctgaaacttctgaattcatttatcagttctaggagctttttggaggagtctttaggattttctaggtctacgatcatatcatcagcaaacagtgacagtttgaattcctctttgctgatttggatgccctttacttctcttgtctgattgctctggctaagacttccagtactatgttgaatagaagtggagagggtgggcatccttttctttttccagttcttagcaggagtgctttcagtgtttccctgtttcgtattatattggctgtgggtatgtccgtagacggcttttattacattaaggtatgtcccttttatgctgattttgctgagggatttaatcataaagggatgctggattttgtcagatgccttttctccatctattgagatgatcatgtgatttttgttttttattctgtttatgtggtctgtcacatttattgacttgcgtatgttaaaccttccctgcctccctggtttgaaacccacttgatcatggtgaattatctttttgatatgctgttggatttggttagctagtattttgttaaggatttttgcatctatattcatcagatatattggtctatagtttcattttttgttatgtcctttcctggttttggtatttagggtgatgctggcttcatagaatgatttagggaaaattccctctttatcttgtagaatagttttagtagaattggtaccaattcttctttgaatgtctgatagaattcagctggtccttgactttttttgtgggcaatttttaaattactatttgaatccccctgttattggtcagttcagggtttctaattcttcctggtttaagctaggagggttgtatatttccaggaatttatccgtctcctctaggttttctagtttatgcgtgtgaaggtgtttgtagtagccttaaatgatcttttgtatttctgtgatgtcagttgtaatatctcccatttcatttctaattgagcttatttgtatcttctgtcttcttagttaaatctcgctaatggtctatcaattttacttatcttttcaaagaactggctttttgatgaatttttttgtgttttttgttgcaatttcatttcattttgctctgatatttattatttcttttcttctgctgagtttgggtttggtttgttcttgtttctctagtttcttgaggtgtgaccttagattgtctgtttgtgctctttcagactttttgatgtaggcatttaaagctatgaacttttcttttagcactgcctttgctgtatcccaaaggttttgataggttgtgtcactattattgttcacttcaaagaatttttaaatttccatcttgatttcatggttgacccagtaatcattcaggagcagattatttaatttccatgtatttgcatggttttgaaggttccttttggagttgatttccaattttattcaactgtggtcagagacagtacttgatataatttaaattttcttaaatttattgagacttgtttggtggcctatgatatggtctatcttgaagaacattccatgtgctaatgaatagaatgtatattctgtggttgttgggtggaatattctgtaaatacctgttaagtccatttgggtatagtcctgtactagggtatagtttaaatccattgtttctttgttgactttctttcttgatgacctgtcaagtgctgtcagtggagtattgaagtcccccactattattgtgcttctgtctatgtcaattattaggtgtagtagtaattgttctatatttaagattgtgataccttcctgttggacaaggccttttatcattatataatgtccctctttgtctttttcaactgctgttgttttcaaatttgtttgtctgatataagaatagctactcttgcttgcttttggtgtccattagcatggaatgtctttttccacccctttaccttaagtttatgtggattcttatgtgttaggtgagtctcttgaaagcagcagatacttgttcagtgaattatcaattctgccattctgtatcttttaagtggagcatttaggccatttacattcaatgtttctattgagatgtgacacactattctattcattgtgctatttactgcctgaataccttggtatttatgtatgtatgtatgcatgcatgcatgtatgtatttacttactgtgttgttttataggtcctgtgagatttatgctttaaggaggttctgtttgatgtatattgaggatttgtttcaagatttagagctcgttttgcagttctttgtagtgctggcttggtagtggtatattctctctgcatttgtttgtctgaaaaagactctttccttcatgtatgaagcttagtttcactggatacaaaattaatggctgacaattgttttgtttaaggaggctgaagataggacaacaattccttctagctagtagggtttctgctgagaaatttgctgttaatctgaaaggttttcctttataggttagctcatgcttttgcctcacagctcttaatattcttttctttgtcttgcctttagatatcctgatgactatgtgcctaggtgatgatctttttgtgatgaatttcccaggtgttctttgagcttcttgtatttggatgtctaggtctctagcaaggctagggaagttttcttcaattattcccccaaatacrtttcccatgcttttagatttctcttcttccgcaggatgccagttatttttaggtttggttgtttaacataatccaaaacttcttggaagctttgttcatttttttaaaattcttttttctttgtctttgttggattgggttattttgaaaatcttgtcttcaagctctaaagttttttattctgtttgttcagttctattgctgagactttccagtgcattttgcatttctgtgtgcccttgatttccagaagttgtgattgttttttatttatactacctatttcactgaagatttcttccctcatatcttgtatcatttttttatttcattaaattacactttgcccttttctggtgcctccttgattagcttaataactgaccttctgaattctttttctggcaagaagaaatctaaaagggatttcttcttggtttggatccattgctggtgagctagtgtgattttttgagggtgttaaagaacyttgttttgtcatattaccagaattgtttttcttgttccttctcatttgggtaggctatgtcagagggaagatctggggctcaggggctgctgttcagattcttttgtcccatggggtactcccttgatgtagtattctctctctcttcctagagggatgtggcttcctgatagccaaactgtgtgattgttatttctcttctgtatctagccacctagtgggtctaccaggttctgggctggtactggggggtgtttgtacagagtcctgtgatatgaaccatcttctggtctctcagccatagatagcagcacctgctctggtggaggtggcaggggagtgaaatggactctgtgagggtccttggttgtattattgttgtttattgcactggttttgtgctggttggcctcctgccaggaggtggcactttcaagagagcatcagctatggtagtatagggaggatcaggtggtgagtggggccccagaactcccaagagaatatgacctttgtcttcagctaccaggtggatagaggaagaccctcaggtggggcagggttagtcatgtcagagcttagattctccttgggtggggcttgctaccactgctctgggggatgggagtgtggttcccaggtcaagggagttatgctcccaggaggattatggctgcctctcctgtgtcatgcaggtcactagggaagtgggggaaagccagcaattacaggcctcacccagctcccatgcaacccaaaaggccaatctcactcccactgtgccctccccaccaacaacaccaagtttgtttccaggcagtgggcaagcagggctgagaacttgccccaggctaccagcctcccagctgagaaagcaagcagggctttcaggttttgtgccacccctcctgccygcatctgcacttgagcttcacctctttccctgagttctgtccaagaaagttcacatttggttggaattgttacaaaattcagttggaagtttccttctccctgtggtcttttcccagttcctctggcagccctccccaaggacccctgtgagacaatgtcagagatggcttccctggggactgagagagcccacagggctcttcccgctgcttactctactcctgtatttcgcttggctctctaaagtatctcagctccaggtaaggtcaaatccttctcccgtgatctggaccttcactttccccagtgaaggtgtgtgttcaggggtggatgatccccatttcccactttcccactttgggcactcaaattatgtgggctgtctctcaggtcctgcaggagcaatcctcttccttcaaagggtctgtggattctctcggctttcctagtatgttccttctgtagttcttgaagcaaaagttcacaacgtgagtctccacacactgctttgttcgtctgagtgagagcttcaaattagtcctgcctcctatctgccattttccccaccacaatccttttttaaaattgtgaagtagtagtccatagtatagataaaccacatgcttttattaatactttgttgatagatatttggattagtcacccacttttagctgtaattcatgaataagactgctgtaaaatttttgcatatgccttttatgggcatatgtttttattctcttgaataaataagagtggaattattgggttacatggtaagcatgcatttaatttcataaggaatgatcagttttccacgtgattgtgtgattttacagtcccagtaacaatttataatgcagcccttttaaatcaggcctttcagagagaatgagaactgagttctaatttgctaagatacctattgtatgtatagtagtcccctcttatcgaggggggatatgtcccaagaccctcagtggatgcctgaaaccacagatattaatactgaaccctatatgtactatgtgttttttcctaaatatacatacctatgataatatttaatttataaattaggtgcagtaagagattaacaacaataactaataataaaatataacaacaataactaattataaccacatattgtaaaagtcatgtgaatgtggtctctctgttttcagttgactgtgggtaactgaaaccacagaaagagaaaccacagataagaggggactactacaccgaattatcatctctcttagattcataggagtctagaattgtactagctttgggctatccttgagagaattgagaaaatagtcactgaattaattttatctagytctttctcccacagaaccccatgtgagaaaggttgtataagagtttactttgttccatccatatccttagcaacatttagtgttttcagtctctaattttagccattttactggatgtaaagaggtataattgtgtggttttaatctgtattttcttgattcctaatgatgttgagtgcctgtttgtgtgccatttatatatcttcttttgttaagtgtctgttcagttctattgctcatttttttgcttggtggtttttattgtttatttgtrggcattattgtagaagccgtttatctgaaatgtatgatttttttaaactagtctgtggcttgttttttgcttgtaattgctttgtttttgatgaacaaaaaattttagtatttctttttctagagacactgtcttattccgtcactcaggctggacagtagtggtgcgatgacagctcactgtagcctcaaactcctaggctccagtgattctactgcctcagcctcctaggtagctgggagtaaaggtatgcgctaccatgcctggccaatttaaaaaaaattttattttttattttttgttcagacggcgttttacttttgttgccgaggctggagtgcagtggtgccatctcggctcactgcaacctccgcctcccgggttcaaacgattctcctgcctcagccccccaagtagctgggattacaggcatgcgccactacaccaggctaattttgtatttttagtagtgatagggtttctccacgttggtcaggctggtttcgaactcctgactgcaggtgatctgcctgcctcgacctcccaaagtgacgggattacaggcattagctaccgtgcctggcctaaaaaaaattttttttttttgagacggagtgttgcactgtcgcccaggctggagtgcagtggcatgatcttggctcactgcaagctctgcctcccgggttcacgccattctcttgcctcagcctccccagtagctgggactacaggtgcccaccaccacacgyggctaattttttgtatttttagtagagacggggtttcactgtgttagccaggatggtctcartctcctgacctcgtgattcgccctccttggcctcccaaagtgctgggattacaggcatgagacactgcgcccggcccccaaattttttttttttttagacacagggtcttgctgttgtccagggtggtcttgaacatctagcctcagttttttggtagattttataggatttcctatgtagattatcatgtcacctgtgaattaagagttttgcttcttttctaatcttaatgccttgtgtttctttttctttccttatttacttggtagaacctctggtacagtgttcaacagaagaatgagaacagtcatccttgttttgttcctggttttggaaggaaagcaattcagcctttcatctttgtaacgtcagcaataagcttttcatagatgcctattatgagattggaaaaagtgtcttctatttgtaatttgctgagtgttcttattaagaatggatattggattttgtcaaatgcttattctgcatctgttgatatgatcataattatttctttatcagtctgttaatatgatgagttattattgattaatttttagttttcaaattgtaaaccaacctggcatgcctgggtaaaccccacttggtcatagtagattctgatttggttggatttgattaccaggattggttaaaacttttaacatacatgtttatgctttctccaaaagcattgtaattttacattttatggttaggtttttcgtgtatggtgtcatgtagtggtcagagttcttttttttccacaaaagaatacaattgtgttttttggtttgtttttgttcattttattttacttttcaacttttaagttgaggggtacatgtataggtttgttatgtaggtaaacccctgtcatgggtgtttgttgtacagaatatttcatcactcagggcaatgcagttgttttagcaccaattgtttcctttccccattggattgctttggtgtatttattgaaaatcgattgaccatatatctgtggtctatttctgtgctctgtattctgctttattagtctgttgatccgtagactaatgccataccatcttgaatactgtagtaagtctcaaagtcagctttggtaagtcttctacatttatttcttgttttctatttgtttatccttctactgaaatttcttcaatttgttgtcagtgtgctaattcatttatcaagtgtatccattctactatttacaacatgtattttttttaacttcatctactacatttcttataactgttatttgtaacttttttccttgtcttttttcatattgataatatctagcagtgtcttttagttttttaaatttttctagaacctccaaaaaaacaactttttttttttttttttttttttttaaagacaggattgccctctgttgcccaggctggagtatagcggcacagtcacagctcactgcagccttgacctctcaggcacaagtgattctcttgcctcagcctcccaagtagctgggaccacagacatgtgccgctgtgcctgactaatttttaaaaaaatttttatagagatgggggtcttcctatgttgcccaggctggtcttgatctcccagcctcaagtgatcctcccacattggcctcccaaagtgctaggattatagrcatgagccatcatgcctggcttctcctttcttttaaatttttttgggctaattacttttttggatgcattttttaaattaattaattaattaattttgagacggagtcttactctgtcacccaggctggagtgcagtggtgcgatctcacctcactgcaacctccgcctcctgggttcaagcaattctcctgcctcagcctcctgagtagctaggattgcaggtgcatgccactgtgcccggctaatttttgtatttttagtagagacagggtttcaccatgttcaggctgttctcaaactcctgacttcatgatctacccaccttggcctcccaaagtgctgggattacagacatgagccaccgctcccggcctggatgcacttattctaatataccagcttctgcttgattttgtaatcagtgkgttttgtttcgtttttaaatgactggccatctcaaatgtcttataattttggccctgggacacattttgccatggagatataagttattgtgtaaaacaatgctyttgggtgactaacaatatcagcctctttgagttcatggtatggggggatgggagagacgctgatgccataaaaccactatcactttctgcctcatatacacctgctttgtcagtttttcaccytttgctaccctagatgaagagacatcaggaggctctattagtctattcttgtgttgccataaagaaatacctgagtgtgggtcattttaaaagaaaggaaatttattttagcttatggttctgcaggctgtacaggaagcatggtgctggcatttgcttctggtgagggcacgagacagcttgccatcttggtggaaagcaaagggggagccagtgcatcacatgacaagggcaggagcaagagaaaagggraggtcccagatttctttgaacagccagatctcatgtgaactaactagcgagatctcacttatcaccaaggggatagtgttaaaccattcatgagggacctgcccccgtgatccagtcatctcttccccaggccccacttccaacattggaaatcacatttcaacatgagatttgtagcggacaaacatccaaaccatatcagatgcattccttaacagccttggctgcatattagaatcaaatgaggagctttaaaaaacaatagtgatgttaattctcattcccagagattttaatttaattggcataattgtgcagcctaactctaggacttttttttgttttgctgctttaaaataatttcataatttgtaggaagttacaaaaatatacagataagtcgatgtattcccgtcacccactttcccacaatgattacattttatatcactatagtacaatatcaaagccagaaaattgacattggtacaatgtgtgtgcatagttctgtcattttatcacatatgtagtttcatgtaactactaccacattcaagacacggaaagtctattaccgcaaaaatatccctcatgctactcctttacagtcacatctcctcttcccccaccatgatccctaatatctgacactaatctgttgtccaactctgtaattttgtcatttcaagaatgttataggaagagtcatacagccatgattttcaagattcgcttgaaaactcagaataatgccattgagatccagccaagtattaaattttgctactttttaatattgctgagtaacattccatagtatgaatgtaccataatttgttcagctattcacctggtgagggacattttgattttttccaggttttggctgttaaaaataaggtagaccatatgcatttaatataattattggtagggctcaattctccatgttattttttgggggtgtttttcgtttgtttctttcctctgtttctcatgtctctgtttttgttttcctgccttttcatggattacttgacattttttagaatcccatttttgatatctgtagtatttttgagtgtctatagatttttcagtggttgctctgtgaattgtacttacttatcacgatccactggtgtcacattttatcagtttgcataaagtatagaaatcttgtctccttttaagtccttttatcctcccccatttataattgtcttaatagatacaggttaatacctctttagtcttggatttcatcttttattaggtattattttgttgaatattgtctttattcttccctactgggattttgatttggtaaatattggaccttcttattctgtcttttatgtctgttaacctctattttgtattttttcattgttttatttgtgctctaatataggacctctgatctgttttttyccccagtttaccagttatctctttcacagtgtctattctgtatttttaacttgtccactgagttttgtaatctttaaaattttgatgttagtttaattttgtgaagttctatttggttcttttccaaatttgttgattatttttttctttatatatcctattattttatgtgtttgtatttaaacacatgtatttctaagtttctatttgatagtgctgtagtctgaagttcttagggatctaatttagtttgtgtgtcttttgactcccactaaggttggattgtttcttgatgtatttttaaattttgaattatgagatccttttccataggcctttgtctggggttagttctgtgcttgggttgagagcatgcctccagagttttgcaaggggttcctgattatatgaccaatcgggaaccaaattttattttgatgcttagattgagattaagactctttgttgtgttatacccaagcgagttagagaaaacgccacactttgagacgaattaagagtcctttattaagccggcggccaaagagacggctaacgctcaaaattctctcagcctcgaggaaggggcttgattaactttataccttagtttaggaaggggaggggagctcaaatgcaataattctacagaagtaaaaacatgcaagaatcaaaaaaacaaatggttacagagagattaacaatttaaaaggcaaatggttacaaaaaaaagcaacggaaccaggtgcggggctctaaatcctttgttagatatggatgctatgctggacacagactcaaggctttatgttgttatctttttgagcaaaatcctgggaacttcacacattgtttgttccagtaccttatcagttaatttggctcctttgaaatgctgagggtctgcttacacaggttaactccttgaggaagggggtcgggtaaggagcccttaatgtcttgtaaatcaaggggccaaatggagtttgtccggctttcccagctaagggagagtcttatttatatgggaaacaaggctaggtagttaaggagacaaaaagggaaaatttaaaaatagagttagtaaaaaacaaggttaggcattacagttgttattattttcctgagcctagcagcaattgacaaggtgtttttctctagtctgaccttctcactaatggtatatctctccatatttacatgggacaccttagttctrtttcctgtgttgcagacatctctatggcctcatcttgtttctgaattaaaacataaaaccctaggctattgagacagacaaaccccarccagagctaacatagtagttcctaatctgattgctctgatttggcattaggggacctaaggaaggtattatgaccaaaatgctaatagtagcttatgttggagtggtggattgaagatcccttcttaccctttattttttaaacttcctggttttataatgaaaatattaaaactgtataaaaatattaagaggaaataaatatattagtgtccttaaaagtttttagatttaaacacactacaagatgacaaaacaaaaatttcagaattagttttattattaaaatatttgcagacttttgtatgaaaacacagaaaaagatctttctgatactcagcgacaccttgctaagaaaaaatatgagctacagcttactcaggagaaaattatgtgcttggatgaaaaaattggtgagtttttttctcttaatattacttttagtttttcttaagtttggtagcaaagatgtattttcttctcttcagtataacatagaaaaacttggaaacaagcccttaactaagtttatgaataaaaaatagtagagaaattcatttttctttgacagcaaaattttttagatttagcaccataagtacttagtgataagttaaaatttatcaatgaagtaatagctaaactcagcagcaacagtttgtaaacttacgatgataacttaaatttgaattttttgtgtaatattgtagcttgtccatagctgctgtaatgaaacagtacctatatattacttttggtggaaagtgtacatatgtttagttatgtctagcgagaactcacttatcaccaaggggatagtgttagttatgtctatgatattactggggtttatagagaaagttacttttttaaagtttcttatttatgtttcttgttagtgatcagtatgaaaatatggtcctaacttaatcttacagggtaaaattttggtcagggctatagaagagcctattttaaagcagaggaaatattgttaacacttgctattatatagttcaagaatgtctggtataaccaactaggtagatggagatactatttatcaaaccgggaaatattaaaacagaaatataaaagataatattgaaggagaactcacatttgggtattttaagtcccaataaagatctaaggtaagcagctgaatatttaagtttgtgtctcagaagagaaagatacatatttgggacacatcagcatataaatgatattttaaaaccgtgaaattacctagggaaatatagagaatgagaagaggatccaggactgagtaacaagaagccaaagaagtaggaagaagacccagaagtgagtgttattttggaagacsagaaagcgaagtgtttttaaaaggggaggatatgatcaattgtcagacacttttgagaagtgaaataagtgaggctaaagaaaaatattgattggatttggcacattggaagatttggtaacaccaaaaaaaagtttgaatggagtgttggatgtagaagatagagtgggttgaggaataaatgggaagtgaagtcaggacagaaaagaatagaagtctctcaagaagtttggctattaaagggtagcaagaaaataaggtaatagtttgagtgggctgttaggttgataatttttttaagctaggagatactagagctattttagagatgtattgattgtttgattgccagtgggaatgaactcagatatcaggacacacaaaacatgcgggttgtcttaaaggcaatactgcctgcaaaaagagacatggtgtattctccagtactatatagatcaagcttttggcatatgacaatatggtattatctcccatagcactgctcctggatggccctcacaggtattaacctagtagggattaacctagaagtctgtctaacagagcttcccttgtagagctctagaccagtggttctcaaactttcatctgtgtcagaatcaccttgagagctaataaagatcactggagccagcctccttgaagtaggctagaaccagagcttttgtgtctctaacagtttctgtaggtaaatctaatacctagagtaggtaaactcctctagacgagtggttctcaatcctcattatacattagaatcactggggaaagaaggagtttttaaagcataaattgctgtgccctcccccagaatttctgattcagtaggtctggagtggaggcataagaatgtacatttcccaggtgatgctgatggtgctggttgagaaaccacaatttgaaaactattcttctgtaccaatcattcaggccttcaacgttgacactggcttgcaagagttctcacagattgaatcatacttcctgggatgattttttttcctaggaatttttataacactactttagaaataccagaatattagaagacattttactttaaagatgacttaattgaatattttattaagatttgttacttaccaactttatatacaacagtgattctaggctagagggaggggaggggaaactacaggagagaaatgccgcagattgttttgatattccacttacttcatccacccactctctcttttcccatcatacattaagtctactttgacagcttgcgatgtagagctttccttcactattctaattcattgttattgtgcttttgtgtttatgcatcatttagagttttgtgattcactgtagtttttaaccaaaaaaatttttttaatttgggatatagtactcattgttagtaattgaatataatatatattagaagtaaggagaagttcaaaaagtacgataatctgcttgaaatagaaaaaagattttattttgattaaaacaacacttttatgattgcatacatagataactttacaaggcaaaatattgcacagcgagaagaaatcagcattcttggtggaaccctcaatgatctggctaaagaaaaggaatgcctgcaagcatgtttggataaaaaatctgagaatattgcatcccttggagagagtttggcaatgaaagtatgttctgagaactgtggtttataagaaacgtttaaatgaaatgttaaatgttaaactatggtttaaaagaactagaatctgaataaaatatttgaattttctcaaatgtttttctagaagctggaacttcaaaatctgactttgaaatattttaagatagtcttaggaagcatgtgtacaaatctagtagctaatattttaagttgatttttctatcatgaattagtaattaatatcaattggcaagaactaattcagatatcaaaatataaagcatgacaataaagtagtgagactgatttcttcttaaaagcatattttcaggtagttaccctttgtaattgtgtttagaactaggaacactttttttttttttttttttttcaaacgggagtcttcctcccttgcccaggctggagtgcagtagcgcgatctcggcttactgcaagctccgcctcccgggttcaagcaattctcctgcctcagcctcccgagtagctgggactacaggtgcctgccaccacgcctggctaattttttgtatttttagtagaggcagggtttcaccatgttagtcaggatggtctcaatctcctgacctcgtgatccgcccacctcagcctcccaaagtgctgggattacaggcataagccgctgcaccctgccctaggagcacatttttacatcatcctcaggctttgagaatagatcatatagggctggtgaataaagctggatgataacctccatcccacatttttgttgttgaaaaaagatgttgccggccgcgtgcaggccgggtgcggtggctcacgcctgtaatcccagcactttgggaggccgaggagggcggatcatgaggtcaggagttcgagaccaacctggccaacatagtgaaacccccgtctctattaaaaatacaaaaaattagctgggcgtggtggcgggcacctgtaatcacagctcctcaggaggctgagtcaggagactcgcttgaaccccggaggcggagcttgcagtgagccgagattgggccattgcactccagcctgggcgacagtgcgagactctgtctcaaaaataaataaataaaataaataaaaggtgttgccaacaaggcagagatactgatattattttctagcttataaactgatttctgaaagcagttcctaagctgttttcacaaatatcttaagcaaaagcagcatcattggaataagggctttattagtttactttattactaaggtaactcattcattaatttatgtttccatccatccattcattatttcaacaaacatttgttgacatgtaccagatgttatgttagaaactgagggtgaggcaggggcatggtggcacatgcctgtagtcccagctacttgggaggctgaggcaggagtatcacctgagcctgggaggtggaggttgcagtgagcctagtttgtgccatcctactccagcctgcatgacagagcaagactctgtctcaaaaaaaaaaaaaaaaaaaaaaaaaaaaaaaggtgaatggtccgccttctcaaagcctctagtgtaataaggagagagataaagatactgttatgacagaatacattaagtgccataatgacatatgcacaatgtgttgttggaattgggcaaaaacacacctgattcagcctgggaattgggttaagggaggaggaaggtctggaaaaatcttccattaagtgatggtgcctggactaccctgaaaaatgactagatagtagtcaggagaatatttgaatgactagatagtagtcactgaatgactagatagtagtcaggagaatgactagatagtagtcagggaaagaagacaatgagaaagggtgatccagacaggttgaacagcttaagtgagagtccagtggctttcatgagaatttcatgagacttcctgatagtttagcatggccagagaacaggttgtagagagatagatatgggagggcaaagaaaagatgggataggcatacagtcccttctctgctgtgatgctcattgcaaccttacagtgtgtgtatgtgtgtgtgtatatatgtatataacccatctcttcatgtatctatatctatatcccatagagatatagatacatgaagagatgggatagttaagcaaaaaaatcataaaagtacatgtgatgttgagtgtgagatctatcatcatggatatagagggtcactgaaataatgataatgaaatgttacaattaggtctttattttataacaaatattctggcatttgtaaattcgtataaaagatggattatagggaaatgagagtagtgacagggacactagttaagaaaacagtgttgagagctatattagaatagtaggagtatcagtgagagaaataggtctcttaaggaagtaaaattgacaaggtatggtttctggcttaagaatcacatggatagttcctatgtatgaaggaagaaacaggaactagaacaggcttagaaaggaaagttattgacatgttgagtttgaattgtctttgggttatgtaggtgaaatattgaaatatttaaaggctcttggacttttaggtttggaggaaaatttaattaaagttaatagatttgggaatcatgaacataattgaggtcatcaaagggcatgagatggtaaatacttgtggaaaaggctgactcattgttttgaaattttaggttttttaggtagaattttgcttctcattatattcaaaacatttttgaatatttaagcatgatttcctttcacaacactaacatttagaagcaaaattcttcacatctttcaaaatctcattttcttgtgctatatctaatatttcacatttcttccattctgcgaaccgtaacaatgttatatttccttcacaagcaatattgagttacaagtctacttcaaaatcaagaactttgtataagattttatgaaagtaaacacatccatcctctgtagggaaaataacttgcaaggtaccattaggcaatcaaaagaggaaatgttctctataatgatacctcagagctgaactaacaaaggctactcagtgaaaactaatactgttcatatagagattacagaaataaattakcatggaaaagtctacattatagtgaataaagtgatttttttctagtatccatggtttaaaaagatgttttactacttgctaccaattaaaattagaaaactcaatggcaacttcatagatttttgggtaagaaaaaccagaattatttgaataaagttatagtttattttttctaaatatacttagcaccatcctgtccagactgaattttgacagttaacatgaatctacatccctagttggacaacatatgaggttgaataagaaatattaaatattattttaaaaaattgttaaaccttgaagttgtacaaggaatacatcttagaacatactgaggttgtacaaggaatgatggcacatttgagaaatggtggtattagggtcatattaagagaaaaataggctaagagtatatgttattggattcaacccagaaattttgttgccctggatactttacaatgtttctagagtatttttttttaagatgcacttatattgataaagtgaagccctttttaggcttatcaaacatattttaaggttaatcaagaaaggacttttttttttttttgagacggagtctctgtcacccaggttggagtgcagtgacacaatctcagcccactgcaaccctcgccacccgagttcaagtgattccctgcctcagtctcctgagtagctgggattataggcgcccaccactgcacccggctaatttttgtattttcagtagagatggggtttcaccatgttggtcaggctggtctcaaactcctgacctcgtgttccgcctgcctcaccctctcaaagtgctgggattacaggcataagccaccgcattcggcctcaagtaaagactttcaaaagcactagttcaactagcttttcagaatttgtttagaaatgtattaaattatatttcaaaaatgtgtaaacattccattttatggagtattttgtcttttagtttttccttcgttggcttgtccttcttgaaggggtttaactttttttttaatgcatattttaacaacacaccagtatctattactgccagatgtggaatctgtaccattccatgagaaagcagaatgggaaactgtagctaaaaataccctggagaagagcacatgaataaaggaagatagcacacacacacacacacacacacacgcaaatatgtgtaaaactaacgctaaagaaataggaacggccgggcgcagtggcttacgcctgtaatcccagcactttgggaggccgaggtgggtggatcacttgaagtcaggagtttgagaccagcctggccaacatagtgaaaccccgtctctactaagtatacaaaaaattagctgggcatggtggcgcatgcctgtagtcccagctacttgggaggctgaggcaggagaatcgcttgaacctgggaggcggaggttgcagtgagccgagatcgcgccctcgcactccagccggggcatcaagagcaaaactccatctcaaaaaaaaaaaaaaaaaaaaaaaaaaaaagaaaagaaacaggaacagaattggttggaaaatataggtttgggtttttaaaaatmtttttacttagttacttaaaatttgaaaattcaaatggcaaggtgaaatctagttattacttagtgaaataactttcttacttttttagggctaatgttagctctaagtatctgtttatagttggactagttcagggtcaatggaagttttaaaaagaggtgtgggaatggtattaaaggcattaagatattcaaacccatttctgccttgactgactccactacttctactccctcatcacgcctttgaaaaaggaaaatatagtttatttytcttacctttgctcgaggcctaatgcttaccttcttattagctctcacctaaatatcagtagtatacttctataagtaattggattggaacagctttttgaagattttgttgctggctaatataaataatacacttaatcaaaattattcttaaaaactaaatttaggtatacatgattggcttctctgggttttataacataaagaatgtgagcaagagaaccagttctaaatcccagtataaaatgccaatactccaatgccaaaccattggtttgcctccaaaaacaggtggttatagggttcttgtattgctgggtgactgcataaaatatcttttgacaaagaatttgatatactgatctcataattacacctaagtatagcctttactttaatgaacataatctatttttacccagtgcaaatattcacattgatatactaggctttaaagtgtggaaaagaataggacatacatgtttttaaaaccaaatggaaacctaaagggaaagggaaattttctttttgttcattcaattttaacagaaataacagcttaagatttttttatttaatacttatattatttttcaaggaaaagaccatttcaggcatgaagartatcattgctgagatggaacaggcatcaaggtaaatcagtcgtgcaacaaatatatgagctcttactggggggccaagtaccatgttaggtacaaagatagtaagaaacaaggggcttaatgatacgtgtaaggtgctaactctctcatcaaaggaggcctaagtctgtctaaggaactaaaagaggggatggtgtttgccaagtaaaataaggggaagggaagggcatttaaagtagaaagaatagcaaagaaccacagatcatgttgacaagcctcttgacctacaagtgggtgagtgttgttgaaacctagagtgtaaggggagaagtgaagggaggagactaaataggcaggcagaggcttgtgtwacagacaaatgagtattggttatatcctttgggcaataagaaatcattaaagaattctgaggagaattttgtgttagaaagatacctaagcagaagaggtggtgataaattggggtttaggagttgtgggacagaaggagtgaaatgcttttgtatgagggagagacaccaggaaaatgccaagtttctggccagggacaaatactgaacatgaagaaagtatgaggagaaaaaatgattttacctctgaatttgaagaacctttgggaccttattgtagacatgtctagtaagcagttaaatataagtctggagtataacagagggtctaaaactggagataattattttggagtcattggatctagatggggttgggaaccatggatatgaatagagtttgtctgagagaagggttagagtgagaataattgggaggctagggcttgagccctgaaaagcattaatttttaagtgggcagaggaagaggaatctgtaaaggagactaagccataacagaagtaggatgaaagccttcctaatacttgatgtaagaagttttgaaatatttggcaaatcattgactattatgtatactttgtatccttttcatagcgaaatgatggcaacattgagaaactctaatgcactgtctttgcagtatttattcctataaattcaaacgtgtttaaaatctcttcaaatgttttcatactaactgtccatcttctgtcttgtgagaatttgttgctstgtttcagtaaaatgtctcttcttatgtactctttgatttgtggaatagacagtgtactgaggccctaattgtgtgtgaacaagacgtttccagaatgcgtcggcaattggatgagacaaatgatgagctggcccagatcgccagggaaagagatatcttggctcatgacaatgacaatctccaggaacagtttgctaaagctaaacaagaaaaccaggtacacttgttcctagaatcattttctccaagaaaaaaaaatatgaatttcttgtgaggaacagccctcattttattttatagaagagctcagacactggaactagccttttcttttttttaaaaaataacaaaataggccacataatttttaaatggaattctcagacacaaagggttaaatattaaagaaaagagagaacagggctatatttgtattaaagcttagtacttccttgctgaaggataaatatttgaataatcaaaaaatgagaataaaaaccttgagaaaccttaaagaaaagaataggtgttttttttttaaaaaaatggactacatattattctgttttaagtatgaatgtatggactgtgccttgttttttggttctcattagcactgtgattctttttaggaaagttcctcttataattactctttctccctaaggcaatatatttaagtctaatctgcagttctcatttccaataacatttattttaacgtgaacatttaaaaatcctatttggaaaatttcttcccttctcaaaatttttaagaccaaatggttttccccactttgtatcactttcagtgtgtttagtttgcatcctgaaagtctgtgttctttaactgttgaagattattaatttacttaaacagctataaagctgtaatrctttgttaatcataaaaaattatctgagatgttaaagtattttgtttaaaagtaaatgaataatgggatcctggaatagaaaaaggacattatgtaaaaaaggaaagaaatctgaataaagtatggacttcagataataatgtgtcaatattggcttattaattgtgacatatgcaccatactaatgtaaaatgttaacaatagaggtgccctttataatgtcttcacaacttttctgtaaatctaaaactattctaaaagtttatttaaaaaattaatgaatagcaataaaaaccaaaacatgggaatttgtaaggtttgcctttgtgtactctttacagctagagcatatgggctaaaggtggatatatcttatttatgaaaacctagaaatttagtttctatttttttgattggtttagaaatagaagcttattatagaaagtcttttttctaaacaaaaagttaagagtttagaaaagcccccatgtttttgatactcagttactgttatatttgacatatttttttaattgctatacagtgcacttaaaaattttaacactatttttatacacattttctaatgtagtgggataaaatcacctatcactttagatcatgcttttttctacatgaagaggcagtagagtcgagtaagattcacatgggttgaatcttgctctctgcgtgtgtgatcatataaaccaacttctctgagtctctgtagcatctgtaaaaatggttaataagtgagactatacctggaaagcacttactgtactgtccagtatatcactcaataaatattttatagctattattagcttactataatattgtaagcattttcctgccttgttcaaactttgtaaacattttttataatcagaagaaaactgttgtcataacaatttacatatgctcaaaagtagttttttcttcgttatggtcataggcccaaggtagaagagaggtctctctctgtggaccacaggttaagaaccagtattgcagaagacgagaaagtggaaacttaaaaaaaatttatccttgataccacaatttttaacaaattgggataatgaggtatttttgtgttttagcacgatttttttttcacttaacataggcaaatatttccctgtattattaaaaatcattccaaacatttctcacaggtatgtaatattccattatgtggttatgccactatgtagatatactattatttactgcatgattcacttaatgtgaataaatattgtcactgtaacaaatgccttaatgacagcatctcattaaattttattagatttcatttcagagtgaatcacagattatcaggtttctttttaattattatttatttatttatttatttatttattgtagagttgggttcccactrtgttgttcaggctggtctcaaactcttaggctcaagtgatcctcccaaagtgccaggattacaggaaaaacacccagctgaggtttcttttttaaattaaaaaaatgtaaatagacattttcaaatataatgaatccccatgtgccatttcccaccttcaaaaataatcaacatttttgtctttcttgtttttatgagcatttaaaaattgtctcttgatacatcaccagattcctgatcacagatttgctttctgcaaatctacatttactccagtagtacatggaaatgcccattctttaccatagctgaatagctttaaatctttattaatttgataagcagaatagtaatgtgttgttttaattagcatatcttcagttgctagtagagtttttttcaggtcttacctacttatgcttccttttttgaattgcttatttgggtcatttgcccacttgctattgggcttatgtgttttctttttttatatgagtttatatattaggtatgttaattttatttgttccaagtgtttaaaaatttgtttatggtatttttgagatatagaaattttttatttttcatagtcaaatatacctatctttttttcgtaggcactgtccaaaaaattgaatgacactcataatgaacttaatgacataaaacagaaggttcaagatactaatttggaggttaacaagctgaagaatatattaaagtctgaagtatgtattttttttttctttttgctcatgatacttagttttcactagagttaatttagaagttggtatactcagaacgacaggtgaatcaaagctttctttaatacatagtatattttagttttgacaatggtgggttaactacatatttagaatgttcagaaagatgcctggagaatatgccccttttgttttgcaactctgccactctagacaagcagaatcttcctaactggatgatggacaaagggctaaaatcaatttgacctcgcttataattaattgaaagtggtggggtttccagttataaacctctgacaaaagaggttccacctgattatgtagcagatcagaattggttaccctgttatgggaccatctattttttttaggaccacaaggcagatggttctcctcacacytctctgttagcaatcatttgaccaggcacatgtacatgacatcagatgactccaataagtgtggtgcatgtgtggcaactcaggaataaacaggcagctttactgaggattttagatatgtctattaggtaaaatattatctaaaattgagggaggatgttcccattaatggtttgagtggtatgtaggtaacactatacctattataataatcaatccacctatactattttatcatttcatgtcagtccacaaacatatcttgaacatttatttatggtatgcatagtactgttaagggctttgagacagaagagattctaaggatttctaaattgcaatccttgctttcaggcagcaagcagcctgtgtaggaaaagcacgtggtttcctacacttcctgattttaaggttccagcaatgtaataccataaatgaacaaaaggctttttatttatgcaggctactcagcctctctgattcttcccatctgtaatcgggaagaacacccaagtaagtgagataatttaaaacacctagcacagtgagccatctgaatctattctagaataggtcagaaataaataaatgaatatccagagcaacacttttttttttttttgagacaggctcactgtattgccaggctggagtgcagtggtgcaatcgtggctcactgcaacctttgcctcccatgttcaagcgattctcctgcctcctgagtaggtggggttacaggtgcatgcaaccatgcccggctaatttttgtatttttagtagagacggggtttcgccatgttagccagtctggtctcgaacttctgacctgaagtgatccacctgtctcggcctcccaaagtgctgggattacaggcatgagccactgcactcaccccagagcaacatttaacatagtaagctttcagccagtgttaaacacttccctttatctcccttgtctgttagtaacattacctgaaattccaccattagggattataacttttagattctagaattatattttcagacatcacacatcaagcttyttaggctcaagtgatcctcccacctcggccttccgaagtgctggggattttagcatcctagtatgaatttgtttatgagattgcataacactggatggatgcaggcccggagagaatgaaccacggatccattttgatagggatagaccatcaagaagtgtggagtacttcattcattcactcattcatgcagcgtgctaggtgctggagtgccagagatgaaaaatggagaggaaacagaatgactgccaggcagtgggaacaacatgagcaaaggtgtaggggaaaaagtaggtcctgtaggtagagtagtgtgtacaagtggatgataaaggagaggtaagaaagaccttctttgaaccctattttcagaagcttttgttagaactaaaacatataagttatttaaggattgccttttaggaagtttattttggaaacgtcaagaataaaccagaagggtaacaaaatcagaagtggagagagcagttagaagaggttgtaaccataatttaggcaagaaatgcaaaggattccagctgaggcctayggagtgttgcagtgagacttgtgggtggccagagggagctgtggatacaggggaggcaccatatagaagtaaagagatcctgaaagcaggaaatagagaataccaaagaacagtttcattttctttatagtgttgcctctcatgctcaacactgctctggcctctatgggaggatatgaaaaagggtaaaatatgctttctgcttgccaagaaggagggagcactgggtggttggaggacaggagagacattctacggaatcccttttcactttgaataatgtactacctggtcacagaactaaatttaatataaaaatggttcctgctttagagaaatacaaggtgttatcagggaggctttacatccacacctagcaacacaaagctgtaaggcagttttaagtgaatgacatagacagtaagtactgcacaaagttaaagagggtaaagatcaatgtgaatacaattcgtttaagtatattgtacaagcaccctccaagtacatactctgtacacaactatgattgttagtacaatcatggaaaacacatatcaggttcctgctgacacagttggagtatctgaatcttgaaagccaataaggtagtttagtatattgttgactaacacagacttggcaaagatctttcacattagaggccacaaggtggcaatattagctgaatttccaccagtaaacataatcaggaaatggcttatctgatttgaaaggagtattagacattatttattgcaatttggtcattttatttagcccaggatttctgatagggacgtgcactatttattaacaggagagaaagagatctagtgccttttaaaaaattaccaaaattacaactaattttttagaatgaattcaccaaaccataataaaatatttttttaaatagcctaataatgattactsggtctattatattgtttgtggagctgaatttttttccctccttatttccctactagaaatcagaccctacttcagttactctgctcatgatagaattttgaaagttcaaaaaatctggttcttattgtatgctcaatttatacatgaatgcatatttacaactagtgtttattggcataggtttgatagtttacttctgagcaatttcaggaaagttactagactggcagggaaagttactagactagcaggtaaaagataatcatagaacagttcatgatcaagataattaaggctggggctatgaataaaaggcagacaccagacaggaaattatcagaagctgacatttaaaatatgcaagtactcagaagctctgtagccagcacagcccggtaaattggtcaagaacaagggaatacaccagtacgaaaggtcagaggctcagaatccagaccagcaagtagtcagtaagcagacatatgggaaaagcaggctgtggaggacttcaaacaaaaggaaatataagaacaaattcattcaggtcttgaagaaaagagtaatttacctaaatttactatttactagtgttcactgagtgttactcaggagccagggcagatgctgattgcagtctttgttaattacaggatgacctgttttctaaactaagagtatagatatatttcctcagggttctattataaacgcttctcatggcaagtgaattcccaatgacttggataataatgtttaatttttatcatatgttcagcattttaaagtaatagctaaagtttgcttttcaggaatctgagaacyggcaaatgatggaacaacttcgaaaagccaatgaagatgctgaaaactgggaaaataaagcccgtcaatcagaggcagataacaataccctcaaactggaacttatcactgctgaggcagagggtaacagattaaaagaaaaagtagattccctcaacagagaggttgagcaagtaagtttggaaaaatatgcttataatacatcctgcatcatatttaaaagagttttgtttggccttccataaattaaatgtatgaacaaacacgtaaattatttaaatgtactgtgaattgtagcatgctaaccattctccttatactttgattcttctacaatctcttatctaccctacatccagaacaatcattagcatttgttaaaattagaaactatttcaaacataccataaaagtgcaaaagtaacaaaacagataaacatatccccagctcccacatgtaaggatactaacattttgccatgtttgcttcaaatgtctccttgtttaaagaaataaaacattacagataaaacttctctcatccttttccctcctacctccctagttgctggtgtgcataactttcctgtcagtgtgtctaactcctttgcatatgtttatactttttctacaatcttacacccacaaataatgtataatgttatttggtatgttttggtttttatttaagtgaaaacaaacatagttggagatattcatttgcaacttgccctctttgctcaatattataattttgacacatctattttgatatatatatagtgtactgctttactcaaacagttgcatatattcattgtataaatattccctttttaaaattcattcccatattgaaggaaagttaattttttttcacttttttctgtgataaaacactgcaacaaaccttttacatttctccttgactacatgtttccctatatttatgcctggaagtgaattttaaaaagctatatgcctggagtagatccaagatatgtgcaatttcagctcttctaagtttttgtcaaattgctctctaaagtgtcattctgccataagaaatcctgagttattttctcaaatrtgaatcaatacttgatattgtcagacaattttttccatactttttgtcttgtgcttccttgattgcaagtgaaattgaggaccttttcatgtttctttgccatttaggattcttcctctatgaacattttcttgaatttctcttgaatgaaatttttgtaaactttggccatttttctattgcatagcttatctttttcatatatatatatttttttgagatggagtctcgctctgtcgccaggctggagtgcagtggcgtgatcttggctcactgcaacctccgctttccagattcaagtgattctcctgcctcaacctcccaagtagctgggactacaggtgcgcaccaccctggccaactagttttttttttgtatttagtagagatggggtttcaccatgttggccaggctgttctcgatctcttgacctcatgatccacccaccttgccctcccaaagtgctgggatcacaggcctgagccaccacaccctgccttcatattgatttttaacggaattctctatgtattcttgataataatcctcttaaagatattacaattatattgtccttgtctgtggcttgtcttttcaccttccttgcagtataaacagacatgttcagttctgatatactcagaattattatcaatattttcctatatagtttatacttttatgtcttctttaagaaatcctatacaatcccaaggccagagagatattttcctatattttcatttaaaagttcttctaaatgtttgaaagtatgtgaaattttgccatttacatttaggactttaacctgcttgagattgattttgtgcagttcgaagtagacatataatttttatttttgtgaatagatatccgttgtcctttcttctctgaaatataagtcaagtctactttgtcataaaaataagttcccatacattctgctccattggtcaatttatccccttgtcaataacacactcttgtagctattataattttatgttgagtcttgatatctggaagaattaatgttccctcaaattatctggactgtacttggtccttattaacctgtctcagatgaattttagaataaatgtatcagatttcatgattttatttcttttctatgcattgaagactggaaatttctatttttttgggtgcagccacctgcagcccacaagttttgagataatcctttcattgccattcagtttttaatatcatctcgtttcattatgatttatttttaattactaaagtttgtttgtctgtttgtttgagacagagtctcactctgttcctaggctggagtgcagtggtacaatcatagctcaccgcagcctccaattcctgggcacaggtgatccatctgtctcagcctccaagtggctaacactacaagtgtgagtcaccacacccagctaatttttaatatttttgtagcaatggagtcttactatattgcccaagctggtcttgatctcctggcctcaagtgatcctcccacctcaacctcccaaagtgctaggattagaggcatgagccaccacacttgacctgaagttttaaaaaactttccaatgtgcaggggacttgaggttattagtctatttttactttgttgtgtctaatatcttattgtctaatgtttctaatattgtgatcagataaaatggcttatgataattaattctttgttatctgctaagaattgcttagtggcagattatgtaatcaatatttgataatattctacatgaccttgaaaagcatctgtgctcacttcttggtggacacatatatgtatgttatatatatttacagattaggcttgttaatagtgtcagtcaagtcttataaatccttactatatttgtattcttgatctctcaaatactgaaagacatgttaaaatcttcctctgtaactgtggatttgtttatttccctctgaatgattttctcacagttctggagactggaaatctaagatcacagtgccggaaggtttggtttcttctggggcttctctccttggtctgcaaatgtctgccttcttgctacattctcacatggcctttcttctgtgcatgcacatccttggtgtctctccctattcttataaggacaccagtcatgttggattaggatcctatccttataaccccatttaaccttaattacctctttaaaggtcctatctccaaatatagtcacactagggggttagggttcaacgtatgaatttggaggggacacagttttgtccataacaggttgtttctagtttttggccgtgaggaatataatttctgtgaacattgtgttcaagtctttgcgttcatgtaagttttcatttttcttggataaataactaggagtggaattgctggattatatggtaagtatgcttaactttgtaaaaacctgacaaattgaataaataatatctagtatttgatagtacaacagggtgactatagtcaacagtaatttattgtacatttaaaaataactaaaagagtctaattgtattatttgtaacacaaaggataaatgctggaggagatggaaacaaaaaacaaagtggttatatcagtttacactcccgcttgcactgtgtgatagttgctctaaatcttctcccacacttggtattgttaatagatgagtaaggttatcacattcatattttagtttaccttttcctcacgactaatgatgttgaacagattttcacatgcttactggtcatgagtctatcttcttttgtgaagtagctgttcaaatctattgcccatctttttattggcatgtttatcttcttgttattaaattgtagatattttttgaacactttagattttggatattttctcccagtcattggcttgcctttctgttttcttaataaaatcattctaagagcagaagttttacatttttgatgaagtccagtttaccaattttctttttatactttgtacttctatgtcctgataaatctttgcatgcaccaaggtgcatagactttcttttaggaattttatatttttagattttatatttagatctatgctacaattgaattaatacttgtgtatgatgtaagataagggtcaaggttcattttttctcatacagatatgaaggtatccagcaccacttattgaaaagacttatttcatcattgaattatctacaaatttttcacaaaaatcaaatgatcatatatgtgtggatctgtttctatactctcttctgggtatacatctatccttagccagtaacccagtgacttgattaatatatctttatggtagatcttgaaatgagttagttaaatcctccaaatgtgttctttcctcaaatgtttggctactatgggtcctctgcatttccacataaatttagaatgagcatatcattttctacagaaaaaaaacctacttggggtttgattagcattattttgaatatacagttcagtatgggaagagttgagattttaacaatattgagtcttccaatccataaacatggtgtatccactcatttatttatttaggcaggtcttttatttctctcaacaatgttttgtacttttcagtgtataggtattaaatatattttgttaaatgtatcccatattatctcatggggttttttatggctcttatagaatatctcagtctttacaatgccattgtaaaaatgatattttattcttgaattttatgttccaggttttgatagcctatacacaaaagtagaatagaattttgtgaccttttattctgtaacattgtttaaattcaatgttttagtcctagtaggtttttgtagattttaaaaggattttctacgtatgcaattatgacttaaatgtataaagatagttttacttcttctcttttactcttctcagaacgcctttttcttctgcctagtacttcaaatatcagtattgaataaaagtggtgagagtggatattttttgcctcatatatagccataaggaaataggactcagtgtttcatctttgaatatgatattagctgcaggttttttgtagaagctttttttttttttttttttgagatggggtctcgctctgtcgcccaggctggagtgcagtggcgcagtcttggctcactgcagccttcgcctcctgggttcaaaggattctcccacttcagcctcctgagtagctgggaatacaggagcgtgccaccatgcctggctaatttttgcatttttttgtagaaacggggtttcaccatgttggccgggcttgtagaagcattttgtcaagttgaaaacattcccttgtcttacaagtttacttaaagttgtgtgtgtgtgtttcccccaagactgagtcttgctctgtcgcccaggctggtgtgcagtggcgtgatctcggctcactgcaacttccgcctcccaggttcaagcaattctcctgcctcagcctcccgagtagctgggattacaggtgcctgccactatgcctggctaatttttttttgtatttttaatagagatggggttttgacatgttggccagactggtctcgaactcctgacctcaggtgatctgcccacgtcggcttccgaaagtgctgggattacaggcatgagccaccatgcctggcctaagtttacttagagtttgtatcatgaatgggtataaaattttatcaaatgctttttctgcagctattgagatggtcatatcactttaattttttagtttgttaaactggctaatacattgctttaaaaaataattcctggatagtaggtcatggtggttttgttttttgttgagacatggtctagctctgtcacccaggctgcactcgtggtgcaaggtcatgatgtatttttaaacatacattattagattgcatatatatatatatataaaaatatataaatatatatatatatatatattattttttttttttgagacagagtctcactctgttgcccagactggagcacactggtgtgatctcagcttgctgcaacctccatctcctgggtcaagcaattctcctgcctcagcctcctgagtagctgggattacaggtgcccaccactatgcccagcaaattttttgtatttttagtagagacagggtttcaccatgttggtcaggctggtctcgaactcctgacctcataattcacccacctcaacctcccaaagtgctgggattacaggcgtgagccaccatgcccagccaggatttctgatttcttaggtcattttggtaatttctgtttcgctaggatttgcctatttcatctaagttgtcaaatttgtaggcaaatttgttcttactttgtagttatattcctttttgcattcttgttattggtaatttgtagcatttctctattctcttcatcagtctagccagaagtttatcatttatgtttatctttccaaagaaggagtattaatttaattgatttttctctattaatgaactagttttctatttcattgatttcttctctttattatttctttccttctaaataatatatgtttaatttttctcttcgtattttaatgtaggtgcttaggtcattggttttagcccattcttcttttctaagcatttaaggtatgtattttcccctacacagtgctttagctgtattctacatatttttgtgttgctattttttgtaacagctttattgagaataattaacatgccatatagtttatccacttaaagtatacaatttaatagtgcttagatgttcgtagagttgtgtaatgatcaccacaatcaattttagaacattttcatcactttgaaaagaatcactgtaccctttatcaccaccaaaccctccattaggtctttgatgcatttttagttcattttttttcacatggtatgaagtaagggtccaaattcattcttttgcatgtgtccatctagttatcttagtaacatttgttgaaaagactatttctcccctccccccaccatttgaatggtcttggcacctctatcaaaaatcaatagatcatagacacatgggcttcttctagactcttaattctatttcattgatctgtatgtctatccttatatcagtaccacactggcataattactattgctttgtagtagcttttgaaatggaaaagtgaaagtcctcctgctttgttttcattttttcaagattgtttggctattctgagacttttgaattttcatataaattttaggatcagcttgtcaatttctacaaagaaaccacctgggattctgatagagactatgctgagctggtagatcaatttggggaatatggctgtcttaacaatattaagttttctgatccatgaacacaaggtgtagtttcgtttattagatctttaatttctttcaacaatattttgttgttttcagagtataagttaggtcttcttgtgttaattttattcttaagtattttattattttgaatgcaactgtaaatagaattgttttcttatttttattttcagattctccatcgcaagtgtataaaaatacaatgatttttgtatatcgatcttgtatcctgcaaccttgctgaacttatttattaagtctaaaagtttttagtgaatgccttaggattttctatatctgtcacctgggctggtggattttctatatcaaagatcatgtcatctgtgaatagagatagtttttactttttcctttccaatctggatgccttttattttattttcttgcctaactaccctggctagaacttctagtacagtgttgaatagaagggtccagaaggggcatccttatcttgttcctgattttagggggaaagcatttcatcttttaccatcaagtatgatgttagctgttggttttttatagaaaacctttatgacactgaagaaattcccttttattgttactttgaagagtgtatttatcaaaaagggtgttggattttgtcaaatgctttttctgtgtctattgagattatcatgtagtttttctttattttatagatatagtatattacattaattgactttcatatgctaagccaactttgcatttttagataaatcccacttggtcatggtatgtaattattttttatgttgctggatttggctttctagtttttttttttttttttttgaaggattttgtgtatttctaggagcgtctgtaattttcttttcttgtaatgtgttgtctgtttttaatatcagagtgagactggcctcatagaatgagttagaaaatgtttcctcctcttctgtatttcaaaacagtttgtatggaattkgcattgattcttctttaaaggtttggtaaaaatttaccagtaaagccatctggtagagaagttttatgggaagttttaaaattacctctttatgggcagtattaaaattgctaatcaatttctttgttgttatagatctatacagatagtctatttttcatgagacagttttgctagtttgtgttttctaggaatttgttcatttcatccaagatatttaatttattggcatacagttgtttatagtgtatttttataatctatttcatttcagtaaggtcacattactactaatgcagtatgtaaggattgcgttactacattatttcatttctgattctattaattgagtctttttttctagatcaatctagctacagacttgtcaatttagttgatcttttcagaaactaacttggttacttggttgtgttgactattgttattttctttttttttttgagacgaagtcttgctctgtcacccaggctggagtgcagtggcgtgatctcggctcactgcaagcgctgcctcccgggttcacgctatattcctgcctcagcctcgcgagtacctgggactacaggtgcccaccaccacgcctggctaattttttttgtatttttagtacagacggggtttcaccgtattagccaggatgatctcgatctcctgacctcgtgattcaccctcctcagcctcccaaagtgctgggattacaggcgtgagccaccgcgcctggccgactattgttattttctttatttcagtaatttcttttcttcctttttttttttttttttttgttaattggatacagggtcttgctttgttgcccaggctggaatgcagtggtgcaatcacggctcactgcagccttgacctcctgggctcaagatcttcccacctcagccttccaaagtgttggaattacaggtgtgagctactctgcctggctgttttgttaatttctttctttctctctctctccctctctctttctggcagtaggaactctgcctggctttattcccccaccagttttattaaggtataatctaccaaataaaaaattgtattgtttacagtgtacaatgtgatattttaatatatgtataaattgtgaaatgattaaatcaagctaattaacatatccagcacctcatatgcttgccatttttttttttgtggtgagaacatttaagatctaccctcttagtaattttcaaacatacagtacattattattaactattgtccccaaaacttattctttctgtctaactgaagctttctctcacctcaccctgccctatcagctccaggtaaccaccattctactctctgcttctatgagctcaacttttttagattccacatataaacgagatcagtgtttgtcttactgtgcctggcttatctcacttagcataatgaamctctagggtcatccatgtggtcacaaatggcaggatttctttgtttttaaggctgaatagtatttcattgtatatctatataccacaagtttgctatccattcagccactgatggacacttaggttgattccatatcttggctattgtaaataattcagagcacatgggaatgcagatgtctttttgacatactgatttcatttcctttggatgtatatccagaagtgggattgctggattatatagtagttctgttttaaatttttaaagacacttttatactgtttcccataatggctatactaatttacattcccaccaatggtgtacaagggaaggggttccttttctccatatcctcaccaacatttatctttcgtctttcttgtaatagccattccaacaggtgtgaggtggtttttactttgcatttctttaataattagcaatgttgccctaatgattaccaatgtcgagtkttttttaacatacctgttggccagttgtatgacttcttttgagaaatgtctattcaggctctttgcccatttttaaattgggttatttgttttcttcctattgaattccttgtatattttgaatattaagcccttatcagctgtatggtttacaaattttttcccattttgtagattttctcttcacacttttctttgttatgcagaagttttttactttgatccaaccccatttctctattttctcttttgaagcctatgcttttggaattatatccaaaacaatcactaccctggtcaatgtcaagaagcatttcctctccattttcttctagcagttttaccgtttcaggtcttatatttaagtctttaatccattaagagttgatttttgtatatgttgaaataagggtccaatckcattcttctccataggcagtgttcccattatcatttgcagagatcgtcctttctccactgcatcttcttgacacctttrtcaaaggtcaattgactgtaaatgaatggatttatttctgggctgtctattctgttccattggtctctatgtctgctttttatggcactaccattctgttttgattactgttgttttgtagtattttgaaatcaggtagtgtgatgcctccaactttgttctttttgctcaagattactttgtctaaagggtgtattgtggttccatatgaattttaggattttttttctatttctgtaaaaatgctcttggaattttgatagggattacactgaatctgtagattgctttgggtagtatgaacattaacattattaattcttctgatctgtaaacatggaatatctttccatttatttgtgtcttcttcaatttctttcatcagtgttttatagttttcggtgaacatatagcatcttttttcttatgctattataaatgggattgttttattgattttattgatttccattctgtcagtgtatagaaatgctactgatctttgtatgttgattttgtatcctaaaatttactgaatttattacttctaaccattttttgttggagcttttcaccactgagtatgatgttaactgtgggcttgtcatatatagcctttattgtgttgaggtacataccttctatacctagtttctttagagcttttttatgtttattatgaaaggacgttgaagttggtcaaatgcattttctacatgtgttgagattatcatacgacttttatccttcattctgttaacgtggcctttcacatggattgatttgtatatgttgaaccatccttgcatctcagggataaatgctacttgattatggtgtatgatccttttaacatgttatccaattttgtttgctagtattttttttttttttggaaatttttgaatttgtatttaggaagaatattggcatgtagttcccttgtagaaaatttgtagaaaacattgtcttgctctggtatcatgataatgctgaccactaaaatgaatttggaagtcttcccttcttttcaattttttggaagaatttgaggattggtggtagttctttaaatgcttagtagaattcacccatgaagccatctggtcttgagcttttttttgatgtaagattttttttttaaatcttaactatcaggaatacactatttatttatttaatctttgagacagggtctgcttctgtccctcaggctggagtgcagtggtgccatcaaggctcactgcaatatctgtctctcgggctcaaactattcccctacctcagcctcccaagtagctgagactacaagtgcacgctactatgctcagctaatttttgtgtttttggtagagatgggcatgttgcccaggctagtcctgaactcctgagctcaggtgatccacctgcctcagccttccaaagtgctggggttataggcatgagccactgcacctggcaagatttatttatttatttatttatttattttaatttttttttttaaattgagatggagtctcgctctgtcacccaggctggagtgcagtggcgcgatcttggctcactgcaagctccgcctcctgggttcacgccattcttctgcctcagcctcccaagtagctgggactacaggcgcctgccaccacgcccggctaattttttgtatttttagtagagacggggtttcaccgtgttagccaggatggtctcaatctcctgacctcgtgatccgccctcctaggcctcccaaagttctgggacagatttatttttattgctgatttaatctccttacttgctttggtctcttcaggctttaaaaaaattttttttcatgattcaatctttgtaggttgtatatttctaggaattgttcttttcctctaggttatccaatttgttggcatataattgttcacagtagtcacttatgattctttgtatttcttgttgtgtctcttctttcatttataattgtatatttgagacttctttttttcttagtttggctaaagttttctcagttttgtttatcttttcagaaatcaactcttagtttcattgatattttctactattttttctagtctttattattataatttttgctccaatcctttatatttttatttcttcttccttctgcttgctttagattttgtttgcctttcttttttagtgtcttaagaagttaggttgttgatttgagattttttttctttttaaagataggtacttacctgcatcaattttcttctaagcactgctttagcggcagctcataagttcaggtatgttgtatgttcattttaagtaatctcaaagtattttccaattttccttttgatttcttctttgtcccattggttattttggactatattttttatttccacatatttgttagtttcccctttttttctgttattcatttctaatttaattttattattatggttggaaaacatactttatatttttacagcttaaaaaaatttcttgattttgttgtattgcccagtgtagtgtctattctagagaatgtttcatgtgcacttgaaaaaaatatgtattctactttgtttgatgaaatgatctatagatgtcttctaggcctgattggtttataatgttgtttaagtcttctatttacctgttatcttctgccttattgtggtaacattattgtaagtgctgtattgaagtctgaatatgagcattgaattttatcattttcccttcatttctgtcactttttggttcatttacttagtgctttgttactgagttcatatatacgtatattcttacgcatttctgatggccttgaccctttaccactgtaaaatgtcctcctttatctctagtaacatttttaaaaagtctgttttctctgatattatcataaccacttcagctttcttatgttgctctttgcatgatatattttttatctttttagtttcattctatttgactttgaaactaaagtgtgtcccttacagacagcatatagttgaaccttgcttatttacttagtttttcagtttttgtgattaaattgctttatcagtttacatttaatattattgatatacagtcatgtgtctcttaatgatgaaaatatattctgagaaatgtgccattcggcagtttctttgtgtgaacatcatagagtgtacttctggaaacctagatggtttaatctcctaacacctaggctatatggaatagcctgttgtgcctaggctataaacctgtacagcatgttactgtactgaatacataggcaatagtaatacaatagtatttgtgtatataaacatatctaaatatagaaaaggcacagtaaaaatatgatattataatcttatgggcccaccatcatgtgtgctggtccatcattgaccaaaacattattatgtgtcacatgactgtagttggatttatatctgccattttactttttcctatatgacttatgcctttttgttcctctattcctcctttactgtttccttttgcattaagtgtatattatctaataaaacattaaaaaatttttttgtgattttcatccctgcattttgtgaattattggtgtttgctacatgcatctaacttaccagaatctacttcaggtttatactaacttaattctgatgatatatggaactgttactgttacatagttctattcccttttcctccatttttttctattactgttatacatattgcaggttgagaatcccttatccagaatgcttgggaccagaaatatttcagattttggatttttttctgattatggaatatttgaattttacttactagttgcgcttttcaaaatacatatgaaaatctgaaatctgaaatgttttaacgagcatttcctttgaatgtcatgtcagtgctcaagaagtttcggattttggagtattttggattttctgtatactacaaaacaatgcattgttgctattataactttatacaattgtgtgtctttttaaaaacctgagaggaaaaatgagggcaactatatatttatagatttttgttatgttagccttccctcgccctcccatttctgggtgtcttcattgttactttggctttgagtttgtctcttttcatttccttagtccaataaagctttgctcccacccacgttctttgtgcatttattggtaaatatattgtatttyatctgttataggaccaatagtacaattatatttgtatcatcttatgtaatattatataattgrttttaaaatcagttcagatggaaaagagatgcagctatactgtcttttataattacataattatttttattgttgttctttgctttttgtgtgtggttttgaattaccatctgtgatcagttattttcagtttgaagaacttcctttagtgtttcttatatggtggatctgccaacaaggcatgctctcactttttgtttctctaggaatgtatttttctttttttttttcttttttttaaattatactttaagttctggggtatatgtgcagaatgtgcagctttgttacataggtgtacacatgtcatggtggtttgctgcacttatcaacctgtcacctacattaggtatttctcctaatgccatccctcccgtagcctcccaccccctgacaggccccggtgtgtgatgttcccctccctgtgtcccggtgttctcattgttgaactcccacttatgagtgagaacatgcggtgtttggttttctgttcttgtgttagtttgctgagaatgatagttttcagcttcatccatgtccctgtaaagaacatgaactcatccttttttatggctgcatagtattccatagcgtatatgtgccacattttctttatccggtctgtcattgatggacatttgagttggttccaagtctttgctattgtgaatagtgctgcagtaaacatacgtgcacatgtgcctttatagtagcatgatttgtaatccttttggtatatacccattaatgggattgctgggtcaaatggtatttgtagttctaaatccttgaggaatcaccacactgtcttccacaatggttaaactaatttacactcccaccaacagtgtaaaagcattcttatttctccacatcctctccagcatctgttgtttcctgacattttaatgatcaccattctagctagtgtgagagggtatctcatcgtgaatttgatttgcatttctctaatgaccagtgatgatgagctttttttcatgtttgttggctgcataagtgtcttcttttgagaagtgcctgttcatatcctttgcccactttttggtggggtcgtctgttttttttcttctaaatttgtttaagttctttgtagactctggatattagccctttgtcagatgaatagattgcaaaaattttcccccattctttaggttgcctgttcatactgatgacagtttcttttgctgtgcagagctctttagtttaattagatcccatttgtcaattttggcttttgttgccattgcttttggtgttttagtcatgaagtccttgcccatgcctgtgtcctgaatggtattgcctaggttttcttctaggatttttatggctttagatcttacgtttaagtctttaatccatcttgagttaatttttgtataaggtgtaaggaaggggtccagtttcagttttctgcatatggctagccagtttttccaacaccatttatgaaatagggaatcctttccccatttcttgtttttgtcaggtttgtcaaagagcagatagttgtagatgtgtggtgttatttctgaggcctctgttctgttccattggtgtgtgtgtatatatatatgttttggtaccagtaccatgctgttttggttactgtagccttgtggtatagtttgaagtccagtagcatgatccctccagctttgttctttttccttaggattgtcttggctgtatgggctcttttttggttctatatgaagtttaaagtagcttttttctgattctgtgaagaaagtcaatggtagcttgatggggatagcattgaatctataaatccctttgggcagtatggccattttcacgatattgattcttcctatccatgagcatggaatgttcttccatttgtttgtgtcctctgttattgtcttgagcagtggtttgtagttctccttgaagaggtccttcatgtcccctgtaagctggattcctaggtattttattctctttgaagcaattgtgaatgggagttcactcatgatttagccctcagtttgtctattattggtgtataagaattcttgtgatttttgcacattgattttstatcctgagactttgctgaagttgcttatcagcttaaggagattttgggctgagacaatggggttttctaaatatacaatcatgccatcttcaaacagggacaatttgacttcctcttttcctaattgaatgccctttatttctttctcctgcctgattgccctggccagaacttccaacagttgaataggagtggtgagagagggcatccccctcttgtgccagtcttcaaagggaatgcttccagtttttgcacattcattatgatattggctgtgggtttgtcataaatagctcttattattttgagatacatcccatcaatacctagtttattgagagtttttagcatgaagagctgttgaattttgtcaaaggccttttctgcatctattgagataatcatgtggtttttgtctttggttctgtttatgtgatggattacatttattgatttgcatatgttgaaccagccttgcatcccagggatgaagcccgcttgatcatggtggataagctttctgacgtactgctggattcggtttgccagtattttattgaggatttttgcattgaggttcatcagggatattggtctaaaattatcctttttttgttgtatctctgccagtctttggtatcaggatgatgctggcctcataaaatgagttaaggaggattccctctttttctgttgattggaatactttcagaaggaaaggtaccagctcctccttgtgcctcttgtagatttcagctatgaatccgtctggtcctggactttttttgattggtaagctattaattattgcctcaatttcagagcctgttatttgtctattcagggattcaacttcttcctgatttagtcttgggagggtgtatgtgtccaggaatttatccgtttcttctagattttcaagtttatttgtgtagaggtgtttatagtattctctgatggtagtttctatctctatgggatcagtggtgatatcccctttttcattttgtattgcgtctatttgattcttctctcttttcttctttattagtcttgctagtggtctatcagttttgttgatcttttcaaaaaaccaggtcctggattcattgattttttgaagggttttttgtgtctctatatccttcagttcttctctgttcttagttatttcttgccttctgctagcttttgaatgtgtttgctcttgcttctctagttcttttaattgtgatgttagtttgtcaattttagatctttcttgctttctcttgtgggcatttaatgctataaatttccctctacacactgctttagctgtgtcccagagattctagtatgttgtgtctttgttctcattggtttcaaagaacatctttatttctgccttcatttygttatgtacccagtagtcattcaggagcaggttgttcagtttccatgtagttgagtggttttgagtgagcttcttcatcctgagttttagttgattgcactgtggtctgagagacagtttgttataatttctgttcttttacatttgytaaggagtgctttacttccaactatgtggtcaattttggaataagtgtggtgtggtgctgagaagaatgtatattctgttgatttggggtggagtgttctgtagatgtctattaggtctgcttggtgcagagctgagttcaattcctgggtatccttgttaactttctgtctcgctgatctgtctaatgttgacagtggggtgttaaagtctcccattattattatgtgggagtctaagtctctttgtagatctctaaggacttgctttattcatctgggtgctcctgtattgggtacatatatatttaggatagttggctcttcttgttgaattgrtccctttaccattatgtaatggccttctttgtctcttttgatctttgtggtttaaagtctgttttatcagagaccaggattgcaactcctgccattttttgttttccatttgctcytcctccgtccgtttattttgagcctatgtatgtctctgcacatgagatgggtctcctgcatacagcacactgatgggtcttgactctatcaaatttgccagtctgtgtcttttaattggagcatttagcccatttacatttaaggttaatattgtcatgtgtgaatttgatcctgtcattatgatgttagctggttattttgctcgttagttgatgcagtttcttcctagcatcaatggtctttacaatttgtcatgtttttgcagtggctggtaccagttgttcctttccatgtttagtgcttccttcaggagctcttttagggcaggcctggtggtgacaaaatctctcagcatttgcttgtctttaaagcattttatttctccttcacttttgaagcttggtttggctggatatgaaattctgcgttgaaaattcttttctttaagaatgttgaatattggccctgctgtcttctggtttgtagagtttctgccgagagatcctctgttagtctgatgggcttccctttgtgggtaacccgacctttctttctggctgcccttaacattttttccttcatttcaattttggtgaatctgacaattatgtgtcttggagttgcccttctcgaggagtatctttgtggcatcagtgattttttgaagggttttttgtgtctctgtctccttcagttctgctctgatcttagttatttcttgtcttctgctagcttttgaatttgtttgctcttgcttctctagttcttttaattgtgatgttagggtgtcgattttagatttttcttgctttcttttgtgggcatttagtgctataaatttctctctacccactgctttaaatgtgtcccagagattctgttacgttctgtctttgttcttgttggtttccaagaacatctttatttctgccttcattttgttatgtacccagtagtcattcaggagcaggttgttcagtttccatgtagttgtgcggttttgagtggatttcttaatcctgagttctaatttgattgcactgtggtctgagaaactgtttattatgatttctgttattttgcatttgctgaggagtgttttacttccaattatatggtcaattttagaataagtgtgatgaggtgctgagaagaatgtatattctgttgatttggagtggagagttctgttgtctgcytggtccgcttggtccagagctgagttcaagtcctgaatacctttgttaattttctgtctcattgatttgtctaatattgacattggggtgttaaaatctcccactattattgtgtgggagtctaagtctctcataggtctttaagaacttgttttatgaatctgggtgttcctgtattgggtgcatatatatttaggatagttagcttttcttgttgcattgatgtttttaccattattttatgcccttctttgtctcttttgatctttgttggtttaaagtctgttttatcagagattaaaattgcaactcctgatttttttttttttttttgctttccatttgcttggtaaatattcctccatccctttattttgagcctatgtgtgttttcgtacgtgagatggatctcctgaatacagcacaccagtgggtcttgactatccaatttgccagtctgtgtcttttaattggggcatttagcccagttacatttaaggttaatattgttatgtgtgaattcgatcctgtcattatgatgctacctggttattttgcccattagttggtgaagtttcttcatagtgttgatggtctttacaatttggtatgtttttgcagtggctggtaccagtttttcctatccaattttagtgctttttcagagctcttgtaaggcaggcctggtggtaacaaaatgtcccagcatttgcttgtctgtgaaggattttatttctccttctcttatgaagcttagtttggctggatatgaaattctgggttgagaattcttttctttaagaatgttgaatattggctcccactctcttctggcttgtagcatttctgtagagattttcccttcattctgaaaggtagttctcctgggtgtaggcttcttggttgacaagaattcttggtattttgggttgttttgttttttgagctctttgaatatgttagatcactgctttctggattccattgtttctgcttagaagycagttgttaatattattggagttcctgtgcaattgacaagccatttttcccttgctgctttcaagatattttccttgctttcagcatttttataatgatgtgtctgattgtagatctcttagcttttatcctacttgcttatttagcatgctaaatatgaagatgaaaattttccttgaaatttatgaagtttccagccattattttttcaattatttcttctggtcctttctatatcctctccttctactactatcattatatgtaggttggtgtgcttaatagtgtcctatatttttckgaggtttgttcatttttcttcattctgctttttttcttcatcaaattgcataatcttcatcaatcttttttaaattcattaattgtttcctctgccagttcagaatccactgctgagaccctctgggaaaccttttcatttcaattattgtaatttcaagtttcagacattccattttgttcttttaaaaaaatgatttatatatttttttataatctttatttgatgagacattgtcatcatatcttcctttacttcattaaccatgcatcattaggtccttgaacatatttttaatgcctactttgaagttttgcttgttaattatgacatcwggttgcttgaaaatgtgttctcctcaatcttacaaaataaagaatggggccaggcatggtggcctcatccctgtaatcccagcactttgggaggctgaggcgggaggatcacctgaggccaggagtttgagaccagcctggccaacatggtgaaaccctgtatctactaaaaaaaattagccgggcatgatggtgcatgcctgtaatcccagctacttgagaggctgaggcaggagaatcacttgaacctgggaagcagaggttgcagtgagctgagatcacgccactacactccagcctgggccacaacgcaagactccgtctcaaaaaaaaaaaaagctcacaaaacaatgcagacagtacctctttcaggtaaatatgcacttttgcacatatacgtatgtatgtgtagtcagtatagcacagacagaagttcagaaagctatgccccaaatgttgtaagagatctgctcctgttccactcctaggcttgacggtagagacagttactgcagtacccagcttcaagccatgttacacagtggccaaagagcagcctgactgaggtgagggaaatctcgtctggtcagagccccagacagctgaccagccttctccgtgctacctgctgggccctctctgctggatgggctggccatgtcccgtctacagcgctttcttccctactgaggggcccttttaggatgccccagggccaacaaaatgcacccagtcatttctgttctagaatgtggtaccacataagacctgcgccccagcacatctcaactcaaagacctgtcttggctcacaaaggctgtgaagagaacaatataacactggccaagcctcacaaagcgagtgactcaaaccttcaaaatgtttgtgtttatctataaaaatgtcattttcaaccagagaggttgcagtgagccgagacagtaccactgcactccagcctgggcaacagagtaagaccctgtctcaaaaaaaaaaaaaaaaaaaatgtgggggggcaattgtctattcatgtgcatagcccactttttgatcagattgtttgtttctttcttgctgatttgtttgagttccttgtacattctggatattattattttattggatgcgtcatttgcaaagattttctcccactctgggggctgtctgtttactctgatgattatttcttttgctgtgcagaagttttttagtttaattaagtcgcatctatttatctttgtgttgcatttgcttttgtgttcttggtaatgaagggtttgcctaagccaatgtctagaagggtttttccgatgttctagaatttttatggttttaggtcttagatttaagtctttgatcattttgagttgatttttgtataaggtgagaggtgaggatccagtttcattcttctacatatagcttgccaattatctcagcaccattttgttgaataaggtgttctttccccactttatgtttttgtttgctctctcgaagatcacttggctgtacgttttggctttatttctgtgttctctattctgttccattggtctatgtgcctatttttataccagtaccatgctattttggtaacatagccttgtagtatagtttgaagttgggtaagtgatgcctccagatttgttctttttgcttagtcttgctttgggtattgttagaaatgcttgttccctggtgtcgcaaagaaatagcacttgaacataaatttaattccctcagcaaggccatttttactttctgcagaaagggtgcccattgcagatggaacaatggtgagagcacacttgagcaaaggaaaagcagacatgtttatctcttatgcatttgggtcatccttactgcagtgtcctgcatccattggctggagctggacctcacaatcttaaactgatacccaatttgctaataacctaaaactttcctaaataggtaagtgcaagagagaacaaagaagaggaagttgcttatgaaaggtttaaggaaacaataacatttccaaataaggaaggggcataagctatgagctaagacttgcctgggcctgtccagacatgcctgagtaagccaaagcaactaactgggctaaagtgtaagaactaatagttgataggaggctttagagtaaggaactgttattcctagtgtctattattttatttttaaatcaagacgaactttgaagattaacttttctactttctacagtatgctggctcttttttagtcatatacgaattttaggatgtttaggtttttttttttctggttctatgaagaatgatgatggtattttgataggaattgccttgaatttgtatattgtttttggcagtatgctcatttttacaatattgattctacccatccatgagcatgggatgtatttccatttgtttgtgtcataaatgatttctttcagcagtgttttgtagttttccttgtagagctctttcacctccttggttaggtatattcctaagttgtgtttttttgttttttgttttttgtttttgctattgtaaaaggagttgagttcttgatttgattctcaacttggtcactgttggtgtatagcagtgatgatttatgtacattgattttgtatactgaattcatttatcagatctgggagcttttggatgaatctttagagttttctaggtatatgatcctataattggcgaacagtgacaattgacttcctctttaccaatttgggtgccttttatttctttctgttgtctgattgctctggctaagacttccagtactatgttgaatagaagtagtgaaagtgggcattcttgtcttgttctagttcttagggggaatgctttcaacttttccccattcggtaatattgtctgtgggtttgtcatagatggcttttattaccttagggtatgtcccttctatgctgattttgctgagggttttaatgataaaggaatactggagtttgtcatatgttttgtctgcatctatggagatgatcatgtgatttttgtttttaattctgtttatgtggtctatcatatttattgacttacttacgttaaaccatccctgcatccctgatatgaaacccatttgatcatgatgtattatctttttgttatgctgttggattcggctagctagtattttattgaggatttttgcagctatgttcatcagggatattggtctgtagttttctttttttgttatgtcctttcctagttttggtattagtgtgatattggcttcatagaatgatttagggagcattctctctttctctgccttgtggaataatttcagtaggattggtaccagttctttgaatgacagaattcagctgtgaattcatctggtcctggacttttcttcattggcaggcagttttttgtttttgtttcttgttttttttgttttttaccatttgaatcttgctgcttgtaatctagaagggttgtatatttccaggaatttatccatttcctctaggttttctagtttatgcatgtaacaatgttcatagtagccttgaatgatcttttgtatttccgtggtattggttgtaatagctcccatttcgtttctaactggacttatttggatcttctctgctcttttcttggttaatctcactaatagtctatcagctttgtttatcttctcaaccagctttttgtttcttttatcttttgtagtggtttttttttttttggttgtttccattttarttctgctctgatctttgttatttcttttcttctgcggggtttgagtttggtttgttcttgtttctctagttccttgaggtgtgaccttagattgtgctctttcagactttttgatktaggcatttaatagtatgaactttcctcttagtaccacttttgctgtatcccagaggttttgataagttgtggcactattattgttcagctcaaataattttttaatttccatctcgatttcattgttgaaccagagatcattcaagagcagattatttaatgtccatatatttttatagttttgagggttcctattggaggtaatttccagttttattccattgtggtttgagaagatacttgatataaatttgatttttaaaaatttattgagacttgttttatggcctatcatatggtctgttttggagaatgttccttgtgctgatgaatagaatgtatgtcctgcaattgttcggtagaatgttctgtaaatatctgtgaagtgcatttgttctagggtatagtttaagtccattgtttctttttaaactttctgtcttaatgacctgtctattgaagtcccccactattattgtgttgccatctatctcattttttaggtctagtagtaattgcttataaatttgggagctccaatgttagatgcataaatatttagaactgtgagattttcctgttagactcttccttttatcattatataatgtccctctttgtcttttttaactgttgttgctttaaagtttgctttgtctgatataagaatagctactcctgctcgcttttggttttcattttgtatggaatatgtttttccacccctttacttaagtttgtatgagtccttatgtgttaggtgagtctcttgaagacatcagatacttatttagtgtattcttatcaattctgccattctgtgtcttttaggtagagcatttagaccatttacattcaatgttagtattgagatgtgaggtactattattcattatgctacttgttgcctgaatactttgtttttctttaattgtgttattgttttataggccttgtgagagttatactttaaagagattctattttggtgtatttcaaggttttgtctcaagatttagaactcctgtcagcagttctcatagtgctgacatggtagtggcaacttctctcagcatttgtctgaaaaaaaacttttttttttttcatttttgaagcttagtttcactggagacaaaatcttggctgataattgttttgtttaaggaggtaaaagataggaccccaatcycttctagcttgtatggtttctgctaagaaatctgctattaatctgataggtttttctttataggttactggatgcttttgcctcacagatcttaagattctttcttttgtgtttatttatttatttatttatttttgagatggagtttcgctcttgttgaccaggggcagtgcaatggcgcgatcccagctcactgcaacctctgcctcctgaattcacatgattcttctgcctcaggctccagagtagctgggattacaggcacccaccaccacacccagctaattttttgtatttttagtagagacagggtttcattatgttggccaggctggtctcgaactcctggcctcaggcgatccacctgcctcggcctcccaaagtgctaggattacagacgtgagccaccacacccggccaggttattgattttagatattccttcttttctaatatatgcactcagtgctataaatttcttgtaagtactgctttaactacatgccacaaattttggtaagttatattttaatttttgtttcattcaaaatattctaaattttttttgtgatttcttctttgacctatgtgttatttagaagtatgttgttaaatttctaaatattttgggattttccaactatccttctgttaatgtatttctagttcaactccattgtgatctgagagtatactttgtatgatttttgctcttttaagtttgtttagatgtgttttatagggcatacgtagtctgtcttagtgaatgttgcatgtgagcttgaaaagaatgtgtattctgctgtttttggataaagtactctgtaaatatctagatccaattgattgataacgctgttcagttgaattgtatccttgctgactttctgcctgcttgatctgtcagttactgatacatgggtgttgcattctccaataataatctataatagtaatctagaatagtagatatgggtatctctccttgccatcctatcaatttttttggcttacgtatgttggcatgctctgttgttaggaatgtgcacattaaggattgttatgtcttctttgaaaattaactttttacaatcattatgtcatgccctctctttattactgataattttcctttctctgaaatttgctttgtctgaaattaatgtagctaccccaactttccttttattagcattaacatttgaatattaatattaatttatcgtagctaaataagtagatcttgttttcttatccactctgaccatttgtcttaattggggtatatagattagtcacagttaaagtaattatagttggattaatatttcccatatttataagtatctttaatttattgccccgttcatttgtttgtttagtcttcagctgctcttctgccttttctggttttaatcgagcatgttatataattccattttgttttttctcttagggtattaattatattttctttgtatgtatttatatagttatttgtatcattatttgattaatatatgacttctctagtagtctggatgtttcattagagcagataccacataccatcgaatatgtacctagccacagtgactggaacatagagtatattcaatatatatgtgatgaatgggtgggtggatggaaggatggataaaaagttggcttggagaataagaaagagtgagtgaggaaggaagggaagagatagagagaaagtaggagtgaattayggccaaataacttataatgggagcaaattctagtgctttacacttgtaaaatcacttgtaaaaacacataaatttatttgcctctcagttctacttgtcttcacattatagcaaacaaatacttctctgtaggtggcagtgcacttacataagacatttttctgaaagaaaagggtgggggtggaattatcttgaacattcgaaagcatttatgtaacttgaatctcatagttttaaaaacacactcttatttcctataatgtggatatatacttaatttatacttgcccttagtctctttccctcagaggtattagtaagtgttaaagagttatcagttttcattttatgacattatgattgaaattgacatgccagtcaagaattcaaaaacagatgttgtgaataaaacagtggctagcatttttgtttttaacaacaacaatagcatttgtattataaaataattgaaactggctaatataggtaaaactgttggtcaaatgatatatctcaactagttttggggctggagacttttaagtgggaaaggtttttttttcctaagtacattaaaaagaatgaccagttgaccaycctgctcatgaattttatgtaaaaaaaaaaaagtcaaaacctgaatttatcttagactgttttgtacatattgttaccacctgtattatttaaacttcatacaatctaagtgcactactcttagatttgccccacttcatttttccatgttrtagtttccttccagtttaatatatatgtatacatacatatatataattttattcttacagcacttaaatgcagaaaggtcttacaagtcccagatttctaccttacataaatctgttgtaaaaatggaagaggagcttcagaaggttcagtttgaaaaagtgtccgctcttgcagatttgtcttctactagggaactctgtattaaacttgactcaagcaaagaacttcttaatcgacagctggttgctaaagatcaagaaatagaaatggtatgtaatrtattttaaaaatctttaaaattgctattactgtaaagttagtataattttggaaaagtaagttcttttttatgtaatattacatgaatccatgtctttgaacttagattttatttttaaaatccaagaggttagtttatgacagctgtattccagacaacttaagactgtaacagaaactcttcctttgagcatgtaatttgcatttacttttagccagcagaatcataaaacacattgacatmgcgatcagcaaagaaccatgaggttgaggtttatttagctaaattgtaactttaatgatattcttttaagctaaatttatttactaattggccgggttcttttaactgtaactcagttgattgtatctactttgtgcctgacattctacttgccacagggagtataatattcaaaagatataggttcctgtcctcagggacttcccattgacatacaaataatttgtaatgaatgatatattaataagagacactaaaagctttatagaggaaatttctattcagcccaggaatatcagggaggagtacacaaggagatactcaggagctctaaaggaatgaggcatcccattcagaaggaaaaacaacacagacaagggtatggagtgaataataagtactttgtaatggctagtgtagcatgcatgggaggaagtggctggagagatagagcccgaattttaaaggggtatgtatagaagatgcatagtgtatttgaaatagtggaaaattttggtcatgtttaaagttctgttattaccaaaccctattgaacctttattttttttatttttgagatggagtctcactctgtcgccaggctggagtgcagtggcatgatctcggctcactgcaacctccgactccctggttcaagcgattctcctgcctcagcctcccgagtagctggrattacaggtgcccgccaccacacctggctgatttttgtatttttagtaagacagtatttcaccatgttggccaggctggtcttgaactcctcgactttaatccagaatgtatggagatttgaagttgtctcaaacatacttttaaagccaccatcatttgcactctcaagcagttgatcctcttctagcatggataaagtcaattcacctagcatattcacaaatgggttgcagatccattccttccaagttcaggggtcttttgtgattgggaagtaatgctcaaactcttttgaaagctgagctaggtgatcatacaccaactgggagaaagaaggccctggctcaccctccttcaaaatctctgttaatgtttgaaaaatgtcaaaaatcccagtgttcactcgttgcccccataattccagtttggctttttttgtttgttttgtttcgtttcgctctgtcacccaggctggagtgcagtggcgtgatcttggctcactgcagcctccgcctcccgggttcaaacaattctcctgcctcagcctcccaagtagctgggattacaggtgcccaccaccacacctggctgatttttgtatttttagtaagacagcatttcaccatgttggccaggctggtcttgaactcctgacctcaagtgatctgcccacctcagcctcccagtgctgggattacagcagtttagttttgaatgtagccactttatctgccaacttgaacacagttgtcattctcccctgaagtgacagatagrgtttgttgagcaggctgtataggtcatacaagtaagcaagttttgagacccattctctgtcactaaaatgtgcttccagtggtgacattttctgaaagaaatctctgaagttgctctcataactcaaaaactctggccagtgatacacctttagaaagtcatctcacttctgtatataagagaagacgtgtttgctctgcatccatctcttcacagagctatgcgaacagacatgagttaagggcatgtactttaatgtggctgataattttaatcacatcctgcaaaacgttgttaagttcaggtgacattttttggatagccagcatttctctatagatgacacagtgtgtagactcacattcagaagcgacctctttgacccaagtaatgaaatcagaaagctatccagccatggcaaccactgccatctgctcatatactgacacaaaatgaccaattcagttttcctgatgtgtagtcattcaaagacttgagtagtctgcaactgtgatgttggttggcaacaaaagcgcacataacatgtcttcatgcacatgctcctgaaaaatatatcacacagaaacaagcattgttgccttgccgtcaacatccgtagactcgtcaacctggattgcataccacggtgactcattaatcctctctaacaattgtctcacaatatcctctgttatttcatcaattcatctagttattggtgctagccaaaagaggaacatgtgccaccttttgaacttcagcctctcctaaaattttatgacattatccttatcagtaggcaggatcaactctccaccaatagcaaagggcttcttagcattagcaatgtgtttagccactaagaatgatgctctcagtggagacacatttgatgaagtggtggcctttaataattgcttctgttctttgtgttcacattttttttcttttgagaaactccaaagtcttgtcttttaatacagggtgcttggtctccaagtggcaaagcagttttgaaggtttcatggtttcactggatagccggtcactacatattatacaaagtagacttggagaatgtgaatctacctgttgcaatgaacccgtaatttaagtgggacttggtattttcttttaaatgcagcgttccttttgttgatagtcttagattcttctgctgtctcatcattgggtcttttgcccttttcaaaggagctctctagtgatgtttgttttttactcattttggctatggttagcttgtgggtttaccaaaactatgactgagacaagtactcagtgcaggaaagagacacggatggaagtggtaaataaaaaaatgggcaggccacatgcagactaaaataagtgtcagattctgacttaaagcctgccactagatgcaactgtacaattgaagcacatcaactcacttgccactataaagcctactaccagatgcaacttaattttcacttgccactcagcaatagggttttgatatgagtctgcaagcaattgatttattaaggtctctgtgcagtcaaacctctctgctaatgttaatctatatttgcagcagctccccagagctaagatcagtgcctcagctccacctcagatcatcaggcattagattcctttaaagagtgcacaactgagatcccttgcctgtggaacacaatagggttccactcctatgagaatctaatgctgctgcagatctgacaggaggtggagttcagacagtaatgcgagtaatggggagcagttgtaaatacagatgaagctttgcgggctcacctgccattcacctcctgctgtgtggcctggttcctaacagaccacagactggtagcagtctgtggcccaggggttagggactcctgctttatcagacatgtggtttgcaaatattttctttcactaagtatgtggcttgtggtttttattctcttaacagggtctttctcaattaaaaagttttcaattttgatgaagtcgcatttataaattttccttttatggattgtgcttttggctttaagtctaaaaattatttgctatagctctaaatctcaaagattttcctacttcttattctaaatgttttatagttttatttttcacatttaattccgtgacccattttgagttaattctgcgtaaagtgtgaggttgacatagaggttcyttttttttttttttttttttttttggcctatgagtatccaccttcttctgtaccatttgtttaaaaagctatctttctgccattgaattgattttgtacccttgtgaaaaatcaattgggtatatttgtgtgggtctatttcttggttttctattcttttacatttacctatgtatctgtctttcccccaataccacagaattttgtttactgtagttatatattaagtctttaatttaggttcatctgctttattctttttttttcaaaattgttttaggtattctaatctctttgatttttcacataaattttagaataatctttttatatcttcaaaaatcctgcttgaattttgataggaattgcattaaaattgcattaacttggggagaattaacatctttactatgctaaggcctccaattcatgaacgtggtatgtcttatttagattttccttgatttcttttgttaactgtgtagttttcagcatgcaagttctgtacatgtttggatttccacctacaaaataaaaagaagtattctttttttgagctattgtaagtggtattttagtgttaatgtcattgtcaacgtgttccttgctagtatgtagaagtacaattgatttttgttttttgttttcttttggtttggttttagagattgggtctcactctgtcacccaggctggagtgcagtggcacacagattactgcagtcttgaacccctgggctcaagtaattctttcacctcagcctcccaagtagctaggtggcactacagacatgtgtcaccatgcctggctaatattttgatttttgtagagatggggtcttgctatgttgcccaggctggtctcgaacttctggccttaagcaatcctcctgccccagcctcccaaaatgctgggattacaggcgttagccagcatgcccagccaataattttaattttttttgagacagagccttgctctgtcccccaggctggagtacagtggcactatcttggctcactgcaacctccacctcccaggttgaagtgattctcctgcctcaacctcccgagtagctgggattacaggcatgtgccaacacacccagctartttttgtgtatttagtagagacggggtttcaccatatttcccaggctggtctcgaactcctgacctcaagttatctgcctgcctcagcctcccaaagtgctgggattacaggcatgagccacygtgcccagccaacaattttaatttttgaatgtttatcttgtgtcctatgaacttgccaaatccacttactagttctaggagttttcctgcagattccatggggttttctaggtaaacaaccactatatctgaaaataagaacagttttattattttctgatctgtttgccttttcttgccttcttgcactgtttcgtacttaagcacggtgtcagttaagaatggtgaaagtggacatcttaccttcttcccaatattaggcagaaagcattcagtgtttcaccactagtgttatctgtagtattttgcagttgttctttatcaagtagagggatttcccctctattcccatatttctaagaggttttatcatagattgatattgaattttgtcaaatgctttttcagcatctaattataagatccaatgatttttcttatttagcctattaatatgatagatcacattaattgtttttgaatattgaaccagccttccatccctgagatcattcaggtaattttaaataagaaaagagaagttagggtcaaaaatatctatattgccaccttcattctcctataaaaatagtttaaagcactatctggaccttttgttcagtcttagttttctttgcttttctttttttttaaatacatttactgagatatatttgttgatatataattcacactatataatataccctggtcttgattttctatctctaaattaataccatatctattaactaactcttctcaaggaattttgagaacatgaattccaaatattcttcctttagcatcttttaatgaatgcttatgttatgggtgatttccttaggcataatatgagaagtgctttggagaatctcatataatttttgaaggaagcaaaggatttttaaaaatgtagtcatcaccttaggctacaatggatttcagaacctaaaactagaataaggtactttctcccactatagacattttgtcacatttccttctggccttttcttttcctggccagatttttgtgttcttttgcatagttgcaaaataatatattaaatggattattctactttttaccatttctgtataaaaaatgtaaaatttttattgtataaaacaacatggaaaatttttttacgtaaaacttttatcacattttgcattatatccttaagatggattcccacaagtggaaattttggcacatacagccaacgagctttcaaaaagccactgcttcacaattaagaggaaacatcacgaaaacaaaaatggaaacaatagaccagttagaagttgaatagagaaccatggacagcagcagctaacaagagcccttctgggatcagagcaagcctcaaaaacttgcctcaaaactaccccttctgtgagtttgacagagagtagaatggtggtgatgaggggctgggggtgaggggagtaggggaagaagggagacgttggacarggggtgcaaattttcagttacaaggtgaataagtttgggagatstaatgtacagcatggtaactacagttaatatactgtatacttgaaacttgctgtgaatagatctcatgtgttcttaacacacacatacaacagtaactagttgagaggtgatggatatgttagttagcttaattgtggcaatcattctataatgtatgtgtgtatcaaaacatcatgttatattccttaagtatatataatttttatttgtcaatcgtacctcaacaaygcttgggttgggaagtagtacccctgcaaagggatcaaatgtaattggatcagactgtgaagcaaggtaacccacagttgattatcaaaataaatagaacagtcagctagcaattaatagaggctaatagttggatttgataccagtagggacagaccagccagacacttaacagggagatcagagagagacagtcaaagagagcctggctaaatccattgcatcctagcgggaggggctagaatgactgtgtaaatgcccatgggaagggatcggggtaactatgtgcataccctgaggagcaacatcrgaggctatataccgcaagggaaacagacatcatagaaacaatccagacaaataaataaggaaataagccaaccataacaagccccaagatggggaggatcagtatttagagatgctacaatatattatttaaaatttctggttttcaacaacaaaaatttaaccctcaaaaagccaggaaaatgcagcccatccataggaaaataaagcaaacaaaagaaactgtcttttagagcagcttattatttccttattattagtctctatttgatgagacattgttattaggccttcttttacttttttctttctttttttagttgacaaataataattatgtatatttatggagtataatgtgatgttttggtctatgtatgtagacagatttgatgtatgtatggcagacaggtttaattaagctaataacatatcaatcaacttatcaacttattttttgcatgatatcattaaaattttattcttttagcaattttgaattatacagtagattattattaactgtggtcaccatgcaatgtaataaatcaccaaaacttatttctccagtctaactaaaactttggactctgatcaacatctcccctttctccatccttcctcctcccaccattctactctctgtttctataaagtcagcttgtttagattccacttataagtaagatcatacagtatttgtctttctttgcctggcttatttcatttagcatgatgtcctccaattccacccaggttgccatgaatgacagaatttttttctttttaaaggccgtatagtaggagttcccaacccttgggccgcagacctgtacgggcccatagcctgttaccacagactggtaccagtcctagccgcacagcaggaggtgagcggtgggtgagtgagcattactgcctgagctccacctcttgtcagatcagcagtggcattagattctcataaaagcgtgcaccctattgtgaactgcgcatgcaagggatctaggttgcacactccttgtgagaatctaactaatgcctgatgatctgaggtggaacagtttcatcccaaaaccatccccaccccgactgctgtccatggaaaaattgtcttccatgaaaccagttcctggtgacaaaaaggttggggaccgctgctgtatagtattccattttgtatatataccacgttttctttatcaattcatccatttatggccttactttacctccttaagtatgacttcctttatttctttgaacatatttaaaagagctgctttgggccgggcgtggtggctcatgcctataatcccagcactttgggaggctgaggcgggcagatcacgaggtcaggagatcgagaccatcctggctaacacggtgaaaccctgtctctactaaaaaaaatacaaaaaaattagccaggcgtggtggcaggtgcttgtagtcgcagctacttgggaggctgaggcaggagaatggcatgaacctgggaggcagagcttacagtgagccgagatcatgccactgcactccagcctgggtggcagagtgagactccatctcaaaaataaaaaaaaaaaagagctactaagtctgactgtatatttttgttgtcctttcttctatcaacttctttaaaagctataacatttaaaagtaataattgtaacaatatatcattgggcttgtgacatatatagatgtaagtgtaagactaatatcactagtgagaaaaggaagaaaaacagctatgtaggaataacatttctgtattgagctgtaaataaacagttcaacagtaatagttgcagatgtcaataccccactttcaataatgaagagagcagctaggcagaacatcaacaaggaaatataagatttcaacaacacaaaaaccaaattggcattaacataaatttataaaacactcttccaaaaacagtagaatacatagtcttctcaacatggaagatcctccagaatagatcatacattaggccataatataagcctcaatagatttaaaaggattgaacttatgcaaaatatgttttcccatcacaatggaattgttagggattgataaaagaagaatattttgtaaattcacaagtatatgaaaattgagcagcacattcccaaatagtggtgagtcaaagaagaaatcacaaaggaaaaaaagaaaatactctgagattagtgaaaatgaatatgtactgtgtcaaaacatataggatgcagctaaagcagtacttagagggaaatttatagctataaatgcctawctatattaaaaaagaagaaaactcttaagtcactaacctagccttccacttagaacactggaaaaagggaacaaactaaacccacagcaagaagaatgaaaataataatcaagattagaacagaaactaagtgaaaacaatcaagaatcaaagaagccacaagcttgttctttcagaataccaacaaaattgacaaatctttagcaaagtgacagagccaaattactaaaatcgggaataagagaagggacatcactactaaccttataaaaaaagtatcataggggaatatcatgaacaactgaatgccaaaaattaaatgcttagatgaaatcaacaaatttccagaaaaacacaaactattaaaactgacttaaggaaaagtagaaaatctgaataaacctgtaacctaaagaggtgaaaatagaaatttttaaacttccataaagtaatactgaggcccagatggcttcagttgtgaattcttccaaatgattcaagatgcattgatccagcatttttgcaaactcttccaaaagtagaagacaacacttcttaatgcattctatgaagccattattgccctgaggccaaagccagacaaacacctcacaggaaaataaaactgcagaccattatctcttatgaatacagatgaaaaattctcgagaaaatactataacactgaatccaacaacacataaaacgaaatttacaccatctagtaaggtttattccatgaatgctgggttggtttaacaactgaaaaatcaattaatacatcatcatatcaacagaatcaagaacgaaaaccacacagccttctcaatggatgcagaaaaagcatttggcaaaatccaacattcttgcctgataaaaacactctataaactagaaatagaaactttcttgacctcataaagggcacctgtgaaaaacccacagcaaacactgtacttagtggtgattgaatgattttgccctaagatcagtatcaagacaagaatgcccaccttgccttttctattcaacactgtagcagaggttctaggcagggcagttaggcaagaaaaagaaataaaaggcatccagattggaaaagaagtaaaactatctctgttcgcaggtgacatgatctgaaatatagaaaatcctaagaatccactaaaaacgtattagaattaatgagcatcagggttgtaggacacaagatcaatatccagttatcatatttcttatttctatacattaacaatgaacaatctgaaaaaaaaattatatcaaacggaattgcatcaaaaagggtagcattaaaaaaggacaaatacggccagacgcggtggcttatgcctgtaatcccagcactttgggaggccgaggtgggcagatcatgaggtcaggagatcaagaccatcctggctaacatggtgaaaccccatctctactaaaaatacaaaaattagctgggtgtgatggcacgtgcctgtaatcccagctacttgggaggccgaggcaggagaatcgcttgaaccagggagtcagaggttgcagtgagccaagattatgccactgcactctgcctggtgacagagcaagactctgtctaaaaaaaaaaagacaaatacttgtactttacaaaactacagaacattgtcaacagaaattaaaggagacctaaataaatggaaacacatcccatgttcatgggccagaacacttatcattgttaagatggcattactcccaaaactgatccacaaatttaatgcaatgcttatcagaatcccaggtgtcttgtagaaattgtcaaactgatctaaaattcatatggaagtgcaagtgaatagccaaaacaatcttgaaaaagaaaaagaaagttggagaatcacacttccctgatttcaaaactggctgcaaaactgaagtaatcaagacaatgtggtactagcataaggaaagacatagaggttgatggaacagaattcagagtccagaaatggtttatacatttgtgcccaaatgatttttcaaaatacaggtgctaggacaattcaatgaggaaagaatagtatttttagcaaatggcgttgggacaacctaatatctatgtggaaaagaatgaagttggatcacatgcaaagattaactgaaaatgaatcatagggctatatgtaacagccaaaactgtattaagaagaaaacacagaagtaaatctttgtgaccttgggttaggcagcactttcttaaatacacatcaaaaacacaaacaaaaaaaatagattaagtagacttgatcaaaataaaaaaaaaaaccttctgtgctgcaaatgatatcatcaagaaagtggcaagacgatgcacaagatgtgagaaaacatttgcaaaccatatatctgataagagattcatattcaaaatatgtagtggtggttcatgcctctaatcctagcactttgggaggcctagacaggaggatcgtttgagcccaggagtttaagaccagcctgggcaacatggcaaaaacccatctctacaaaaaatacaaaaattaaccaggtgtggtggtgcacagttgtattcccagagacttgaggggctgaggtgggaggtttacttcagtgagccatcttcatgccactgcactccagcctgggtgacagaatgagaccttgtctcaaaaaacaaaaaacttaataacccaactaaaaaattaggcaaaggatattaatagacatttctctacataagatacataaatggccaataaacacatgaaaagatgctgaacatcattaatagaaaaatgcaaatcaaaaccatactatttcacaaccactaggatggctgtaatcagagagaagataaaaaatgttgacaaaaatgtggaaaaagtgaaaccctcatacattgctggtggaaatgtaaaatagtaaggcaactttgtaaaacattttgtcagttcctcaaaatgttaaaaattagattgccttacagctcataaatgtcacttctatctattcaagaggaatgaaaacatgtccatacaaaaacttgtatacaaatttttatggcaatattatttataatagtcccaaagtataataagtcaaatatttttaactcatgaatagagctgtggtttatctatgcaatggaatattattaggcaataaaagtgatgaagttttgatcctgctaaaacatcgataactcttaaaaacattgtgctaataaaggaagccagtcacaaaagaccgcatacacattgtttgtttccgtttatatggaatacccagaataaggcaaatagtagaaaatagtttaggggttgcctagggccagagaacgttctgtgttgggtgttttttttttttttttttttttttttttgagacagggtctccttcagtggccgaggctggagtgcagtggtgccatcttggctcactgtatcctcaacttctgggctcaagcaatttcccacctcagcctgctgagtagctgggactacaggcctatgtcaccatgcctggctaagtttttgaattttttgtagcgatggagtttcaccatgttgcccaggctggtctcaaactcctgagctcaagcaatccacctaccttggcctcccagagtgctgggattacaagtgttagccaccatgcccaaccttgagtttctttttgggatgatgaaaaagttctcacattagattgtggtaacgattgtacaactgtgttaatatgctaaaaatcattgatggcatgtgaattatatttcaaaaaagctattgtcaaaaaaatcacggtccattttctactcctgccagcaaagtatatgagattgccattgcccaatgtaatgttcattaacacaaactaacaaatttgcgatagactagaatagactagatagactagaacagtgtctttggtagagtttttccagttcagctgaaagagagtttgctcccagtgtgcatttagtaatgacatttttggtggtcatgactagagtggggaatgctggtggcgttgattgggcagaggccagggatactgctaagcatcctgtaatgcatagtgctgcccccactccaaataattatccaacccaaaacatcagtaatgttgaggtaagaagccctgaactagtaatagcatcttgttttagtttatttgattactagtaagggtaaattttccccatacgtttayaatttacttgtatttctccttttgtaaattttctgatcattatcatttagctcatatttctcatcagtttatatgcgttctttatgttagtagagatataagctattaatttgatttactaagtttatttgtcttccagttgtttcctttcaaattttggttaagtttatattgactatcaaaatgtttatttttttaatgtgatgaaacttttttttgcattgtatctagcttagaaaatttccctacctacctatctcccttccatgtaatttcatttttatttcttttcactggaatttaaagcttaccttttcaaatttaacttttaaatgcatatagaatttgttatgtatattacaagataaggaataattgttttctaaatactagtgactgttcttcctcctttttaaaaaacatttgtctcactgagcatattttaaggctcaagataattttctaaaggaagctttccacaagtttatgcaagagaatataagagattactccttatattaattataattatatttaattacattattaaatataattattaattatattaagagactataagagattactctttatataagaatataagagattactccttatattccttaattatggagtccaatgacattctataagcatgtagctcacctaactcaggacaaagcagtgctcacagatatcatcctgtcagtcttgcaggagtatataaagaaatatcaaagctggtagtagaaactggttgcagtttgaaattaataagccttttcttaaattaatgaattttctgatatgatcagagagatggagaaagtgatactatacatacatgtgtggtgtgtttatttggtaagaaggagggacacaatttcaaatcacattaaaagtagttgccagtttataacagattatgaaaattttgtgagtccctgataatataatagttaagtgaattaatgggaataagtgtagatatcttcttgttattgaacagagggagaatgagttagattctgctcattctgaaattgaactcctgaggagtcagatggcaaatgagagaatctccatgcagaatctagaagctttgctggtggccaatcgagacaaagaatatcagtctcagatagcacttcaagaaaaagaatctgaaattcagcttcttaaagaacacctttgtttggcagaaaataaaatgtgagttgtttagcaatataaagtaaagtcatacatcttaattttttggtactttagtagaaattttaagctagaatttagagaatttgccttctatactttgcctaaggatcagaaatactgtgatttgcctaagaggtggtactttttctattatgtttttcttatctaaatttaagtttaatgatctctactgattctttccaacagagttttgagtatgatagaatgtctgatctaaaatactgcctttaggaaatataacaaaatgagaaaaaaaattaaccagtttgaaaccagaagaattttcatatttagaccaatatattgcaacctagtgtttgcatttgccacatcatattttcttttgtacctattgcatgtactggatacctagaagaacacctgcattcacaaaatacagaagacttcccaggacattgattttggcttcttttctttctttttcttttctttaggatctctagcactcctagcaccttattaaaagacatttggctggagaattgggtggaattgcctccctgtatagtgaattttttttctattaaacttgatcatctctcataaaaactgatgggggacccttaacccctgttcttacctgtcccatctgtaacacttttcatccagcctccactctgtcctcacatctgaggtcaggacatggggaaggataagaagcatggtctcagcaatcagccactcctaggagcccctgactaggcaagggcttcagagccagggccagtttccttcagaaactgttttcaggttatagtggcggtgactgagtccttcttttccattactgtagctagcctattatgattccttcaacaggttttgcaggatcactttctcaggatggtaggtggaaatctaccttttgtgaaatacgccaaaacttccaccctaagggctatactctgttttagactggctggtaaatactaacacttagaattagcatgagaagtgtttgttattagtctctaaagtttagatttcagcagtctatgatactatcctgaaagcaagtgaagaggatagaatgttctgtgtgagtggcattcatcaatgtttatcttccctatgatattgtgccttattacaggttttttgaggcattttttagccttaaggaagattctattaaattgaagattgtgtatgtcaaatttcattataaggcacttggttgaatagatatatataaaacagaccatattaatcatggagctagtgaattccggtgttaattatttgatcataccactactttatagaatacctctaagtacttacataaaaaacaatttatagtaagtagtatagacagatgatgtataatatgttcccacagggaagctgaaacagagaaggattaactaattaaatgggactgggattgcttaggcttttcaagtaggctactctgcatacttactatgtctaacatgggcatattttagatgtactaataaatctggccataaaaatcacaatgtgatttggatccagctgagaaaccactatcaatatggtttcatgtaccccagaatcatagccatattttaagtttagtcaactataactcttatcttcttttaaacagggccatccagagtagagatgtggcccagttcagaaatgttgtcacacaattggaagctgatttagacattaccaaaagacaactaggaacagagcgctttgaaaggtaagtttatctctatgcaagctcaaaaacaatgcttttcagcatggaaagcattgtttcttaggtaacaagaggttttagttctttcatgatggttagattttcaagtatgaattgagctagttttatgatagttttaataattttgctggatataaaatttaaagcatcactattttgctttagggagagggccgtacaagaacttcgccgccaaaattattcaagtaatgcttatcatatgagttctacaatgaagccaaatacaaaatgtcattcaccagaacgtgctcaccatcgatctcctgaccgaggcctagatcgatcattagaagagtgagtctatttaaggatccattctcttgagatcaaatagcagtatctagtatagtgaacatttggggtaataaggaaactcaatagtctatctttaatagtgatatttaaacatgattaccaagatatattgatataaaatacaggattttgataattaaattagaattatatatattatactaaagtgaaaggtctaatattttatctgtttgcataaattatatatttttttatttccatggttttgggggaacaggtggttttttgttacaccgataagttccttagcagtaatttttgagattttggtgcatccaacacccaaacagtgtgcactgtacccattgtgtactcctttattcctcactcttctcccatccttccccctgaatccccaaagtccaatgtatcattctttttttttttttttttgagacggagtctctctctgtcgtccaggctggagtgcagtggcgggatctcggctcactgcaagctccgcctcccgggttcacgccattctcctgcctcagcctcccaagtagctgggactacaggcgcccgccactacgcccggctaattttttgtatttttagtagagacggggtttcaccgttttagccgggatggtctcgatctcctgacctcgtgatccgcctgcctcggcctcccaaagtgctgggattacaggcgtgagccaccgcgcccggcccaatgtatcattcttataactttcatcctcatagcttaactctcacttaaagtgagaacatatgatatttggttttccattcctgagttacttcccttagaataatggtctccaactccatccaggttgctatgaatgccattatttcgttcctttttatggctgagtagtattccctggtgtatttataccacattttctttatccacttgttggtcaatgggcatttaggctggttccatatttttgcaattgcaaattatgctgctacaaacatgcgtgtgcaagtatctttttcatataatgactttttttcctctgaatagatacccagtagttggatagatggatcaaatggtagttatacttttagttctaaatggaatctctgtactgttttccttagtggttgtactagtttccatttccaccagcagtgtaaatgaaaacattcccttttcaccacatctatgccaacatctatgctttttgattttttaattatggccattcttgcaggagtaaggtaggtatctcattgtggtattaatttgcatttccctgataattagtgatgatgagcatcttttcatatgtttgttgggcatttgtatatattcttttgagaattgtttattcatgtccttagcccactttttgatgggattatgttttgttttgttttttcttgctgattgtttgacttccttgtagattccagatattagtcctttgctggatgcacgtttgggaagattttctcccactctgtgggttgtctgtttactctgctgattatttcttttgctgtgcagaagctttttagtttaattaagtcccatctatttatatttgtttttgtttcatttgcttttgggttcttggtcatgaaatctttgcctaagccaaagttcagaagacttttaccaatgttatcttctagaatttttatggtttcagatgttagatttaggtctttgatcatcttgagttgattttttataaggtgagagatgaggatccagtttcattcctctacatgtggcttcccaattatcccagcaccatttgttgaataagatgtcctttccccactttatgtttttgtttgctttgtcaaaaatcagttggctgtaagtatttggcttcatttctgggttctctattctgtttcattggtctatgtgcctatttttatatcagtaccatgctgttttgataactatagtcttgtagtatagtttgaagtcaggtaatgtgatgcctccagatttgttctttttgcttagtcttgctatgtggggtcttttgaggttccatatgaattttaggattgttttcctagttctgtgaagaatgattatggtactttgattggaactgcactgaatttgcatattgcttttggcagtatggtcatttttacaatattgattctccatgagcatgggatgtgtttccatttgtttgtgtcatcagtgacttctttcagcagtgttttgtagttttccttgtagaattctttcaccaccttgattaggtatattcctaagttggtgtttttgtttgtttgtttgttttttgctgccattgtaaaaggagttgagttattgatttgtttctcagcttgattgctgttggtgtatagcagtgctactgatttgtgcacattaattttgtatcctgaaactttactgaattcatttatcagatctgggagctttttggatgagtctgtagggttttctaggtatatgatcatatcgtcagtgaacagtgatagtttgactctactgatttaggtgccctttatttgtttctcttgtgtgatcgctctgtctaggacttcagatactatgttgaatagaagcgatgaaagtgggcatccttgtcttgttccagttctcagggggaatgctttcaactgtccccattcagtataatgttggctgtgggtgtgtcatagatagcttttattacctatctatgtgaagtgtgtgtccctcctataccaattttgctgagggttttaaccataaagggatgctggattttgtcaaatgctttttctgcatctattaagatgatcacatgatttttgtttttaagtttgtttatgtgatctgtcacattttttgacttgcatatgttaaaccattgctgcatacctggtatgcaactcacttsgtcatggtgtattatctttttgatatgctgttggattcagttagcaaatttgatgtttaggacttctgcatctatgttcatcagggatattggtctatagttttcactttttgttatgtcctttcctagctttggaattagggtgatactggcttcataggatgatttagggaggattccgtctttctctatcttgtgcagtagtgttctataggattggttccaattcttctttgactgtctgatggaattcagctgtgaatccatctggtcctggactttttttattggcaatttttttattactgttttaatctctctacttcttactggtctgttcagagtttctatgtcttcctgatttaatctgggagagttgtatatctccaggaatttatccatctcctctagattttctagtttgtatgtgtaaaggtgttcatagtagcctcgaatgatcttttgtatttctgtggtattggttgtaatatctcctgtttcatttctcattgagctaatttggatcttctctcttcttttcttggttaatctcgctagtggtctatcaattttgtttatcttttcaaagaaccagctttttgtttgatttatcttttgtaatttttttgtctcattttcatttaattctgctctgatctttgttatttcttttcttctgctgggtttaggtttggtttgttcttgtttctctagttccttcaggtgtgaccttagagtgtctatttgtgctctttcaaactttctgatgtaggcactaaatgctatgaacttttctcttagtactacttttggtgtatcccagatgttttgataagttgtgtttcactattacctctcagttcaaagaagtttttaatttccatcttgatttcattgttgacccaaagatcactcaagatcagatgatgatgatgatgatgataattattattaatttttttgagatggaatcttgctctgttgctcaggctggagtgcagtggcatgatctcggctcactgcaacctctgctcctcaggttcaagcagttctcctgcctcaacctcccaagtagctgggaatacaggcatgcgtcacaatgccgggcttatttttatttttatttatttatttatttttttgagacagagtctcrctctgttgcccaggctggagtgcaatggcacaatctcggttcactgcaacctccatctcccaggttcaagcgattcttgtgcctcagactcccaagtagctgagattacagacgtctgctaccatgcctggctaatttttttgtgtttttagtagagtcagggtttcaccatgttgtccaggctggtcttgaactcctgacctcaggtgatctgcctgcctcagtctcccaaagtgctgggattacaggcatgaggcactgcgcccagccttaatttttgtatttttagtagagacagggtttcaccatgttggccaggctgattttgaactcctgacctcaagtgatccgcctgtcttcgcctcccaaaatgctgggattacaggcatgagcccccgcagccagcctcaagagcagattatttaatgtccatgtatttttatagttttgagggttccttttggaggtaatttccagttgcattccactgtggtttaagaagatacttcaggctgggtgcggtggctcacgcctgtaatcccagcactttggggggcggaggcaggcggatcacgacatcaggagattgagaccatcctggctaacatggtaaaacccgtctctactaaaaatacaaaaaattagccgggcgtggtggcaggcacctgtagtcccagccactcgggaggctgaggcaggagaatagtgtgaacccagggggtggagcttgcagtgagccgagattgcgccacagcattccagcctgagcaacagagaagattacatctcaaaaaaattaataattattattattattgtcatcatcatcatcatcatctgatcttaagtgatctttgggtcaacagtgaaatcaagatggaaattaaaaacttctttgaactgagaggtaatagtgaaacacaacttatcaaaacctctgggatacaccaaaagtagtactaagaaaagttcatagcatttagtgcctacatcagaaagtttgaaagagcacaaatagacactctaaggtcacacctgaaggaactagagaaacaagaacaaaccaaacctaaacccagcagaagaaaagaaataacaaagatcagagcagaactcaatgaaaatgagacaaaaaaattacaaaagataagttaaaaaagaagatactttatataaatctgattttcttaaatttattgagacttgcwttgtgtcctatcatatgttcaatcttggagattgttccatgtgctgaagaaaagaatttatattctgcagttgttgggtagaatgttctgtaaatacctgttaagtccgtttgttctagggtatagtttaagttcattgtttctttgactttctgtattgatgacctgtctagtgctgtcagtggagtattgaagtctcccactattattgtgttgctgtgcatctcatttcctgggtctaatagtmattgttttctaaatttgagagctccagtgttaggtgcatatacatttagaattgcaatattttccttttggactattccttttatcattatataatgtccctctttttcttttttttactgatgttgctttaaagtctgttttgtctgatataagaatagctactcttgctcactttccatttgcgtggaatatctttttccaccctttaaccttaagtttatgtgagtccttatgtgttaggtgagtctcttgaagatagcagatacttagtcagtgaatttttatccattctgccattccgtatcttttaagtggactatttaggctctttacattcaacattagtattaagatgttaggtattgttctgttcatcacattagttgttgccttaataccttgttttggtgttttcttcccccattgtgttattgttttatgggccctgtgagatttatgtcataaggagcttctattttgatgtattttgaggttttgtttcaagatttagaactcctttaaacagttcytgtagtgctggtttagtagtggcaaattctctcagcatgtctgaaaatgactttatctttccttcattatgtagcttagttttgctggatacaaaattcttggctgtttcataaggctaaagatgggaccccaatcccttctggcttgtagggtttctgctgagaaatctggtgttaatgtgataggttttcctttatagtttatcttgatgcttttgtctcacaggtcttaagattctttcctttgtcttgactttgggtatcctgatgactttgtgcctaggtgatgatctttttgcaatgaatttcccaggtgttctttgagcttcttgtgtttggaggtctagatctccaaaccctttacccatactcattatttaaaaaattttaccccatttgttttcttatatacacatgtggtggctcatgtgctcacatgcttgcatgtttcttcacagacacacacacacttgcacacacacatacttgcagaggcacatttaaaggtcagggaggaggtccagcaaggtcagggaggctttcytcaattattccctcaaataagttttctaaacttttagatttcttttcttcctcaggaacactagttattcttaggtttggccatttaacataatcccaaatttcttggaggatttgttcattttttaaaattcttttttgtctttgtctgattgggctaattctaaagacctgtctttggccgggcatggtggctaatgcctgtaatcccagcactttgggaggccgaggtgggcagatcacttgaagtcaggagttcaagaccagcctggccaacatggcgaaatcccgtctctactgaaaatacaaaaattagccaggtgggtggcacatgcctgtaatcccagctacttgggaggctgaggcaggagaatcgcttgaacccgggtgtcggaggttgcagtgagcagagattgcaccaccgtactacagcctggcaacagcatggataccagtacctgctctagtagaggtgacaggaaagtgatgcatcactttaggtcggggcagggttaggtgggtctgggctcagactctacttgggcagggcttgccacggccaccttgggggatgggggtatggttctcaggccaatgggcttatgttatagaggggatcttggccacctctgctgtatcatacagtttgccagagaagtggggaatagccagtagcaagaggccttgcccagctcccatgtagttggcaaggccagcctcgctcctgcagtgccttgctcagattttgccccaggccrtgagctaccccactgaaaaagcaagcacagcatttgaacctgrcccttccctgtctggctattcttgccctggctcctatctgcagcagcttccactcgtcccctggactctgctcaagaaaatttgtgcccagtcaaaaccactaccaatttcagttgggagcttccttcactctgtgacccctccccaattctgctggctgccttcccaaggacacctgtgagaagccattgctggcttccctgggcttgagctggagactgggagtgtgtgcaaggcacttcctgctgctacttctacttttatactttacgtgactccataaatctctttcatctctagataaggttaaatttttctcccgtgatgtggatttttagattccccagtggggacgtgttcggaggtaggttttcttccctctcacactttgggaactcacagtttttcacctgtttcatggaattggcagcagcatgccacttctttcgaaggatatgtgaattcttttggttttcctggtatattcctacagtgaatcttggagcaaaagatcacaatatgagtctctaacactgttctgtccttccatgtgggagctgcacgttagrcctgtctcctatctgccatactccatctgccccataaattgtattttaagagtttgatttcctttttatttctacattaacttctttcatttaattacaaaacattggttrttatagcaccacaaaatttatatgttctaggaaagtaatcagcttgttttttagaggaaaatattttagatatatttctatgtatcacaaatttcataaaaactttttatttggaaacaatttcaacctttcaaaaagttacaaaaataagaatacaaagaacatctacatgccctttacccatactcactatttaaaaaattttaccccatttgttttcttatatacacatgtggtggctcatgtgctcacatgcttgcatgtttcttcacagacacacacacttgcacacacactcacagaggctcatttaaaaatataaacaaaactccaaaccatgcccacaggtttcatccttgctttcttccattacttatatatatgttctttcttctacagtgagaaccttggctcaacattaacatgtttactcaacaatatcaatgtagttactaatttgctcaatcccagaatgcatctacaatagtttcaaaatttcttcaccgatgtcaccacaataaacaggccaactttttttttttttttttttttttttttgagacagggtctcgctctgtcacccaggctggagtgcagtggcgcgatctcggctcactgcaagctccgcctcccaggttcacgccattctcctgccacagcctcctgagtagctgggactacaggcacctgccacaatgccyggctaattttttgtatttttagtagagacggggttttcaccgtgttagccaggatggtctcgatctcctgaacaggccaactttttaaaagctcagaatctgtttgcagttcttccttcttaggcctgtatgctaccttgcccaagtcttgagagcatttagttaaatactgagtttgtaacttatttggattaatttttttccatcttttattttggtcatggtattcattgtaagtaacattggattcatttgtttcaatttgctttcatttttcatatttccacttcctagttttttcctcaacttaattttatttttgaatatgtagattagcatgcttttgaaggtcaacactctgcaaaaaataatactaagagaagtgtcactttctctttatgccttccatcccatcagccatgcctccaccccctttctttgtggttttgtgctaatgatacacagatacatatctttctttgtttatgcaaaaagttgcatgcttctttgcactttgcttttctcacttaacactatctcctggaaatctctccatattgattcatagagattctccttagtcctttttttcaggtgcacactactccagtgtatggatgtaccatagttatgcaacccacctcctaaacttggacatttaggtagtttccaataatttgcaattacaaacaaggctgtaatgaataatcttgtacatatgtattctcatgttgcagtatcttcagaataaattcctagaagtgggattgctgggtcaatgggtaaatacacatgtagttttgttagacagtgccacattcccctccattttgcagtcccttcagcaatgtgtgaaagtactgtttccccacagcgtcactaatagaacacactgtcaagcttttgaatttgtgccactgtggtggatgagaaatggtatttcagtgtagctttaatttgcatttctcttattgtgagtgaagttgaatatcttttcataggtttaagggctattattatatctctttttgggaattagctattcatttcttcgtctatttttctaatggactttagatctttttgttaaaaaaatttttagtacatttcagaaattatctctttattggtgatatatgctaccaatattttctcacttttttgtcatttgtcttttaatcttactgtattgcctttttctctataaagtttttatttttgtgtagtcagattttaaagcttttcctttaatgcatctggatttctattcacagttagcaaatctttctctctccccagatagtagaggaatgttttcttttagtacttgtatatttttactttttgcatttagatatctgattcatttggagtttattttatgtatggtttgagaaatggatctaattttatctttttccaactgactatcaagttgcaagatcattgatttaaaagactctttgtcccagtcattcagatctctttttggactttctatttctattccattgatctgcctattcatgtgcagtcccacactatttaattatagaggctatgtggtatttttaattctgtagggatagctcagtggtgtgctggtaaactggctttccaaagagaggagggggaggccctgatctgtagcacttgccaatttctgtggtgtaaatacctccactttttcattttttgcagatcttttatatcactgtttaatatttgttcatctgacctgttttatatcaagagtggtgttctaaagtctcctattattagtatgttttaattgctttttccatatcctctaaattttgctttatataggtggtttgctgttttatttgttgcattgatattctgaactgtcattcttcatcatggaatgtggcttttataaagtgtccttttctgatgcatttagatttttttcttttgctgaactctactttgtctggtattagtgttgccactcctattttcttgttgtttctatttacatggtaaatatttttaacttttttgagtaactgcattttaaatmtatctcttatatacagtatggatttgagttttgctttatgagtcattgtgaatttttttgagaaatttacactcttttttattatttattcttatactttaagatctagggtgcatgtgcacaatgtgcaggtttgttacatatgtatacatgtgccatgttgctgtgytgcacccattaactcgtcatttacattaggtattcctcctaatgctatccctcccccctcctcccaccccacaacaggccccagtgtatgatgctccccttcctgtgtccaaatgttctcattgttcaattcccacctatgagtgagaacatgcggtgtttggttttctgtcattgtgatagtttgctcagaatgatggtttccagcttcatccatgtccctacaaaggacataagctcattttttatggctgcatagtattccatggtgtatatatgccacgttttcttaatccagtctatcattgatggacatttgtgttggttccaagtctttgctattgtgaatagtgccacaataaacatacgtgtgcatgtgtctttgtaatagcatgatttataatcctttgggtatatacccagtaatgggatggctgggtcaaatggtatttctagttctagatccctgaggaatcgccacactgacttccacaatggttgaactagtttacagtcccaccaaccgtgtaaaagtgttcctatttctccacatcctctccagcacctgttgtttcctgactctttaatgatcgccattataactggtgtgagatggtatctcattgtggttttgatttgcatttctctgatggccagtgatgatgagcattttttcatgtgtcttttggctgcataaatgtcttcttttgagaagtatctgttcatatccttcacccactttttgatggggttgtttgttttttttcttgtaaattygtttgagttcattgtagattctggatattagccctttgtcagatgagtagattgcaaaaatattctcccattctgttggttgcctgttmactctgatggtagtttcttttgctgtgcagaagctctttagtttaattagatcccatttgtcaattttggcttttgttgccattgcttttggtgttttagacatgaagtccttgcccatgcctatgtcctgaacggtattgcctaggttttcttctaaggtttttatggttttaggtcaaacatgtaagtctttaatccatcttgaattaatttttgtataaggtgtaaggaagggatccagtttcagctttctacatacagctagccagttttcccagcatcatttattaaatagggaatcctttccccatttcttgtttttgtcaggtttgtcaaagatcagatggttgtagatatgcggcattatttctgagggctctgttctgttccattgatctatatctctgttttggtaccagtaccatgctgttttggttactgtagccttgtagtatagtttgaagtcaggtaacgtgatgcctccagctttgttcttttgacttaggattgccttggcratgcgggctcttttttggttccatatgaactttaaagtagttttttccaattctgtgaagaaagtcattggtagcttgatggggatggcattaaatctataaattaccttgggcagtatggccattttcacgatattgattcttcctacccatgagcatggaatgttcttccatttgtttgtatcctcttttatttcattgagcagtggtttgtagttgtccttgaagaggtccttcatatcccttgtaagttggattcctaggtattttattctctttgaagcagttgtgaatgggagttcactcatgatttggctctctgtctgtctgttattggtgtataagaatgcttgtgatttttgcacattgattttgtatcctgagactttgctgaagttgcctatcagcttaaggagattttgggctgagacaatggggttttctagatatacaatcatgtcttctgcaaacagggccaatttgacttcctcttttcctatttgaataccctttgtttctttctcctgcctaattgccctggtcagcacttccaacagaatgttgaataagagtggtgagagagggcatccctgtcttgtgccagtcttcaagggaatgcttccagtttttgcccattcagtatgatactggctgtgggtttgtcataagtagctcttattattttgagatacgtcccatcaatacctaatttattgagagtttttagcatgaagcgttgttgaattttgtcaaaggccttttctgcctctattgagataatcatgtggtttttgtctttggttctgtttatatgctggattacatttattgatttgcatatgttgaaccagccttgcatcccagggatgaagcccacttgatgatggtggataagctttttgatgtgctgctggatttggtttgtgagtattttattgaggagttttgcatcagtgttcatcaaggatattggtctaaaattctctttttttgttgtgtctctgccagcctttggtatcaggatgatgctggcctcataaaatgagttagggaggattccctctttttctattgattggaatagtttcagatggaatggtaccagctccttcttgtacctctggtagaattcggctgtgaatccatctggttctggactttttttggttggtaagctatttattattgccacagtttcagagcctgttattggtctattcagagattcaacttcttcctggtttagtcttgagagcgtgtatgtgttgaggaatttatccatttcttctagattttctagtttatttgcgtagaggtgtttgtagtattctctgatggtagtttgtatttctgtgagatcggtggtgacatcccctttatcattttttattgcatctggattccctctttttctattgattggaatagtttcagaaggaatggtaccagctcctctttgtacctctggtagaattcggctgtgaatctgtctagtcctggactttttttggttggtaagctattaattattgcctcaatttcagagcctgttattggtctattcagagattcaacttcttcctggtttagtcttgggagggtgtatgtgtccaggaatttatccatttcttctagattttctagtttatttgcatagaggtgtttaaagtattctctgatggttgtttgcatttccgtgggatcagtggtgatatcccctttatcattttttattgcatctatttgattcttctctcttttcttctttattagtcttgctagtggtgtgtcaattttgttgatcttttcaaaaaaccagctcctggattcattgattttttgaagggttttttatgtctctatttccttcagttctgctctgatcttagttatttgtcttctgctagcttttgaatgtgtttgctcttgcttctatagttcttttaattgtgatgttaaagtgtcgattttagatctttcctgctttctcttgtgggcatttaatgctataaatttccctctacacactgctttaaatgtgtcccagatattctggtatgttgtgtctttgttctcattagtttcaaagaacatctttctgccttcatctcgttatttacccagcagtcattcaggagcaggttgttcactttccatgtagttgtgcagttctgagtcagtttcttaatcctgagttctaatttgattgattgcactatggtcagagagacagtttgttataatttatgttctttcacatttgctaaggagtgctttacttccaactatgtggtcaattttggaataagtgtgatgtggtgctgagaagaatgtatattctttttatttgggttggagagttctgtagatgtctattaggtccacttggtgcagagctgagttcaagtcctggatatccttgttaagtttctttctcgttgatctgtctaatgttgacagtggggtgttaaagtcccccattattattttgtgggagtctaagtctctttgtacatctctaaggacttgctttatgaatctgggtgctcctgtattgattgggtgcatagatatttaggatagttagctcttcttgttgaattgatccctttaccattatgtaatggccttctttgtctcttttgatctttgttggtttaaagtctgttttaggccaggcacggtagcttacgcctataatcccagcactttgggaggccgaggcaggtggatcacgaggtcaggagttcaagaccagcctggccaagatggtgaaaccctgtctctactaaaaatacaaaaattagccgggcatggtggcacttgcctataatctcagctactcagaaggctgaggcagagaattgcttgaacctgggaggtggaggttgcagtgagccaagatcgcaccactgcactccagcctgggygacagagtgagactctttctcaaaaaaaaaaaaaaagtttgttttatcagagactaggattgtaacccctgctttttgttgttgttgttttccatttgcttgttagaccttcctccatccctttattttgagcctatgtgtgtctctgcatgtgaggtgggtctcctgaatacagcacactgatgggtcttgactctttatccaatttgccagtctgtgtcttttaattggagtatttagcccatttacgtttaaggttaatattgttatgtgtgaatttgatcctgtcattatgttgttagctggttattttgctcgttagttgatgtagtttcttcttagcctcgatggtctttacaatttggcatgtttttgcagtggctggtaccagttgttcctttccatgtttagtgcttccttcaggagctcttttagggcaggcctggtggtgacaacatctctcagcatctgtttgtctgtaaagtattttatttctccttcacttacgaagcttagtttggctggatatgaaattctgggttgaaaattcttttctttaagaatgttgaatattggcccccactgtcttctggcttgtggagtttctgccaagagatctgctgttagtctgatgggcttccccttgtgggtaaccggacctttctttctggctgcccttaatattttcccttcatttcaacttcggtgaatctgacaattatgtgtcttggagttgctcttctcgaggagtatctttgtagcgttctctgtatttcctgaatttgaatgtcggcctgccttgctagattggggaagttctcctggataatatcccgcagagtgttttccaacttggttccattctccccgtcactttcaggtacaccaatcagatgtagatatggtcttttcacatagtcccatatttcttggaggctttgttcgtttctttttattcttttttctctaaacttctcttcttgcttcatttcattcatttgatcttcaatcactgataccttttcttccacttgattgaattggctactgaagcttgtgcatgcgtcatgtagttttcgcgccatggtttttagctccgtcaggtcatttaaggtcttctctatgctgtttattctagttagccattcgtctaatctttttccaaggtttttagcttctttgcgatgggttcaaacgtcctcctttagcttggagaagtttgttattactgatcctctgaagtctacttctgtcaactcgttaaagtcattctctgtccagttttgttctgttgctggtggggagctgtgttcctttggaggagaagagacgctctgatttttggaattttcagcttttctgctctggtttctccccatctttgtggttttaatctaccttcggtctttgatgttggtgacctacagatggggttttggtgtgggtgtcctttttgttgatgttgatgctattcctttctgtttgttagttttccttctaacagtcaggaccctcagctgcaggtctgttggagtttgctggaggtccactccagatcctgtttgcctcggtatcaccagcggaggctgcagaacagcaaatattgctgcctgatccttcctctggaagcttcatctcagaggggcacctggctgtatgaggtgtcagtttgcccctactgggaggtgtccctgagttaggctactagggggtcagggactcacttgaggaggcagtctgtccgttctcagatctcaaactccatgctgkgagaaccactgctctcttcaaagctgtcagacagggacgtttaagtctgcagaagtttctgctgccttttgttcagctatgccctgtccccagaggtgaagtctacagagataggcagacctcattgagctgtggtgggctccacccggttcgagcttccaggctgccttgtttaccaaatcaagcctcagcaatggtggatgcccctctcccagccttgctgccacctcgcagttcgatctcggactgctgtgctagcagtaagcagggtccatgggtgtgggacccaccgagccatgcatgggatataatctcctggtgtgctgtttgcaaagaccactggaaaagcacagtagtagagtgggagtgtcccgagcactaggaaagggaattccccgaccccttgcgcttcccaggtgaggcgatgccctgccctgctttggctcacactctgtgggctgcacccactgtccaacaagtcccagtgagatgaacctggtacctcacttggaaatgcagaaatcacccatcttctgtgtcgcttacgctgggagctgtggactgcagctcttcctattcgaccatcttggaacgatccccttttttttttttttttttaagtcagagtttcactcttgtcccccagactggagtgcaatggcaggatctcagctccctgcaacctccacctcccaggttcaagtgattctcctgcctcagcctccctgagtaggtgagattacaggtgtccatcactacatccagctcattttttttttttttcagtagagacggggtttgccatgttgggcagggtggtctcgaactcctgacctcaggtgatccacctgccttggcctcccaaggtgctgggattacaggcatgagccaccacacctggcctagtttttgtatttttagtagagacagggtttcaccatgttgaccaggctggtctcaaactcctgacctcaggtaatccactcgcctcagcctcccaaagtgctaggattacaggcatgagccaccacaccctgccattttgaaaatctttttaaaaaataggtgaattacactgggcgtggttgctcacacgtgtaatcctagcactttgggagactgaggcagacagatcgcttgagcctaggagttacagaccagcctgggcaatggtgaaaccccatctctacaaaaaatacacacacaaaaaaaattagccagatatggtggcacgtgcctgtatttctagctacttggtaggctgaggtgagaggatcaactgagcctggaaggtcatggcttcagtaagccataatcatgccactgcattctagcctgggcaacagaatgagaccctgtctcaaaaatagaatagaacagtataaataaaatagatgagttaaaatcttttacattattgatatgactgttatgtcacatcaatagttataattactttctgtactatgtgatatttgttgtatttcttcatttgatcagtcttctttgctttttaacaaatttcttttggcttttatgaaagtttattttattttagttgttacctttctattaatatgattaacaatgcccttaatcaccttttttctcacttaatcttttactctcagtttcaaatggtgtcctttgactgacacctattatctagacaacagacatcacattgaatttactttcctctaaccactgctctgtttcctgcctctctagttttgcctttyccaggttgtcatgtaaatggaatcatacagtatgcagcctctagtggttgactttcacccagcataatatatttcagatttatccaggttgttgcatgtattagtagttgtcacatattccttttaactgctgagtagtattccatagtatagatgtaccacaggtacttttttttaatgattatagtcttggccatacacagtggctcctgactataatcccagaactttaggaggctgaggtgggaggatcatttgaggccaggagtttgagaccagcctggccaacgtggcaaaaccccatctctactaaaaatacaaacattagctgggcgtggtggcgcatgtctgtaatcccagctactcaggcggctgaggcatgagatttgcttgaacctgggggcagaggttgcagtaagctgagatcatgtcactgcacttcagcctgggtgacagagtgagactctgtctccaaaaaatagtaattaaaaaataaaaatagaatgattatagtctcacaagtagttgcaaaaataccacagacagtcccacatatccttaccccagcttctataatggagtatcttacaaactgggatattgacattagcacagtgtgattaactagtctaaaggccttattcagatttcactagtttttagatgcactcatttgtttgtatgtgtatatatatawtttttacaatccacacacagcacaactatgatcaagatgtgaagttgttccatcagcaccaaagaattcactccctcattatgcctatttatagttgtagccctgaccttcttcatctccctgtctcctgggaaacactactttcttcgccatctctataattctgtcgttttgagataaccttttcagattaacttttctcattcagcataatgcccgtgagatccatccaagctgctgtaagtatcaatagttcattcctatttattgttgaatagtattccatggtatgaatgtaccagtttgtgaaaactgagtgaaaaaatatattgttttttgttttccttcatagaaatgaagaaaaatcttacgttttgctgaagtgatacacttactagaataaatttgttacacatgttgaaaaagttgaattaaaaatattaatcagcatgattttttctcttataggaatctttgctacagagatttctgacacctgaaatgattcttcacatccctgagaaaggtcaaagttacaaactgatttttttttttttgctacatgagtgcatttatcttttaaatgcttggcaatgttaaatgtatttattaactttgtgtctctgaatctctgttctaatgtgccatgttgcagtgatctgagatgacttataaaaacaaaaatgtatatggctctttctatccatgcagtgatagtgagtgtaaaatctgcttacttcactattgaacactattmtgttcactatctggagtaaataaagaagcttattaaaacagggaaaagtgtttttacaaaactgctttcctttcctttcttggtatctcaaataattggttggttaattttttttctttgtgatttgtgttttcatggctggaaaatctgtgccaaaatgggtacaacttactgatactggtctgggatctgatattccattttggaaccaaccttacatgaattccatgccataatctgatattgaagcagcagaaagtaggagtgttgtcagggttttaaaacctatagtattgtaccactcaaagactaagtaacatacatattctacaattgtgtttactactactgcttttagaaaggtaggtgatggtatatctgtcaagaatgtaagattttattaaaaatctttatttttaataagttttctttcaagtactgcaatcaacttaattgcgattttattttattgtctgtggcagctgtctgtaatctggagtaataagataagtgatgtttccttcctcccccaatttcctaaatctcttaccttatctatccataggctttgatgtaatgttcatattagagcctgaatgctactgtattttactgatataaactatttgtattcttgccattttaataaaaaaaggcttgtcattaatagtattcatatgatgtagacaatttctcattttatatagttactattcaatatgactatagtgatgtaggaaagtgctctgatttaggtttcgtttaatcactagcatgctgatattttactataatttcatgctacatattcactgtggtttgcttttttaaaacctttgggttcagtcatctggtttaagacattaattacagattggttaaagaattaataatttaaagtaaaatgccctcttataagcatttttaaaaataatatgcaaaaagttgtccttgctattattaaataatatgttgataaacatgaaaaattcacctttattgggtgactcaatgaccttagcactagatcatcacattaactttaatctatccacctagaagagctgataaagagctgaatgttactgtcatatgcacttaatacatgttatgtatggagggcagtatgtgagaagggagcatgagggaagcaggaatgaagtatgtaagaaaatatttccatgtttgaaagtatgctttacttgccttgtgccattaattacagaacatttatatgggacaattatatagtaagtataaagggaccatcattatctaaaggaaggagaaaattcatctgcattgtatgttaaaatttcaaagaaaagatttttgttttggtaatattcaagaacatttgttattttaaatgagattctaattgcttgatataaatatttaatagcctgttgctatgatagaaactgcctaatgtaaatacaatatatgaaactataccaaacatattcttccttggatgacaaggaagtctcctgaaaaagagttctcagctttcaaatatcatgttcaatatgaaacacctactcctgctaaagtaagggtgtttgtgaaaaaagaattgttaaccctctgagtaatttaaatctaaaatttgttgtatataaaccctattttgaaattccaggcaccaccggaactctgtcttttctttggtttatctgagacatcatgcaactttctgttggaagtaggagcaaggcattcacacgaggctccattctgaagttcataagctatagtttcaaaaggagcaggtgttatctttttgatctttagtatattattactattagagttcatctcccttattacagtttagcaaccagtgggcataatgaattaattaaacatgttctgataatgatatcagctactaaaagcttagatttgaatcaactaaaagtgtaaatgatgtaaagaaaatttctagctgacactctgtacaaatattggccacaatgattataagtcattcaccctggagcaataaaagaagaaaaaaagactatgagtggaagccactggatttgaagtcaattatgattcctaaatagttattgcttcaaaaattatttaaaattatgaattcagatacttgaaatatattaatattttaaaataacactatcataagaatctgctacttttctcttttctgtcttcctactcattttctcataaatccttgctgtcatctttaatagagtcgccttagcttcccaaaggctatgctcaaagttgcatttcttgtgtaataagtattagtttgtgacccaattctgaagactaaccaatcatctttctgagttttgtggacctaacttaaatatatgattattatactactcaatcaaattattttatacttgtctctttcaaatgcatttaaatgttctttctaattattttttatttatttttattttatgtttttgaggcagggtcttgctgtgtcgcccaggctggagtgcagtggtgcgatcatggcattcgagctgagatgctcagtcctcatgtactcaagctattttctgaattagatcttagaggttagtgtttaatctgaccatatagtatcataatccattattgatagggtctagttcatacaaaataaaatccaaccctttggggctataaagctgtcttccctcctcagcctcaggtcagtagtgaggaccatagttgcatgccatcatgctcaggtaatttttaaaaactttttgtacggatggggtcttactatgtcacccaggctggtcacgagctcctgggttcaagcaatcctcccacctcagcctcccaaagtgctgggattacaggtgtgagccatggcaaccagctgttccccgcccccactcccgtagagtttgtgcatttttattatgttgcttgctttgattctctaggatcataggatggctcctcaaatacactcatctattttctggttttgtaacattccttatgttttacacgttactataaatggtcttttctagtcagttactgaagtgaattatgtacctttgtgtgctacctatggtggtaacttcagaaacaacttaagtgagtgaatcttggtttgctctttcataaggcatgcagcctacttgagcattcttttgattgttatacctttgcatagtttaggggcatctgtgaggttattgggctgtttgcatgttgtttatcatgtccctgcagggtccaccccatcagctatatcactgccgatctgtttttgttgtaaactgatgacctttcatcacactgtttttactctgccatcttctttcttattttaacttttcttctttaataataaatatagttattcttagttcatcactaagttttggagaacgaaagtaattagttccccaaacagccagtgacatagatatgattttttccatattatgggtataaagagaggagaatggaatctcaaagaagttatatgattgtcctgtatataatcacaaagcaaataagtatctgagtcatggtctttgaacacatgtgtctgtcttatgccaatgaccatgctgttaaccaccttgctcttctgcctcatttatctttggctgtgatttttatgatcattgcctgccaatcatagtgttttcactaactggagtatttgccaataagcaatgaatcttcatcatctctttgtgctttctgaagaactttcactttgaggcttctttgttgcttcttggatttaccaagattttattcaagtatgggtgtaattcttcagagtaacagatactcagaaggtttacacgatatatctgttatttatgaagctgttttcaattaaaaggtcacattttttgtcttataaaccatggcattccagaaaacaatgttgcctagtctttttactacactaatgcacttaaaattttgaataacaactaaacatgaagtaccttgtatgtgattgttgctctaaccactttaattcatgcaattttagttgttcctcttttaatttaactaaaaaagtgtgaaaatttttgaataaggcaatatatattaccatcataggttagctgaaatagtaaatcactgagagtggtgtgatcccatagtaataaagtacttcatgtgacaaaaacattggagcatgagatgctcagtcctcatgtactcaagctattttctgaattaggtcttagaggttagtgtttaatctgaccatgtagtatcataatccattattgatagggtctagttcttacaaaataaaattcaaccctttaaggatataaggtggtaattttgtgggctggacgcagtggttcacacctgtaatcccagcacttcgggagccccaggcaggcggatttgaggtcaggagttcaagaccagcctggtcaacatggtgaaaccccatctctactaaaaatacaaaaatcagccaggcatggtggcgggtgcctgtaatcccagctacctgggaggctgaggcaggagaatcacttgaacccaagaggtgaaggttgcagtgagctgagatcgtgccactgcactccagcctgggcgacagaacaagactccatctcaaaaaaaaaaaaaaaaaaagaagatgttaattttgtattttctaacagtatagattttttttttaattctccattgtttgcttgatattttgattgggagtgaaaggtatccagattacttgaaaagttacttgaacttccaacactgtgttgaataggagtggtgagagagagggcatccctgtcttctaccagttttcaaagggaatgcttccagtttttgcccattcagtatgatattggctgtgggtttgtcataagtagctcttattattttgagatacgtcccatcaatacctaatttattgagagtttttagcatgaaggctgttgaattttgtcaaaggccttttctgcctctattgagataatcatgtggtttttgtcgttggttctgtttatatgctggattacgttttattgatttgcatatgttgaaccagccttgcatcccaggggtgaagcccacttgatcatggtggataagcttttcgatgtgctgctggattcggtttgccagtattttattgaggacttttgcatcgatgttcatcagggatattggtctaaaattctctttttttgttgtgtctctgccagcctttgatatcaggatgatactggcctcataaaatgagttagggaggattccctctttttctattgattggaatagtttcagaaggactggtaccagctcctccttgtacctctggtagaatttggctgtgaatccgtctggtcctggacttcttttggttggtaagctattaattattgcctcaatttcagagcctgttattggtctgttcagagattcaacttcttcctggtttagtcttaggagggtgtatgtatcgaggagtttatgcatttcttctagattttctagtttatttgtgtagaggtgtttatagtattctctgatgatagtttgtatttctgtgggattggtggtgatatcccctttatctttcttattgcatctatttgattcttctctgttttcttttttattagtcttgctagcagtctatcaattttgttgatcttttcaaaaaaaaaagctcctggattcattgattttttgaagggttttttttggtctctatttccttcagttctgctctgatcttagttatttcttgccttctgctagcttttgaatgcgtttgctcttgcttctctagttctttcaattgtgatgttagggtgtcagttttagatctttcctgctttctcttgtgagcatttagtgctatgaatttccctctacacactgttttgaatgtgtcccagagattctggtatgttgtgtctttgttctcgttggtttcaaagaacatctttatttctgccttcattttgttacgtacccagtagtcattcaggagcaggttgttgagtttccatgtagttgagcggttttgagtgagtttctta

SEQ ID NO: 98076 - DNA, 36970 bp, Homo sapiens
cttacgatctctccgcagcaaacaaatgtgttctggtgactcacccctcctcaaaatcctttctccttgcacctggcttccatgcagtcaggagtggcaggtggctgaacttcagttaattaggcctaagtaggaagtgccctatgggactcctgggaaattgccttaaagggaaaaggtacatcctttgccatccccatcctccatcagctgccatctggaacttgaacgtgataactggggctccagaagctttttttgttttgttttgagacggagtttcgctcttgttgcccaggctggagtgcaatggcacgatcttgactcacagcaacctccatctcccaggttcaagcgattctcctgcctcagcttcccgagtagttgggattacaggcatgtgcaccacgcctggctacttttgtatttttagtagacatggggtttctccatgttggtcaggctgatctcgaactcctgacctcaggtgatctgcccgcctcggcctcccaaaatgctgggattacaggcgtgagccaccatgcccagcctccacaacctttttttttggagacacggtctcactctgttggccaggctggagtgcagtggcgcaatgcagccttgacctgccaggctcaagcaatcctctcatctcagcctcccaagtagctgggactacaggtactcaccatcgcacccggctgtcttttgtatttttagtagaaatggggtttcaccacgttacccaggctggtctcgaactcctgggctcaagagaatctcccgccttggcctctcaaagtgctgggattacaggcatgagccactgcacctaaccttcttggctttaaataccagtaacaggctgatagctccatatccttatgtctagcaaggcctggcagagttgggtattcaacagtccatccgacattctttctaaacacatgggtatctcacaggctcagattaagccatttccaaattgctggtgctctttccccacaaaggtccccagtcagcctcctctcagtaaatggcagcacctggttgcccaagcaggcatggaggagtctcctttgatgtctcatttccttactttccaaccctccccagcaagtcctggcgttctcccttcagaatccccccttccgaccccatgaaaccgcccttgcccaagccaccatcagttctcccctggctgcctgcgctcctgactccactcggctccacattctccccggagccaccgggacgcaaacctgtgtacatttctagagagcaggttcatgtttgcagggggctgtctttggttgactctggcagattcgccctgacttctagataacgctcctcattcttcagttacttcattagaaaagggctgggaagcccctggcttatcatattatagcctgttgttaggttattgcaaactttttaaatttaatttttacccaaatacttgtagtatttaaaaatcaaatatgccaggcgtggtggcttgcacctgtaatcccagcagtttgggaggctgaggtgggagaattgcttgagcccaggagttggatcccagcgttagcaacatggtgaaaccctgtctctactaaaaatacagaaaaattacccaggtgtggtggcgcacacctgcaatcccagctccttgggaggctgaggcagaattgcttgaacctgggaggcagaggttgcagtgagctgagatcaggccactcactgcactccagcctgggtgaaaagagggagattgtgtaccccccctgccccccacaaaaaatcatgaaattccctatttcacctagccttttttagggaaaacagctaacgtatttcttgtgaactagggagttgaagttgaattaccttcatcttagtttctgctgagaccccccaaggcatattctctgggccgattgccacgtagaggagcaggaccagcagcagcctggactgtgacaccaggtggtcccaagcgagctcacacttctgctgggaatgtggtctataaaggagctggaagttcgaggaagatttttagaggccaccgagaggctatgaatcttatcgtaacccatggaggaaggcggtggggtttctgcttcaccacgactcaacagaagagagtgtgtagaggggagaccccgacagccaggagccaaagatagggccggccagaaggagcgcacccttcaaagtgagggagctaccaacagaagagggcagggggcatgcgtgtcaaagcgcatgaaaatgcaccacggccgaagccagttcacagcagtatcggcgaacgatgaatttctgctccccacctcatgcccctctcagcaacttgggaaagagagctgacagcaccaagtgggcaaataaaataaggccgaggccaaacataagctgctctccccctgcagagagcgaggttccccgcgggcccacagtggaaggggcggcctctctccaaacgcggctggaaggagtagttcctgtgttgggcggggacttcatctgcccagggcagggcttgctctacatctcacctagggacagcgggagaacaagccctagagagtaaatttagacagtgggagaccaaaataaaggtgcttttgattggattgagcttgttcaccatagcagtaggactagtattttgaacatgttctgcaattgtgttatttgccttctcaatacataactgatcagctgaagttcactgacagtggggtatgcttactaatttgatggattcagtgactttgatttctacctgctgtgatgacggaatctgagacctccatttctcattttttctttttctggtaatttggtagagacagatgggaatttggtatggaaaggtggctttcaggattctcaatgaaaaacgtgccaacatgcagtgtctcagagccaaacatacgaaagaggagaaaacctataatcctttgagcatttttaatttttggagaaacagcaataccagctcacagaggaggatcagaattccagggagccgtggccagggctgaggcggaggcatgagtgctgacgggagatggcagctgcggcacctcccgagaagctgccacttccctgaaacgccggccctgctcacggagcccaggtgagagctgtaccttagagggcagaaatcatacttggaggaaatcagaacagggtggcctctggggagtgggctgggccgactgggaagcagcagcagctttcctgaaacggctgtgaggttacacaggggtcacatttgtcactttgaagatctgtgcattttactctatgtaaatcttacccatcctccaaaagcagtaaacaaactagttaatgatacacacttggcagtgcttggggtgggtactgcctgcaatatacttagaaagccataaaaaataagttagatggaagaatggaaagttatgtgatacagaaatatagcaaaatgggtaactgtagaattgagatggaagatatacaattatttcaattctctgtaggtttgaaatttttcataaaaaaatactgggtgtgggcacacctttgctatattggcaaatgtccttctgaaactcagaacccatgcttttccctctaggcctaggacagctgtcagtttctaaccttgacagtatacacgctacttttgagtacagaaacactagggtttttgtatgtggaataccattatttagattcttaaaaatctgaattttggccaagcatggtggctcacgcctgtaatcccagcactttgggaggccaaggcaggcggatcacctgaggccaggagtttgagaccagcctggccaacatggtgaaaccccatctctacaaaaaaatacaaaaactagctcaggcatggtggtgggcgcttatagtcccagctacttgggaggctgacgcaggagaatcacttgaacctgggaggtggcggttgcagtgagccaaaatcgcgccactgcactccagcctgagtgacagagagagactctgtctcaaaaaaaaaacaaaaaacaaaacttaattttaacctctttttcccccgctgtaaaccttctctgtggccatgaatttttacatcttttttgagacaaggtctcactttgtcacccaggctggagtgcagtggtggacgcatagctcgctgcagcatcaacctcaagcaatcctcccacctcagcttccccagcagctgggactacaggtgcgtgccaccacgcccagctaattttcatatttttggtggagacaaggttttgccatgtcgcaacaggctgttcttgaactcctgggctcaagcaatcctgccctgacctcccaaagtgctgggattacaggcaggagccaccgcacccagccagatttttacatcttgagtccaaggaattatgcttgccttgctgcattacaaactcctgatgtacatggtgggctcctgatgtacaaaatcctggtgctcaagggactgggaagtggagcatctttattttcataagaaactttccccaagactttgatggaatgcttttaggatggggaactttaaggcaaacaagaggcagtactagggggactaagggaaggtggaagggacaggccctcagccctattctgaacccttgctttggagccagaacgcctcctccctccagggacagacccccgatcgccgtcctagaaacctgacctctcctcctccgacctccttccccattatccttcttggagaaattcaagcagaaggacggaggagcctcagacttggatcccagcttccgagaacacaagggtgacgctgctggccacaccccacgttcgtctgcagcacggaacttagcagagaatcaccacgtggggtctgcagtcacccactctcagggggcgcttcctaggtccgcagggacaggggaaaccagagtgtttctcagacaaccaacgttacttgaagattcagggaaaactatttgagagggttatttttatattaagataatcacgaatatattatagagtggaaaatgcctattatctttcattaaagtagcttttgaagaaattttgccacgcccttataaactacacccctcaactccaaagagtatgtatttcactcctccgatagcattgaggaagcctcactggaaaatctgggcaattatgattgctagatggaagaactcacagacagtggtgacttctggggcagggaggacaaggacggggatttccaggctcacactacacggtgccgagtctttttcctgtgtaacaggaaacaaaagataaaaagaaaaaccctaataaaattaaatacatgtggtttcagagggaaaaaaacaagagtgtggctggatgaggggtgggtgggagtctgagtgcaggtgaattctgggaagcactcggcgagaggacccctgcgctccaagtctgcggggcagatgtttgcccaggacaggctcacttgggtgaacgggggccctccaggatttctggggcagatagtgtgggaagagcaaggctatttgagtctgagacctgtgtcctggctgtgagggcgtaggtaagccgttctaaacccaagtccccatgtctgaggtggccctaacactctgtctacagatggtaccgtgaggtgagagctactgtatgttacacgccaggtgcattccgggtcctcagtaagtaccactctcttccccagtgcagcatagtagaaaaaatctttcaacactggcagcagtgggaaacagtaaaagaaggactagggccaagaggcccagaaaccagagcaccaattatacaccaagctacactaagtatggccacaggcacaagaagcagcaggcctctcggacaccatgaacatcatctcccaccagggctggaggaggcaaccgggcctccgacgtgtgattacacaggaagagtgaggccttttcaacctagtgtttaaagacacaacagacgggtaagcattttggttatttttagttaaagaaaaacagctttctccaagggcgacaaagtgaactgaaggtcagaaggaagctgggtgcgggcttcmtgcaagctcttgctccaaaacctggaagtgaggagagggcgctccggagctctggggaaggttggtgcacacaggggttccgttggtgggggagaagagccgccagcccacacacggtcactggattggtgtgagtgggttccaagcgactgccatgtgctagtccactgacatgattgacattaacattcttggggggcattaaattaaggaatgacacagggagccaagagagtggcttattcggttggattctgaatcacaatcaggaaatagtctttatctgcaaaagagaaaaatgaaaaaaaatcactaaatgtaaaatgagagaaaaacacacaagaaagcaaataaaccattaaatcactaaccataaaatgaggaaggggagaaagcaacaaaaagcatcaacgttcagcatctccaaatgctgggaaaacggaagataaacctttaagattcctgcaggggctcctgcaagaggggcctccccataccgggcagcgggcactctacagtgtgtcgtctcttctaatcctccccacgacagtggcagcaggtaggcaggattctcacccctgttttccaggtggggggactccagttcaaagagctccaatgaattgcctaaggccatggttgtcaagctagcaggcatcccaaccacctggagggctctacgcccagaaccatcatttagtggggctggggcaaagcccaagagtttgcatttctctaacaagttcccaggtgatgctgatgttgtaggctgtgggaggaccactggcttaaggttacccagctacttagtgtcaaagatggaattccgacatacttcactggacttgggtaatgtcattttcttttttctctctctctttttttcccctccgcgagacagagcaagagctctgtcacccaggctgagtacagtggtgcgatcatgactcgctgcagccttgacctcctgggctcaggtgatcctcccgcctcagcctcccatgtagctgggactacaggcacaccccaccaaacctgggtaaatttttaaaaagttttttgtagaaggtcaggcgtggtggctcacgtagcactttgggaggccaaggtgggcagatcacttgaggtcaggaattcaagaccagcctggccaacatggtgaaaccccatctctactaaaaatacaaaaattagccaggcttggtggcaggtgcctgtaatcccagctacttgggaggctgaggcaggagatctgcctgaacttgggaggcagaagttgcagatcgcctcactgcactccagcctgggtgataaagtgagactccattaagaaaaaaaaaaagttttgtacagatggggtctcactatgttgcccaagctggttgcaaactcctgggctcgagtgatcctcctgtctcagcctcccaaagtgttgggattataggtgtgagcaaccacacccagccagttaatgtcaatttctgtcacaaactcaatttgttggctttccagaaccttctgaataagaaaatttcaaaatgggacaaagcagcctggattccagctccagggatctggccctgtaaggaggaatgtccaccattaaatcacagcaagtccaagtccttggaggtgagcctgagtgcctcccgtttcactgaagaggtaactggagaagtggtattgttgcatttagggcttgatgatttggagtaaaagacgctgatgttaccgattgtgcctatttttatcagtggcttgttaattatttgttttcattagtgatttttatatatgcagatttacccacttaatcaaactgcaaacattgatcaaggcttctttgtgtccaggtctgggccacccacttctcacacggcacctcagtgaatcctcgagtcactctgagaacacggagcctcagagagttaaagggcttgcccaatccagggtaaatccacaggtggagtggggacagggacctgggtttgaccccatactctgaactgccctggtctgctgccccctgctgagcatgagcgaaatggcaggacctcagccaagtcactttgtggctgttcagagccaagcctaaagcttggttcttcccacgaagatgggctgttgcaacagggaagaaacagaaatgaagtgactaacagtttcatggctaaccaatctgcatacataaaaatcactaatgaaaacagaaataattaacaagccactgataaaaataggcacaatcggtaacatcagtgtcttttactccaaatcatcaagccctaaatgcaacaataccacttcaggtgctttgtgagaggtagtgtgtgttgaaggttgtgtaggctgagttagttacctcagctttaatactagtgaagttaataagtgaaaactagaagtctgttttttttgttttgttttttgagactgggtctcgctgttgcccaggctggagtgcagtggcgtgatcatggctcactgcagcctcaactgcccaggctcaagcgatcctcctgcctcagcctcccgagtagctgggaatactggtgccaccatgtccagctaacaaaagtttgtgttaaaatgtcttggccgggcatggtggctcacgcatataatcccagcactttgggaggctgaggtgggagaatcgcttgagcctaggagtttgacaccagcctgggcaacatagtgaaaccctgtctctaccaaaaaaaaaaaaaaaaaaaaaaatgctgggtgtggcgacacatgcctgtggtcccagcagtatactagggaggctgaggctgcagagagccatgatcgcaccactgcactccagcctgggcaacagagctagaccctgtctcaaaaaaaaaaaaaaaaaaaaaaaaagcctgttcacgtgggcggttctgggccagggtggggtgaatgtggcacacatgtggagagccacactgtctggaacacctgctgctgtctgcagcctgggaagcagtacctcagctggatggggtcaggtcaggcaggtgggaaggcatggatctccctcccgggccaggctgctccaggctgcccacgatgtgtagggtgctaactacagtctcaaacgggcacttccagcagcagccaggcctgctctacgcctgtggccacccctgggtcctgtgttctgtagccatcctgaggcaattcagcgccagggcctcctaggctctgcgtggtggctcctgaccacaggagttctggcaccaaaacccaattattttttcttggccacataaaagtgggtatgtcaaagtgtcaaatcactggttttcatcctaaaactatgccccacagacatccctgaccccgtccccactgctgaccccacttctgacccatatcagtggggtgtcagcagtggagggaggtttacagagtcattcatttatttaatcaatggatatttgctagatgcttactatgtgcttacaagcccctgccctcatagaacttactctcaagtggagtagatggccttaaaaatgcaggtaagcatttggtgacgaggaaggacttgagtggcagcagtgaggctgagccaaagaagcatgctctgtaagacaagctcagcgcgccaccgtcctccagcacagcgccgcatgtgtgtgggagagagacagtgtgacttgagagcacgggcgccccctgcagtgctgccaaggtgagggactggccacctcatcctcctccactgacaaggttgtgggatctccaggcctgtgaaccccaaggagaaccccctacttgggagctgcccattctggactcaagcaccaaccacagtcatgggctctgaatgcctgtgggtcttcagggccaaattggagacgctgccgctgccaagttgagacctgaatggccaggagctttcagatgacactgtccttccagaggagacattctcaggagctttatgccaagggacactgtctgtggagaatttgtctgatttggagaccaagtaatttgctcccttcccccataccctgaactcccagtgggccactggggagcacaaggtctgctgtgcacagggtgagcagggggactgttcccggcccaactttttttttttttttttttttgagacagagtctcactctgtttcccaggctggagtgcagtggcgcgatctcagctcactgcaagctccgcctcctgggttcaagtgattctcctgcctcagcgtcccaagtacctgggattacaggtgtgcgccaccatgcccagctaatttttttatttttagtagagacggggtttcaccatgttggtcaggctggtcttgaactcctgaccttgtgatccgcctgccttggcctcccaaagtgctgggattacaggcgtgagccactgcgctccatcccggcccgacttttggggagtgaagctttgtcctctgcagtcacacaacatgacaacctgggaggaactgcagtttaaatctgattccaaggctttttcccccaacccaggtcaacacactcaaccaggcagggtggctcaggacatcagcacagcacagtcccctactcgacactttacagatgtggatttgcaggtgttctgcgacttgcccagggtcatgcttgtgggaagcaaagctgggaaaacagattctgtgcctcctgcagtcttttctccccgatggatcaggcattacacacagaagcgtgattttggaataatagactctggagttattcttatgttcttctctgtgactgaactgctctgtccccacccctctagggagtgtcccagggagcctgtgggctgctgtgactggctctatagttctttcctgcccatccttccaggcctggtgacagaacctatgctggtctgctgcagggagtggctgacctcccatcaaattacctcagaactctgtggccagcctccttgccctctgtgttgccagtccagagcattcagtgtccccagaccccccactgccttcctttatccaggtcctaatcataatcctatcacctcctgccctaaaaacctctgcttgcaagatcaagtccatgcaactgagttaggtgtttgtggccccttctaaactggaccaaagcctcacctcccactcctccccactcacatcctgatgccctagataagcggcactgcagcgggagtgcaccatcacgcgcatacgtgacgcacgcacactcaactatgtggctcagccaagaaaaagcagagtgagaaaaaagtaataatgcaaagacggccctggaggctctgcctgccaccccagtccatgagtgagagcgagggagccgggcaggagatgtggctctgttgctcgctcctgtgctcccatccttgtgggctcctcccagaatgagcatctcctcaccctgagaatgatcctaaggactaaacacaggccttggttgcaccacagagcccccaaatgcaaggcaagcacctcgcgtaaaggaaacaaagcaatctgctcccgtgcggcaggaaaagctggctgtaaggggcctaaagacaggcctggcctttacaagtgggcagagaacatgttttcaaggataaaatgatacagtacttttgctttacattttggagaagaatcactgaatattcttccaaacgtggctttccgcccctccgccttgctcacactgcttcctggtgcccttaagattcagytccagtgtcccctcttctgggaagcttttgcagacagccccagacaggcctggccacaccctcctctatgtcccaaatgcctttgagttttctcctatcaaggaaggggagacacacatgatgctcacgtgtctgtctatctcaggagactggggttaccctctggggccggtccctgggaggatctgctatgggacaccagctggaggctggctaggcagtgaggcaacaacccaattccttcaactcctcgggccctgcttggatcctctggagacaccactgtgccaggactcctgatgagccacagagaatgtgccatgaggtctgttcctacatggggaggtagaagaccccttacctggtgcaaccataatttcatttttcttggagcgaawtcgaaggaaggtgagatcgttctgggggtcgatgtcacgcacggtgctccgtgccttcaggatgaagctrtgcatgaggctggcatactgggtggtggtggggttgtccatggtgctcttgatgggaatgcctgaggggagagcagayggagactgagaggatgtggagccccttctgccgagctcccacccacacccctaattggggagaactggaatagcagttctcagtcaatgccaccatccgcagagggcttgctatgtgacaggcatggtgctgagcacccgaagcatgccagtgccatgccctagaactactctgtgggtggcaacaccatctcattcgcccatgaggcaacaggagctctgagtgatgaggcgacctgtctgtagtcacacagtggggccaggattcacatgcaggcctgctggctcactcctgggttcctttcccagggctgattggttcccagcagtaaaaggagagactagctctgattcatgcagggacacagatttaaaaaactaacaaaatcaggtttttatttttttgtccaaaaaaagagagactctcattcatagtgcttagaattgaaaccaggaagcgcttttacaaatttsttttttttgagacggagtcttgctctgttgcccaggctggagtgcagtggctcactgcaacctctgcctcccgggttcaagtgattctcctgcctcagtttcccaagtatctgggattacaggcgcgtgccacagcacccagctagctaatttttgtatttttagtagagacaaggtttcaccatgtttgccaggctggtcttgaactcctgacctcaggtgatccgcccacctcggcctcccaaagtgctgggattacagacgtgagccatcgcaccctgccttacaaacttcttttatttattttattttattttttgagatggagtcttgctgtgtcgcccaggctggagtgcaatggtgcaacctcggctcattgcaacctccgcctcccaggttcaagtgattctcctgcctcagcctcctgtgtagctggaactacagacgcgcaccaccacacctggctgatttttgtatttttagaagagacggggtttcaccatactggccaggctagtcttgaactcctgacctcatgatccacccgcctcggccttccaaagtgctgggattacaggcgtgagccaccgcgcccggccacaaacttctacacactaaaaagtagaagagaaaaagtcagcttgtgctgggacataaccatcatgatttccacccaagggaggcttgggtagcagctataaacacactgtccacatggccgtgccaagttaaagcatgtttctatgtttgtacaacaggcacagaaacatggaacatgttgaccctttgtaaacagcactgctatctctttcaaagagcccactaggtgagcggtccacagacctccccagcccctactgttggctacttaggggctgggtttgttaccagtataattaactgggcagtgaacatcaccgtataccaagccttttgtttgaggactgtttccttgagatgaaccattaagtggacttattcactggacggtgcctactgtcacagaggtgaggcatgcggctcacactgagccaccgcaggtcatgattgggccagcaggtgcctgtgaattgcctgtgacatatgagcagaagactccatccatgggaccccaagagcccgccagctgacaggcacttgaggaatgtggcacaagtagctcctcacatagaagtggccagctttggggcccaggaccctgctcatcctgcccacagctgctcagtctagggatcggccaaaggcagttatcaggccgactggctgagtggtaaagaaactggctcaatcttgtcatcctagggcaccaggaatgtgagggtgggcagaagaggacatggtggcaaaagaagcaggtgagtcgcagaggctttttgagccaagtcaagtcaggagaacaggttgcagtcatcacttgtctgtaagagacaagatgaccagatcaccagggttgctgctggctcctggatggccacaatgtgcatggcagggccccgcaaagccttgctctacagttgaagcttcctgaggatggcagtaatgaatgcgtccattataatctaaccacgatggggcggcgatggggtaggagccaccacgactctttctgcccaccctcgcattcctgggggcctaagaaaacaagactgggccagtttcttgccacccagcaagtcagtctgatgaatgcctttagtcgtgtcctaggctgggcagctatggaccagattaatagggtcctgggctccaaattgacctaggcttacacccagctctgcccttcacagctatgcagccttgggcaagtgatgaaacctcctgagcttccactgccttatctgttaaataatatctgtgcttcaaagtgctgctgggcgggctgaatactgcttaattcatttaagaatgtttagcaagagtacacttaataaatgttaataaacaccactcacacagtaaatgccatttccattcatctgaagggatgtgactattgcttaaacccgcaagggccttgctaaaacacagcccacccaccgagggccaggaccagagcccaggtagagccctgggttggctgttcttgctacctggccgggaacccgccccttagctcacctttgggccccaatggtaagaggcccacagtcccaagacttggcatggtttgggtgatcagaacccctaaccttctctttttacacaccacgaagccaccttctcacagatccctctgcctggaactttctttccttcccctattcactcatgatttccactttggtccctgaggtctccatcttcgggtgacacttcccatccccactggcaccatcccagcaccacgcagtttttccaggttgacactgcaccattacaaagtgatcattattccatctcccaccacaatgtaagctccccaagggcttgaccaagtctgatttgctcactagtgtccctagagagacagcattaagcttttattgctattggtaagtgagtggtcaaagggtctacttttactagtttggaaagatattggcatgaggagtctgatcacatccatataagcgggagctgtgtaaaacagacaagaaactaaacatctactggctcactccaaaaacaaaagaaaacgtggaagtacagggccaaggaccaaaaccgggaagaaattaaaacaaggacaaaggttaattccagattcactggatgctggagctggaggagacctgagacggcctagttattaggccacctgctccctgcctctgtcttcacaaatgaacactgtgtagcctgcagaagtagctggttatctgggaggcacgatttctaacttggggctctgatctactgggatacacccccaggcccttccaccacacccagtcccttcaagtgataaaaaacatctaaaaaattcaacagatactttaatcaaacaccaactctgggccaacaccatcctaagtactacagacagcagtgaacacaagagaccaatctttgccttcatgggacttacacatttaagccttttattctgcctgtgtgggtagcagcagaggatggcagggggtctggagaagtataaatggaatgaaacttcccttgcgttttcggtaaagctgcttaaactcagacttttattatgaaacaccatttgaatctagccaaggcagagatgtcaaaaggcagtggcagatggctcgaaagtattgggacttgggtatgtcataggttcaggggcaggagcaggagcaaccactctggctgggctggggtgatcagtgagggtgtcctcaagaaagaggcagctgagctgaatgttggggatgggtaggaaaaccctagataagatcataggcatcccaatacaattatcctcaaataatcatctttaatggaagcttccagagggcttaaaggccccatggatcagtgggaagtgtgaccaactcagattctgtgttctgaccacgttcattcacagctgggtgaccttgggcggttccccacacctctctcagctttgggtttctcatctgcaaactgggcaaacccttgcctcgcagggtcactgtgtgagatgtaaacgagacactgatgtgggggccctgagaatgggacgcaagttaaagacacacacacactaactgagacattcataggcatttcatgccaggcacyattctaaaagcttcccctagaggaaggcagaattatgacccacattttacaaatgagaaaacttaacagagaaagtggcttatgcccaaaaccacatagctgataagttaagtagggcccagattcaaagccaggtgggctcattctgcattccacgttctcagctatggtgcaatcagccccatgagtatacaaaaaagcagcactcactagtatccaaaaggtaagcagctagggcttcccagtgaaaaggcttggctttaggggcagttttaaggcaagaatgagggcctctcctttgtgagttcatgtggaagcctgggggtcacagctggggctgttggcccctggggttgtctccttggagtcaaaatgtccagtcccagaagacagtttctctcttagtgacaaaagtctttcaggtcttagagcaagaagtgcccaaaagagattccctggaccatcacaggactcgaggcagttgagggctgaagcggggaaaggagttgcctcaggccacccaactgatcaggggcagccctgagcagggggcctgctcctgtctccacagtgtcccaagggctcccagcctcctgtaaatgaaatgaccacatggtttaatcagaactagacagggctggggagcacgttctgtctagctctgtgcttgccagggctctgctgacttggaaatcaacattttttttttttttttgagaccgagtttcattcttgtcgtccaggctggagtgcagtggtgtgatctcggctcattgcaacctctgcctccttggttcaagcgattctcctgcctcagcctcccgaatagctgggattacaggtgcccgccaccacaccaggctaatttttgtatttttagtagagacaaggtttcaccatgttggccaggctggtctcgaactcctgacctcaggtgatacgcccgcctcggcctcccaaagggctgagattacaggcgtgagccaccacgcctggctggaaatcaacattctatccaaggacacagcacctccactttgttgcccttgatggctttcattctgcttaagtaggaattgctgagaactctgcttctccaaaacaaggcctagactgaagacacacataagaggctctctaagagcactgaacaaattagagcccactgaatacactgggctagagaatttggggggccccgcaaccgggcatggcctgacctcttgggatgtccaagtgtgtctgtaaaggtggccgcaataatgtctaccctacgaggcagccaagaaacacataaacaaaccgtgcctggcagcacaccagacatgtgacagacacaggcactgctgtaccacttccacccacagggctgctggtaaatcctggcctgtgggagcagcccctgggctgggcactgaagggcctacacacttcattgttactttttgtttttttttttttaaagagacaaggtcttgctctgtgctggagtgcaatcaaagctttgagcaagaagccttgaagcaaactgcagtcttgaactcccgggctcaaggaatcctcctgtcttagcatcctgagtagctaagactacaggcgtgtgccaccacacctgcctaatttttcttttttttgtgtggagttcggggtctcactacattgcccaggctggtcttgaaccccttggctcaagcaatcgtcctgccatggcctcccaaagtgctgagaacaggtgtgagcaaccatgcaccacgcccagccattatgacaattattaatctactgattatggcatctaacatgcttgcaaaaatttcaggttttttcctttgggattatttcctctcaacacagtcctcaagaattaccaaatcaaaggggctgatggcaacacccactgtggttggttcatttaacgttcactgacctgactctgcggcctgtggtgaatgacacgggaacagaggtgagtcaggcatggtcctggtcttccttcactggtcacgctgctctatcagcagcagtgtctcagtggactcctctcctcccaagtctcacataaactggtttatgttatttttgtaaactccagtagggtagtttttaaattggccaaacccctttccaaattaaaaccaatgtagaaacatgaactgatggttcttagtgtgtgtgctctgactgaagtggaggacaggaaccccagcctctacctctactcccagggtagcacaggacccctgggtttaaggaccacagccctgaaaacatgatctgaggcagtctctccaagggaaggccttcggaaggagacagaactgctgtgaatcttaggcctgtggctctcactgcagcctcttctgattagaatctatcccctaaagcagaattttctaaacctgtctgatcataagaatctcctggggtgcttcgtaaacacacagattcctcaggtcttgctttggctctaataaattagactttttggtgcagaggcctggaaagctatgtttaacaggacccccgggtgatttcaaagaatgaatacgtgtgggaaacactgtggcctagaggcatgaagcatgtggatgctcccaacccaacaggggaacccaatcaggtaaatcagagtttgtatgaacaaatgcctcacagctcaaaacagatggtgacgatactgtactaaatgctttacgctgttcattcttagttactcttcaacttataaggtagatataagtattatccccatttacaggcttaagcgacttggccaaggtcacaaagctagtcaggagatgaggcagaattcaaactcacaactgctggattccagagtccctgtccttactgctgcctggagcgtgagggtctgggggccattctggttctttacagcctggcgcgggagaaagcacccaagcgcactcagacgggcttggatttaaatctcgactgtgtgatggtaggccgatcaattacatttctagactcagttttctccattgcaaaatgcagacgacagggctgcaccagccagaatcttggcacagagcgggtatgtgataaatgctagctcccttcctgtccagtgcagtctgggaaagttagtatctgtacacttctacctacacagataccactcagaaagggttgttggggtggaggggagctgcaggcacagaggagttaactagagaactatccagccaataaagcagaatcaacacaaatggggatgtaatatccacttaatggatttactaaaaagtagaaacaacaaaattgggctaatgaacattgtcgtggcacttaatttgtttatgtaaaccatgaagcaatattttaaaaagctcaagtgtaaacatatgcccaagggtaacaactatgattatggtcctctggaactgtgcyggacgaggctgagtaagcatggaagactgaagtgtgatctgtcagggtggtgggattgagcggattttccctttgtgaggacactggaggtggctggtctgaatgcagtttacaactaattgctcacaaccagttaccgatttctttgtcccttctccactcccgctgcttcacctgactagccttaatgaaaaaaaaaaaaaaaaaaaaaaaagaacactggaggtgttaaaaattaaaaaggcctaaaattagatcagattcatgaagggcttagtgaacagcaagtgctatgctgtgttayggctgcttctgggcctgcctgggtgcgggtcatggcgggagggagggcgtaccttctgtgttcacgacgatgattccctgcactcccttctggctctgcagtcgcttcagtgtctcctccacctctgcctgccagaaaacaagaccaaggttaggwgaggccgataggcaggattaacttcctcataccccaggcagatgaatcatacgtttgtcttccaacaacaaacaagtaatactcaggcacctggcacaccctcaaagttccccaggctgatctgacgtgctcctccggccaccaccagtgcccagagcatccgctcacacccccacgcaggacagggctgctcctggcgctctgcccaccaggcactattatcccaccctcctcagctgttggggagcagaatataaacaccattcccatgtatatacatgtccatgactcacatatttggcatagctgggggatgggactctgttgatttaagaaaactcagagagtagtatctaacaggaagacaacactttgtcatttgtggcccaaacagcacatgaggatagactcagtgactgcggcaggcatctgagatagtgtgatgcacagcactcagctgtaagaagtgtgccttgggaaggggctcattaatcttgattacccagaaactgctctggtgggctactcttgcatatggcatctgtaagtggaggggcagtcgcagttcgggtcctcattctgccatgccaggcctcctgtcactcctgtcctacccttccctccactctccagctccgtgacacacctccctatctctacatctttttatcccacaaggcctcttctctgctgaaatccaacaaactcctcttgaccatctaagacatcatctcctccgcgaagcctttactgatcccccagttgatggagtctgcctacgtgtgactccccaaatccctgggtgtgcctctctgggacacgcattaggtactatgtccatttcttagagactctaaaaaggtctgtggagtagaagtgtgataaacaccgcttaactgaactagacttaattcttcctgtggatggaaactagccctgaggtatacctgttctcaggcggccccttccagactggtctagaatccagtcagaagcccctcaaaggctgagagttgttagaaacagaggctccattcaccaaaagaaatggggggggggatcctcaacactgggtggagacagcacaatgaattcttgtttttctggaaggcacaaggctgacaatccagtcactgccacccactcccctgtgacagaatactctcgaacactggagggaagggtaaacaagctcctcctataaagtggcaaatggggccggtgcggcggctcatgcctgtaatcccagcactttgggaggccgagatgggcggatcatgaggtcaggagatagaaaccatcctggctaacacggtgaaactccgtctctcctgaaaatacaaaaaaaattagccgggcgtagtggcgggcgcctgtagtcccagctactggggaggctgaggcagaagaatggcgtgaacccgcggggtggagcttgcagtaagccgagatcgcaccactgcactccagcatgggcgactgggactccatttccaaaaaaaaaaaacaaaaaaaaaagtggaaaatggacttatgcctctaagatctggagcctgggtacaatgacagggctctgtggacgtgagagtacaatgcagtgggtcatgcgtgtatgagatcgaatgtcagtcaacacactcactgagctcctactgtatgccaacggctattctgaaagggaggagtggggcacaatagtggtcactgctggacagtactcactggacagtactcattctaccctgctcgccctcctggaaattcatcatggaccaaagtacagtgacatttgcaatascagaatgcagaaagaactaaaaatgcctaacaattagggaaaaggccaagtagattatggaacatccactaataggaatacacatattaaccatggtgattagaccatgttataccatcacaaaaggtgtgtgctataatgttaagtgaaaacagcaaaatgcaaaaataaagtgctttggtgactgcaatcacatgaaaacaaaaggttacaggagattatgaaaaaagagccacattaagggcaaggaattatagaaaggttttattttctttttttcaaaacaccctttttcattctactgtattgtttctatttaaaaacattttaaccccccatctatgcatccaaaagaagtctatgatacaggggccacaaggctctgatacactcaatgttgtcagaataagatgtaagaataacttggatgacaatttaagacagctcaatctgcaatcaacccggaaagaaaggggaaagaaagtgaaaaccgagatgtcagaatctaaatccaaaacagcccccagagattggagaatggggctgaaatgaaaaagatgaaatttcttaagactgctattcatttagtaactacatggcaaccttccatatgccagacattgttctaggcctgtgatgatgcagtgaacaaaatataacaaaaatcccatgtcacgaaactgacatttgtgggaaaggacattaaataagcaaaaagaagtaaaacataaatgtcagctacagcagggaaacgggacctggaatgcaggggtgatgggaatgtgaaatacatcatcagagaaggctcaccaaggcaatagtgagtagacatctgaaggaaatgagggagttagccatgccggtttctggggagtgttccagacagcaccaagagcaagcacaaaagccctggggtgggcaagcatccggtatgttcagggggaaaagcaaaggggccactgtggctgaagggcagggagcaggggagggacagcagctsggatccgggaccagaccacagacggcctggcagatcaagtgttgaccttggttttcactgggcgtgattcatggagccactgtcaagttttgaggtaaagagtgacaagacctgatgcttccaaaggacggctctggctgctgtggggagaagggacagcagggggcgaacacagcctgcggaagcctcctacccctgccctgccaggtgctgctctcggtctgaaggaaacaagcttccctccttcactcactgcttgatgtaactacctcccaaccctttggactcagctccagagcccgcaggaggcttctctgacatcagcccctctactgggcaccgaggcccccagccttcgcagcactgaccacaatgcagtgcaactgtttaggtcacgttcrtctcctcctccagacgcaaggcaccctggaatcaggaaaccasaccagactttatagccccagtacctcgcataggataggctcaataaatactgaaggaacaaataaaaagcatttctgcaactatgtttcacgaaatcaacctttttaagtacaggagggggacatggcctcacagtccacagtgtgaaaaagagctaaggtttaggtgatctgaaactcaacgagaaccagatactaagatctggctgtttaaaagtaaacatgggctgggcacagtggctcatgcctgtaatcccagcactttgggggaccaaagcaggtagactgcttgagcccaggagtttgagaccagcctgggcaacatggtgaagcttcgtctctacaaaagataaaaaaaattaaccatgcgtggtgtcgtgtgcctgcagtcccagctagttgggaggctgaggtgaaaggattgcctgagcccaggaggccgaggctgcagtgagccatgatcgcgccattgcactccagcctggaaaacagagtgtaagactcatcaaaaaaaaaaaaaaaaaaaaaaaagaaaaagaaaaaagaaagaaagaaaaaagaaaagtaaacacacatctcacacatctatcaggaatgggaggacacataggtataatttccctactcagcgcctactatgggtcatatattgctttcagacacatgctctcttctgaaactcccattcatgggttagtatgatctccatgttagtgatggggaaacaggtttggaaaggagaagggttttgcccaagaacacactgcaggtcaacagaagagctgaatatactggtgaccacaactgaggaggtccctgccctcagggagctcacattctggtgaaagagacttaaacaagtgagcaagattcttgcaggatacagggactaggctgtggggcaagggatgctactctggctaatgtggtcaggaacacctgaggagatgtaatcttttttttttttgagatagggtctcactctgtcacccaggcgtgccatggttcgatcatggctcactgcagccttgacctcccaggctcaagtgatcctcccacttcagcctcccgaacacgtgggactactgatgtgtactgccaaacccagctaattttttgtagagatggggtttcgacatgttgcccaggctggtcttgaactcctgggctcaagtgatctactgccttggcctcccaaactgttgggactacaggcgtgagccaccattctcggccataagtatgtcatctttaagccaagaatcaaatgatgagaaagaaatgcactctgggcaatgggatgatggagacaaggttccccaattctctagttcccagatgcacattcctgacacatggaaaaacaagcagcaataaagatccaggaggatccattggctcagcataggagggatgaccactggaagcaaatgactgacaaagaactatgaccaatttgaccactaaacataaaacttctgtataagaataactaatctaacaggatagaaaagtatttgcatcaaatataacagacaaaataaataaaaaaaaaacacaaaatgactaagaacaatagcaagtctctagtaggtagtgcacaaaagaatactagtagaaaatatgcctacgagaaattacaatcacatcaaaccatggtcatcatccctcacaaacaaatgaaaaattcagctgggcgtggtgctcacacctgtaatctcagcactttgggaaactgaggtgggtgaatcacttgaggtcaggagtttgagaccagcctggccaacatggggaaaccctgtctctactaaaaatacaaaaattagccgtcatggtggcatgggcctgtaatcccagctactcaggaggctgaggcaggaaaattgcttgaacctgggaggcagagtttgtagtgagctgagatcgtgccctccagcctgggcaacagagtgagattccatttcaaaaaaaaaagacagaaatgaaaaattatagcaatgctgaggtttatttttaaatgctggcattgttattacaaaactggcaggtgcaagggcaatacaatcttgacaaagctacaggacaatatattgcaagaaccataaaagcactggtccttccacctcagaaattattttcctaagaattttatcctgaggaaataatctaataagtaagttaaaatgaaacaaaacaagatattcacagaagcatcatcacagcactatttctactaattaagaaatggaagcagccaggtatggtggctcatgcctgtaatcctggcactttgggaggctgaggcaggcggatcacctgaggtcaggagtttgagaccagcctggccaacatggcgaaaccctgtttctactaaaaaatacaaaaattagctgggcgtcatgatgcacacctgttaatcccagctactcaggaggctgaggcaggaaaatcacttgaacctgggaggcagaggttgcagtgagctgagattgagccactgaactccagtctgggcaacagagtgagactccatctctaaaacaaacaaaccaaaaagaaatgggagcaacccaaatgtacacaggtaagatatttggccaattatggtacaactatttcaccgagtattatgtagtcactaagtagttaatcacaaagatgatatgacaacaaggttaaatgtttttggatattaaaacaacaaaaaaagaaaaaaatccccccaaaactcagcatgcattatcttggaaaatatgcatatgtgaacaaaagaggaaggagaacatacaaagatgaaaatagttatgtggcacagtgaaactggacgaggagaattatatgtgattattttttaattttatttatttattttgagacagagtcttgctctgttgcccaggctggagtgcactggcctggtctcggatcactgcaacccccgcctcccgggttcaagcgattctagtgcctcagcctcctgagcagctggaattacagatgcacggcttccggctacttttcgtatttttagtagagacagagtttcaccatgttgcccaggctggtctccaactcctgacctcaagtgatctgcccaccttggcctcccaaagtgctgggattatatgcgtcagccattgtgtccggccaattatagatgatttttatatcattattctaaaggtcagtttccacctaaaatgtaaaatatgcaagccaaaagtgccacttgtagaaatctatcctacataaccactagcatgagtgcaaaaaagacaagaacagttactgcagcagtgtctggaataaaaaaactatacaccacctaaatgtacatatgggactaggatacgatacagaccttaaaaagaatgaagtggacctgcatataataacacagaaaaatgtgtgatatttttaagtgaacagaacaagttgcagaataagatatatacatatatatcttaaagtcaacttctgttttctcttatttttttctcacccagggtggagtgcagtggtgcagtcacggctcactgtagccttgacctcctgggctcaggcgatctctccacttcagccttaaagtaaagttaacatatacaaatatatatatattccagtttcatctaataaacagcttatacataaatgtgcttatgcaccaaacacatctggaaggaaacacacccaactgccaacagaagttgccacggggtagtaagatggggaccacataaactttctatattatatcctctggtactgcttcaaattgttaacatacatggtggtttacgcccataatcccagcatttttggaggcggaggtgggcggatcacctgaggtcatgagtttgagaccagcctggtcaacatggtgaaaccctgtctctactaaaaatagaaaaaaaaccctgtctctaccaaaaatagaaaaattagccaggcatggtggcatgctcctgcagtcccagctactccggaggctgaggcaggagaatcactcgaacccgggaggcagaggttgcagtgagctcagatcacaccactgcactccagcctgggcgaaagggcaagactctgtttcaaaagaaaaaaaaaaaaagttaaactaggcatctaaatttgcattgcttttatgagtataaccacggagtagcataatacaggttctagaaagctacagtttaagtaagaaaaaggggggccatataagtgcttgtatagatgcataagaaactaacagctgggtgtggtggctcacgcctgtaatcctaacactttgggaggccaacgtgggtgaatcacttgagcccaggagttcaagaccagcctgggcaacatggcaaaaccccaactctacaaaaaaaaaatacaaaaaaattagcagggtgtggtggcgtgcaccagtagtcccagatacttggggaattaaggcaggaggatcacttgagcccaggagggtcaagtttgcaagaaaaaaaaaaaaagaaactaacaatggttgtttctaaaggaggagagactgagactgggggttaggagagtgggaattttatttttcacttagatccttttacatcatttatttttttactgtgtgcaagtattacctgtaaacaatcctaaaattcgtatggaaccacaaaagactcagaaaagccaaaagaagcctggacgaaaagaacaaagcttgaggtatcacactacctgatttcaaaatataccagaaaggtatagtaaccaaaagagcatggtattggtataaaacacagaccaatggaatagaatagaggacccagaaataaatccacttatttacggccaactgattttcgacaaaggcatcgaaaaaacaaaacaaaacaaaaacaacaacaaaaacgaaaaaaaaaacctaccatamatcagcaataccactactgggtatttattcaaaggaacggaaattagtacatcaaaggcatccctacatcctcatgttcatattgcagcactattcataatagctaaattatggaattagcgtccatcaayaggtaaatggataaagaaaatgtgggccaggcgtggtggctcacgcctgtaatcccagcactttgggaggctgaggcgagcagatcacgaggtcaggagatcgagaccaccgtgttgaggcggactaacacggtgaaaccccgtctctactaaaaatacaaaaaattagctgggcgtggtggtgggcgcctgtagtcccagctactcgggaggctgaggcgggagaatcacttgaacctgggaggcggaggtggcagtgaactaagatggtgccactgcactccagcctgagcgacagagacacactccatctcaaaaaaaaaaaaaaaaaaagaaataatgaatgtttaaggtgatggatattctataataaatatagcctgatttgatcattacacatcatatgcatgtatcaaaatattacatgtatatctacaacataaatgtgtacaactattatatatcaattttttttacagcttaagaagtgatgtgaaaaatgaagttatacatatttgaagcattattacatgtttgtaatgatgtggagatattgtggtgtaataatgaaaaacacagaacccacaattgcacattcaataggggctaaactgtataaaccaaaaacaagcaaaaaagactagaagtcatatgactactgtaagtggttgcctctaggtgatgacacggtttcttttttcaatttttttattacaagctctagatttctaaataagrtttttgaaaaagtaatatattcacatggcttaaaatttgaaactttttcaaattttgcccaagctgtgaggattacaaacacaaaacctgtaacggcgttgagaacccacagctgcagcaagcaaggtagaaagcaagctttgggatccccaagagcagaccccgcccgttcctgactctggcacccagtcccagcggctagaaagaaccacgccgacagagtggcggccgtcaagcttctagggttcaaatccatctccactatttcctggggcaaagcacttggcttctcggggcgctgaataacagatatgtataacaaaatgggactaaagattgtatctacctcacagagctgggaggaggcggaggaaatacaagatacataaagtgcttggcagagcctgccacaaactgagctcccgggaaacgttgscagggttgccatcgcgcaccaaggccccaaaactctaggctgcagggccgccgcccacccctcgcccatcatctcttcctggccgaggctgggctcccgcttccggtcaaggggcagcgggatccggcggccccgcctcggtcaggctttagaggcctccgccgccgggttccaccctcaagtcggctggggcccgggcccggccacgcccagccaccaccgattccctgtccggagctctgagatcccctcatcctcggaagactgaaggcctggcgtggggtggtgggcggccgccagccacaagaccccggcgcacgctcaccatttccgwccgatccggtagccccgcgtagcgaacacttagcgagtcctgtgcctttctgcgcctgcgcaaaggtttctgtcaaaacggacagctctagctgcctatcaggagccagcgtgaggcgggggcgggcgagccgatmttggctccgccaggattcttggaaaatctgctttccactgtggcaaagcgaaaagctaaggagcagtgcgctaagctgtggaaaattcccaactccagccgtgcagaaaagatgctggttctggctggacgcggtggcttacgcctgtaattccagcactttgggaggccgagtcggaaggattgcttgagcccaagagttcgagaccagcctgggcaacatggagagaccccttctctactaaaaaataaacaaaattagccgggcgtggtggcgcgctcgtgtagttccagttactccagaggctgaggtaggaggatcgcctgaccaggagttcgaggctgcagtgagccgagattgcgccactgcaccccagcctgggcgacagagcaagagaccctgactaaaacaaaacaaaacaaaaaccatgctggttctcggtatcggaagaggctttcagtgctggttctcggtatcggaagaggctttcagctctcaatggaggtctaagctggttctggagtccctgagtggagcgtggtgggagggtatgaaggcaagtgggacggttgctgagacccgctttgcgcccagactgaggcagagagaggcccagggccaaaatgcgcttcgggatcgggcaggcctggggtggggctggagtcaggtacctctggagtctccgggtaagatgccgtgcaagctcggagatgaattggttagggctggcctgggagtctttagaatccgagctcagccccgcctcgcgttacctagcagaaggcacttcacatctgtgtgttctgtcttgttctcacctctgaaagggggactcttcccagagccctatgttgtcctgttccggcaggccgcaaacgtttctgggtcctctaggagtaaataacttctgttaaaacatgctgccgtttagtgaaccctgtgccacattactgtgctgaacacgcacataacgttatctccggtagcttcagggaagtatcggtaacctcgatactttataaatgctgtttctcccaggcactgtagcttgctggattcaacgatgatctaactccaaagtttcattccacagtagctgctcttcagtgaggaaggatttggttctccttccaggagtgtctgcatgttaagaggattgactttactgcgaagaaacctagcagacaccaccgtaaccagatcaaagttagtattactggcaaggggagatattgatgccgtgtgccccgataaaaatgcgttaagggcacatcacctccgagtcattttccacaaaaactcccagccttaaaccatgagaaaatttcactaaatccagtgtgagggatgttctacaagatacctgtaccccgcccccgccccccaaaatctcaaagtcatgaaagcaaggaatgaatgcggaactgtcacagattagaggagtaaggagaaagaaaaataacatgggtgggaaaattggtgaaatctgagtaagggctgtagtttagtgttatttttaccagtgttaatttattagttttggtaattctagcatggttatatgggatcataacattggagaaagctgggtgaagactgtgcaggaactcttaaccatttttgcaacagctctgtaaatgtaaaattatttcaaaataaatttttaaaaggactggatccaaaggaatttctattgaatgctggaaacattaggaaagcatttagcaaggggaagaagtgctgcagagactggaccctaaaacatcctggaagataagcactggaagaatcaccactgtcttgcccatggagaaccagactgagaggagtgaaaggattttaacagattacaatcccagaagcaaaaaagagaatggccaatagttcatgtgacaggagccaaaatgagaatgaaggaggagctggaataggaccaagaatgtcccggagtggcaggcttagagttttggcccggcgcagtggctcacacctgtaatctcagcactttgggaggccaaggtgggcggatcacgaggtcaggagttcgagaccagtctggccaacatagtgaaagcccctctactaaaaatacacaaaaaattagccgggggtggtggtgtgcgcctgtaaccccagctattcgggaggctgaggcaggagaatcgcgtgaacccaggaggcggcggttgcagtgagccaagatcgccccactgcactccagcctgggcgacagaacaagactccgtctcaaaaaaaagaaaaaaaagttttattctgcggtaatggagaaaccactgtaaaattttaggtagaggaggcatgagacaggtcttccacagataatcctgaggtagtacagaagatatactggagcgaggaggatggaaaaatgaagacaggatgctgttatggtcagccagattagggaggaagcacgtgggctgtggcaatgttgtcagctctgagagaacggatttttaaaagttttggggccaggcgcggtggctcatgcctgtaatccaaacacttgggaggccaaggcgggcggatcacctgaggtcaggagttcgagaccagcctggccaacgtggggaaaccccgtctctactaaaaatacaaaaattagccgtgcattggtgatgggcacctgtaatcccagctactagggaggctgaggcagaattacttgaacccgggaggtggaggttgcagcgagccgagattgcgccactgcactccagcctgggcgacagagcgtgactccatctcaaaaaaaaaaagttttggggatagataggatttggagactaattaaatggaatggcaaaattggtcacattcgactcccagtgttgtggtaagtagcagtacaacaaaaatggtaaagtatgcatgctttagagtcaaaccatcctggattccagcctgtattctttctacttaatagttgtggacatgattcaatcattttgagcctctattttcttgtaaaacagagataatcattaccaataacaggaacactaagtgacactgcacatagcatatctaccagtgtcctgcacatagtgataaatgttgacagttgttttggtattaaatgaatatgggtgtggtactggttgctatgatatggaagacaaatagaacaacaggtctgaattagaagaaaaataacaggagggctgtttttagtgatctttcaagtatgactacaaattgtcaaggtccttccctgtggggtgctttgaggaaatcctcttgtccatagccactctttgcttattaacagacccctgtgcataagtgatcaacagtgtccttctgggatttatgtttaaggccctcttttccttgccaaccaggaatattcccctggctcctcactccagatatcctgatcacaaaggagtcctatgaacatggaagaattgacaactgaaatgggctgggagagagagcagctcctgtactggagttacataatgtgagacagacacttaaaaagtccagagaacagccagtcagtcacagctgagtcccagtttgatgatttgtagggtttgggatgagagccaatggccagtaagaacaattacttactgaccattgaccctcacttagcggggcatatttttccccttattctaagccacaatgaaactagagcattctagcagcttccattggacagaataaacaggatagggtctactaactactcaggacctgggaggggcctgcagtttttgtcctctagtccatgttagatcagccgtattaaaaaattcctcttcccttagtctctctccactggttctgttttaaatgagagcataatcacctgagcttcctaataagacaaagttctactgacgctggtaaccaggtcagcttgttgagaacagtcttggtaacagtcttgacagctagctagttggtggttctctactcagcactcatgcctgtggtcccggtcttttagttgtctcagaaaagcaattcatatggaggcctttatgttggttgatggcccctgcagatatcttcatcttcaacatgggcaccaaatccagtctcatctgcaacagctctttctagtttttttctacccgtaccgtggcaggccagatctcaataacgcaggcctccataacaactgtttcagcactgagtggttaagttaaatattaaaagctgaaagagtgagggcccttatgcaaaggctagaatgtaacaaaaggccaccaagggttttgcccaggccttttctgggccttgaagcatgacaagataacaaaggaacccatttaggattaaacaagttttattgggggtctgaaggaacttattgagggggtctgaaggcctccacaaacaagtttactgggggtctgaaggaagtccccaaacctccatgatttagcaggaaacaagataagggtaatcaccccagcacctggacccatttagattaagtaaatttactgaggctccagaggaaggtcttcagggctcagatcttatttatagatttaaaaaagtgaatcacttatgtctttagatgaatgtacactcacatgtagacatatagcttataatgtaaataagctctggaaaactttgtagttttgagttggtcttgggatcatttccaggctttctccccatacctggttacagaaataaactccctcctttctcagttcatctgcacctcattattgggctgcgagaataagcagtccaacccttgatttggtctgggaacaataccacaatccagatgggctgtaacttgccacttaaaaaagcagagaggcagaaatctatgtgacctggtcacatataagtctcagaaggtggggccggggagagaggaaagagacccctccttacccaagactgatagaaaagcatgcaaatgaaggaccaaaaaagtttaattataaacagtcttacatcttgtaggaaaacgcaagtgaggcaaccactgaaggaactttataaaagcatttgactccctgtaatatttgtagcattacctgagtattaaaagtaacagatcaagaaaacaaaggtactcttaatacagtaatatacaatccagtgctgccaattccatttttagttaatgaaagcaaattatacaaacaaagtaaataactaaaagaaaaacaaaaaaaggaggggggctggagataccaacaatactaaatagaagtcgttaactctaaaggagtttagaaaggtaagttacatccacaacaggaaaggatataaaaatagaggaaaaatttaattccgtgagtcaaccccggtaacatttcggattattaaccagataagtaaaaagtggtagagtgggcttgactgaaatagttcatttaggatgagaactttgtgtatagttgagtcaagtttcactaaaatttctgatcattggtatgtcaatctcttgatgaaaaatcagtacctgaatatgtctttttgtttttttaagagacagggtcttgctatgttgcccaggcaggatttgaactcctgggatcctcccacctcagcctcccgagtacaatacctgaattttaaatagagttattgtaagtcttatgaaatgagattttgctgcactctgacataagataataaaagacagagcaggaattcattattatgagctgcttgatcagttttaaaccactccatttgatgaaacaagtgaggtccttccctcctgaccaggctgtggaatgctgtcttccccaacccccaccccctgcaaaagagcagaacaataaggcaattgctcattttactttgtttttatttcaatgtaacatgcagtaaaaaaaaaaaaaaaaaaaaaaaaaaattaacaggatttattagcatttacaatgcttacaaagaaaaagacttctaaaagcaagttagttcagatttaagaaaaagctctaagtaaatacttacaataaatctatttccatatgttcagtttggaccaaaatttaagatagcatttggtagatatttatgtctgcggtctatttgcagtatttttatataacctctgattcttgggatatccagcccccattttcctaacacagcagggaagacatatacatgtggccacttaaattaaaggaaaaaatggagtagggagatcccaggctgcaaaaatatatacaagcatttaccttttccagaactaaacacttcttccataaaaatattaaatagccaagccctatagaactagggccagggctacttcaaatataactattctgtattttaaaaatatagggcagaaagccttttgggtgatatttatatattttcacacaatatttctaggtccctaaatgaatcatgaagcattatatagaaccaaaaaaaatgtattttcttacattatctcttaatttaatttcataaatctctagtaaatattgtaggtaactacatttcagtatgagaattcacctcaacaggaagtctttatagagggcttaatcttcattagccatatattaccaagttcagacttatataatgaacgggtagttggcagacattcgctctgtaagacaaagcaatagcgttttttctccctaccaacaaaaaggcagagtccctacttt

SEQ ID NO: 98077 - DNA, 71367 bp, Homo sapiens
  misc_feature (1)...(71367): n = A,T,C or G
tccctttaagtgataacctctgacaaaaaaactagagctgaacacctaataaaaaagaaaaataggtaaatcatttggatctcatactctagtctttttaaaaacgccggaggactgcttatgcccaggaggttgtggctgcagtgagctttgattacaccatcacactccagcctgggcgacagtgcaagactctgtctcggaaaaaaaagtttctagttaaatattctaaaataagataaacattatctcattagaaaataaaaacaaacaaaaactaaaaaatctatctcattagcaggagatgtttcaccttaacagaaatcataagagttaaaagcctactttgtcttaagaccacatctattaaaaatagaacattcttaagctattatgtaaaaaccagtatgaatccacgggtgttccacatttcaaacttacatattctattatgaataaatgaaaatacactgaacatactttctgcttttcaggaacatcctcaagtgctatttttctcttattttgagtgccatctccagtagaagatttatcttttggaacatcctcagtttctctttttcttttctttgaattgccttcagcatcaccacaatctttttcctctgggacaatttcaggatcaagttttctcttcttggatggagtgtctttcccacaactagaactttcctttacaagatcatcttcaaactcttttctctttcttgctatgtctacttgcctacagacagaagtcttttcagaaagcccagtcccagaagctgttgtgttttcattaatattgaatgaagactctgtttcagaattcactgacgcttttgcctgttcaagagacatcttttcatattcttctgcttttgcagaatttgccatttatgattacttgaattgatggtaaaacttcatgaaccaacactagaataggaaaaaaattggtattacttgtaaacactaagactttaaaacaatttttttttttttttgagacggagtttcactcttgtcgcccaggctggagtgcaatggcatgatctcggctcactgcaagctccgcctctggggttcaagtgattctcctgcctcagcctccccagtagctgggattacaggcacctgccaccacgcctggctaattttttgtatgtttagctgagacgcgatttccccacgttgggcaggctggtctctaactcctgaccccaggtgatccgcctgcctcggcctcccaaagtgctgggattacaggcgtaagccactgcgcctggcctaaaataattttaactagaatttgatcaactaggagtttaaaaaaatctcattgtagagagcatattaaaaaatgttaactgatactatgtatgaatttctgaatatggcagtactaattataatccccccaaaattctataatcttattcataaaagtcactgttggcattaaagctgacaaatgaagtggcgatacacatgcactagttccattttggttctgatccttactctataaccctggttcccaaactgcatggttggcaccataacaaacaggcaccacagaacctaatgtggaagatatcacagaaactaccagctttaagtacagcacagttccagctgaatagattacactacatacctttcaatgactttgtgaagctgagattttggtatcacagaaaatcaaggtgaaacaggaaatgaggttggtggtgcctatctgatttcgaggcttgaagttgtacagtacccaataggttcacacatcctgttagtaagggattgtgattaatcaagaataaaacagaaacattacctttccccccaatttatgtgtgttaattttttaaacagacataaagttgttagaccataaatacttttaaattctttggggtaaactacttaataaatggaactgttatatttcttttggcctatggacactaagggcatcaagaacagaaaaagtttgggattctacagcaagaattctgaaatcgtatttcataatgggtgttccaattaggtagaaagtgaagagagtagaaatggctttagacaagtttcaggactcagcctgcagtttgatgaccattaagtctctttcaaatatgtttttagacctacattaagatgggaaagcgagagaaataactgaactatctattgggcaagaattatggtggttcatttattaagccattcaacaaatttagtgacctcctactatggagaagctcaatgtaaatcatgttttcaagatgtttatagcttatataccactattaaaatgttaagctttcgctgggcacagtggctcacacctgtaatcccaccactttgggggaacgaggtgggcagactgcttgagctctggagttcgagaccaggttgggcaacatggcaaaatcccgtctctacaaaaaatagctgggcatggtggcacatgccttagtcccagttactcagcaggctgaagtaggaggatcacctgagcccaggaggtccaggctgcagtgagccatgattgtgccactgtactccagcctagacaacaaagtgagaccccacttaaaaaaaaaaagctttttcatgaaggaagtgtttgtgcttaaaaaaaaaagtaaataaataaaaagccttttggataatgaaaaagaataagaaatcaagttgcttaaaggaatgggtaacaagtcactcactatgaatgggtaagggtttcaatggttattagttttcatgacccaccatttgaggtaacaaaataccaagaagtaccaaatagaactgaatcagggaacaacaacaacaaatcagaaaagtgattttcagaacaaatacttaaaatgattatctagaaaaactggataccaacttatcaaattcctatttctcctcctctgccattgatttcctaatggaaattggctttaaattcaaataaagaaatgtgacttatctttagctatatttattacctaaaattaatattgagatttaagcatgaattttacttatgtcactttcatgatatcacagatgtgacataataaaaacataattaggtcagaagaaatgacacagcattccagatgaccacaaaaataagtaagaacgtttaaaaccaagcatcatgtttacagccaacttgttctcaacaaaggtgccaagaacgtacatagtgaaaagacagtctcttcaaaaaacggtgctgggaaatctagaccactctctctcaccatatgcaaaaatcaaatcaaaatggactgaaaaatttaatacccaaaagtatgaaactacttgaagaaaacattgtggaaatgcttcaagacactggtctgggcaaagatttttgtggtaagacctcaaaagcacaggcaacaaaagcaaaaacagacaaatgggattacatcaagctaaaaaacttctgcacagcaaaggaaacaagagtgaagagataacctagagaatgggagaaaatatctgcaaaaccattcatctgacgggattcacaaccggaatacagaagaaactcaactcaatagcaaaaaaaaagaagcaatcctactacaaatgggcaaaagatctgaatagacatttcttaaaagacacacaaatggccaacaggtatatacgtaaaaaatgctcaatatcagtaatatcagggaaatgcaagtcaaaaccacaatgagataccatctcatctcggttaaaacggcttttatcaaaaagatttttaaaaaatggatgctgaggccgtcacggtggctcacacctgtaatcccagcactttgggaggtggaggtgggcagatcacttgaggtcaggagttctagaccagcctggccaacatagtgaaaccccgtctctaccaaaaacacaaaaatcagccgggcatggtgatgtgcgcctgtaataccagctactcgggaggctgaggcatgagaatcgcttgaacccgggaggtggaggttgcagtgagctgagatcaagccactgcactccggcctgggcgacagagcaaggctccgtcacacacacaaaaaaaaaaaaaaaaaaaaaaaannnnnnnnnnnnnnnnnnnnaaaaagatgctgatgaggatgcaggatgcagaaaagggggaacacttgtacactgttagggagaacgtaaattagcacagccactaatttacatactgggaaaagtatgatggaggttcttcaaaaaacaaaaaatagaactagtgctattgagatgagtttcttctatattctggttgttaatcccctgtccgatgaacagttttgcaaatctgggtacagatccaaaagaagggaaatcagtatatctaagaaatatctgcagtctcaagtttattcacaatagtcaagatatggaatcaacctaagcgttcatcaacagatgaataaagataatgtagcatatatacacaatggaatattagtcattaaaaagaatgaaatcctgtcatttgcaacaacatggatgaaaccggatgtcattatgttaactgaaataagccaggcacatgaagacaatatcatgttgttactcatgtgggagctaaaaatgtggacctgatggaggtaaagagtggattggtggttaccacagactgggaagggtagcaggaagaggagcgggatgaagaagagaaattggttaatgggtacaaaaaaccccagaagaaataaaatctagtgcctgatagtacagtggggtggacacagttaacaataacttattgtgtagttcaaaatagctaaaagaaaaattggaatgttcccaacataaagataaatgtttgagatgacaaatatcccaattgccctgatttagtcgttacacattgtatgcatgtatcaaagtatcacctgcacctgcaaatatgtgcaacttctatgtatcaatttaacaaattgggggaaaaaaaacccaaaccaaactcaaagtggaataatgaaaacactccatagggaagagagctgtccctcagaatcttcaagaaaccttcgaaaggtggtcgactgacatggagatggacacgcgataaataaccacacgaacatttcgacccggctttccagtcacacctccgaagcaagctatgtctctgcgtcatttcagctcctcagggtacgagcgagcaggccgccagggccgccgggataaagcccaagcgggataagctctaagtcccgacccgcccgcttgaccctctaccacggggcccgagaggacgcacagaggcgagaagggacttctccagccaagttcaccccctccgtcattagcgcggcctgttactcaacctctggttcaggtttccgaagcgccgctgaagacaaacctgcggaccccacgcccctccccagcacggccctggggcgcgagctggagcagctcttcgagctgcttctcccacccgggctcgcccagtctggaggaggaacagcgcccgcccaccccaaggagttcccattttccttgggactgaggacacaaggcaatagacccacgcgttgggtagtgaagcacagggctaatgcgaagtgagcccatgtcaggggtgggagtgccagttccacccctccacggcggccgagggacaaacacaaagaaaggaagggccggagttccagccgtcacactcaccagcacagccaaacgcgattctgtttgcggaaacggcggcccgcgccacgcgtgtctgcttacgtcacttccggaggtgcgagagtcacgtggagacggtcaggcgagagtgccgcgacgcacgtcctccgcgccggaactacgagtcccgacgtgccgcgcgcggcatgcagaagcttcactgagcgggcactggaggtcgcgagcacgttgctagtgggcgcggctggcggggccgggggcggcagggggctagcgtccggctgagcccggcgggttcctgcacgcggacccacgctttgtcgggctgctctgctgagtgacaccgccgtggcatccgaggagctgtggtccagcctgcgcggcgggaagcggcggcggcggctccagcgtcctaagaggtagcatgggcccaggcctctgtggggcagcgggaggggtctagagggcaccttcaaccctgggcgtgtgtccgggagctgactcgcggcgcgaacccggcaactgctccgcgtgcgccgctcttcgggctgtggcagtgtacgactgccagacgggtcgtccacactcgccgaccccacagaccccggcggccgagagaggtccccccgcccttccgggtcgagccagtgtcctggcaaatcttgytttgggactgtttttcagcctcctttgctgtaacccttcaccgtgttctccccccttcttccgaagccagttgaagaggggcccggaagcgcccgcgttcggaatggtttttaaaattagyaatttcttattagggactggcagactggtccttaccgccgtgtttgggaagccacaagaggccattcttacctgttagattctgagaaaagggaccgcctatacctcttcttgacaaatacctaaggatgcattrgtctgcgttggctgaacttggcatggtgtggtttgggggagacaacacactttttttggccatcaccccagatttctactggggagtgaaagcgcctactgtactgaaactcgaaagctccatagttgaggactttcaacctgagatcagkgtcaaaactacctgtggatagattattgaagcgtgtgcatattaacgtcgtgcgtcaagtccccaccttccaaggttgtaaaactgatcagatttacaatccgtcttgaattactctttaccaaaattgatccatttaaaacagctttgaaaatgtgctttaccagccttccttcttgtcagtaggcacaggtatattaatgaatagacctggctttggggaaggcagcatttgcagcgtygtgctttccaatctaatcacttctaaattgtgggcattagcccatttgaggttacaaactttgaaccaagaatgaggcctatttttcacaaataaggatgacccatcaatttctgatgactgcttgtatttgttattatatgaaatgaggtaagttgagaattaatctcattacatgaatattgacaactgcaaaagtgtaggtcttacagatcgaatgcattataggcatatacaagcattagaaccaggcaattacattccctgttcctgatgcttaagtttcttgagataattgctgttgtaattttacagaaaatgagtgtaattttgacttttaaaaacatgttttaatgtttttaaacaccgggtgcagtggctcacttctgtaatcccagccgttgggaggccgaggcggttggatcacgaggtcaggagtttgagaccagcctggccaacatggtgaaaccccgtctctactaaaaatacaaaaattagccaggcgtggtggcgcgtgcctgtaatcccagctactcaggaggctgaggcaggagaatcgcttaaacccggaaggcggaggttgcagtgagccgagattgcgccgttgcactctagcctgggcgacagagcgagactgtctcaaaaaaaactaaacaaaacaaaaaaagttattagattaaaagcctcttaactatgtgtttatgaaaactccacgatgatgggatatatagagattacatttttcagtttttataaaacttaactagaagttgtgtaaattcatttgagaatagaggggaaggattcttgaaagcagttaatgtaagtaaatgagccagataaaaatgattttaaagttaccattggtgttatttttccctcattattgcctgagtaatctctggttttctggacattaaaataataatagctaatactcgagtaccttttaggtgccaaggttagtgctttattcatttgcactcgtttaattctaaccgaacccagtggtatagttatgagtgtttgttttacagatgagggttaagtaacttggccaagatcatgcagcttgttaagtagtgggatcaagatttggacccaggcagtctggctgattgaccagactctgctaataatgaaacagtgctggctagaagatcatactcagaactggacgttgcctagcaaatagtagatttttcagaaagtgttttgatacttcttaatgcctgggttatgatgtcccgagagaaaatagttagataaggatgttatcttgctggaatgtgagctccaccaagacaaggaaaggacctgcaggatttatttcaacccatttgtaagaaagtgagagtacttctctcagaggtataattttaaagtgtgatttctgttgtagagttgaagatcatatttttgaaacatagagattgttttaaaaatgtagaaacaatgttatagtttcctaagatagtgttctgtgaagagaggtggttcatggaagctttgttcctccaaatagttttggatgaaggacttttcctctgttccactcaggaaagtgttcctactgaaatttcattgtctttctggaacaaataaaatattattgtttaaaaggtttttccttcagttgaaaataagattttgttgagtaatactgtgtgtgatgattagttttattatgtcagcttagctaggctataatacctagttatttaatcagatactagtttggttgatgctatgatggtattctgaagacgtggttaacatctataatcagttgacctaaactaaaggatattaccctaaataatgtgggtggacctcattcaatcaattgaaggctaaaaaagccaaaactgaagtgtcctgaagaagacagtattttcctcaagactgcagcatcaattcctgcctaagtttcctgtctgtagatctaccctacacattttgaagttgctatcccctacagttgtgtgagccagttccttaaaataccaatatctctgtatctgtctatatgtagatgaagatatttatgtttttatctacatctatatattttttcctatcagttctgtatctctgtagagccctgactgattcaaatttgggtgctgagagtgcttctagtgagcagaatcttaaggatgagttttctgaattgattatagtgtttctggaattggttttccaaactgatcagattcaaaggcagtaatgagtattccctgtagaaaagagggcactgatagtccctggtgtgatatggcaacaaagatatgcaaaagatcactattagatactcccactcatgcttatagacaagattcagaatgatcaggtatttgataccttagaacattttaatcgaattaatgagtacaataagataggctggttgcttttaactgtactgggtaaagtgagaaaagaaaaggatgatcccagctactcaggaggctgaggcaggagaatcgcttgaacccaggaggcggaggttgcagtgagccgagattgcaccactgcactccaacctgagtgacagagtgagactgtctcaaaaaaaaaaaaaagaagaggaaagaaaaggggagcttaaggcttcaaattcccgattgaagctccacatargtgacctgaaaagtttctgtgtctgccctaaagaaacccgtatctcttgtagctacagagctgaggttggtgaaaaccaaatccagagtcttatcctgtaggtggctgaattacagtgctaactgaattcccttctcaccttggtctgctattaaaatgagggcattgattgggaaggaatgggatctgcacatttggaatagggccatatgggaacatcctgatgaagctggggatgttaaactcctaaatttgactcactcttttttgccagtagaagcagttcttccacctctgaggaggttaactctgctttgcctgaagaayctgtaatgacctcccttgaggtagttaccttgcaagacattgccggttttcctcaggaatccgtgaagagctctggggttgcttttctcttcaggtcagagattgcagtgggagctgttgccactgactgggggtccttagctgcagcagggatggytggatctaggatggcaggggctatgtgatcaccaaagagtaagtaggtgtgttgccatcatgggggacagcggagtcaaagcaacaatctgaacagcctgacttgggggtcctaattgggtaggtggtcatggtgtccctagaagagaactcgttgggcagtctactgaattctgacttgatctctataagcagaagagttctaggtcaagtgaatggaagctttactttaattaccaaagaaagagtcatggtccctcaatcagttcccagatttgagtcattttacagactcagaaccccctgactgaggggaggctggatccttttgaggaaggaccccattgcgctgctaagaatttataccgttaatttttttctcaggtttcccaaagggacctrtggcttatcagggtaagtgtgcactggagaagaggaaataattagacttctcacagattactgaactcttaagtctgaactgacactaattccaggacactcaaagtgtcattttggcccgccattcagagtagggacttgttgaggttaggtggtcaatggaagtttaacccaggttctcctcacagtgggtccccatattcatcctatggttactttgccagttccaggatgcataactggtatagacatactcagcaactggcagaatccccacactggttccccgacttgtggagtgagggcgatcgtggtaggaaaggccaagtagaagccactagagctgcctcttcctggaataatagtaagccaaaagcaataccgcattccaggaggaattgcagagatgagtgcacttaaggatgcaggggtgatgattcctgacatattcgcattcaaccctcctgtttggcctgtgcagaaaacagattgatcttggaaaatgacagtggattatcataaacttaactgagtagtgactaattgcagctgctgttccagatgtcatttcattacttgagaacctatcccctagtaactggcatgcagttattgatctgctgagtgctttgtcttagtrtctgttagtaaagatcaccaaaagcagttttctttcaactaacaaagccaaaaatacaccttcactgtcctacctcgggaatgtcaactttccaacactatgtcataacaagatctctgtgatcttgttatgagttgaattgtgtcttctaaaaatttatgtattggattcctagcccttagtacctcagggtatgaccttatttgggaatagggtagttaaaaatgtaattagataagatgaggtcatactggagtaggctgggcccctaatccaacacaactggtgtccttataaacaggaggaatttgaacacagacattcacacagggagaatgccatatgaaactgaagtagaggaacaccaagaaatgtcacacatttccagcaaaccatcaggagcaagggggtaggcatgaaacagattcttcttcaccccctttgaaggaacaaaccctactgacaccttgatcttggacttctaaccccagagctggagacagtacatttctgttttgtaagctcctcagtttgtggttctctattacagcagctgtagcaaacaaatagagaccctgattgtgcttcccttccacaaaacatcatactggcccatcacattgatgacattatgctgattggacctggtgggcaagaagaaacaactactctagacttactggtatgacatttgcatgtcagagggtgggaaatccaacaaatattcaggggccttccacctgtgaaatttctaggggtccactggagtagtgtagggcatgttcccacctataacaaaaagagaagcaaggtttagtgggcctctttggattttggagatgacaaattcctcatttgggtgtgctacttcaggttgtttactgagtgacctaaaatactgctagttttgagtggatcccagaacaaaaggcgcctctacaacaggtacaggctgctgtgcaaactgctctgcyactcaggccatatgacccagcagatcttctggtgcttgaaatgtcagtggcagattgaaatgctgttaggaaccttttgcaggccctataggagatacagtgtagaaccttaggattttggagcaaagcctttccatcctttgcaggtaactgctcttttaagaaacagcttttgggcttgctactgggcttaatagaaactctacgcttaaccgtgggccaccaagttatgcaacctgactagaaaaatgactagaatatttcagcagttaagagcacaagcagatggcatgtgttcaaatcctggttatgttatatttactaagcatgtcatccttgagtaagtggccaaactttgtgttttgatttcctcatggagcgattttatagaataaatgagatgatacagtgcttagcacagaacctgctaatttttagcttctcttaacacaactgaaactgctactgcaatgtcttgtgaagtcattagtccatgcctttaaatgtgattgtagaatttttttgccttggtacagcagaaaaaatagagtgatttttttttttttaattcatgtaaaccagagcagaagtttgaaatagtgaacagtcttgtaggcattatgtgctttcaggttctgagtttattacttctgagaattaaccwtagtagcagtggtctatgacctctgtgggtgaaagggtggctgggctttaagcatgtgcagcagtgggcaaagaatggaggtgagggaagaggcatcagacattaggaagggatcctyccggagaagtggaggtgggtggttagattttgtgggtgccaatggcaagatgagtcctattagaaagtctcattgataagaaaaaattgttttcaaggcagacttaaaaattagggcttccccatttttacttacttcttctacattgcctttgtaacttcttggacgtgataaattgaattaaacgtggtattttatttggatttcttgatttttaaygtaagcatgaattatagtaactcttccwtgctatctgaaatactgcaattcttgttctagtttgagctgattagtaagctgcattgtaatttgactcatttcttaaaattagaggaattagataaacagtgatgggtttgcaatgtagtgtttgccaaatgaatgtcatatataatgttaagaaaaattttatttgtgtggcacactttataaaataaagcagacctatgtcaagttctaaatgcaaatttttattttacttttcttgccatcttcatcactgtaaatgcaagtttttaaaaagatattttaaaattggacccagaatacaagagctctttattgcaacaatggcttctggtactctgatgatcaaatgacattttctgaaatatgcttgatacagtaaacactgacaaaactagttaaccccacagagaaggttactagtatttttcaccaaagccaagctgaaacaggttctattgcgatttacttggtgtaaaatatatgtataatttctcatatgtctttttttggtttaacaaacatagtccttattcatcaagtaaattcctattgctaarcatgttttagttaactagtaacaataaatttatgttaaaactgattttcatgatagaagatagaaatgaaatttatatagtttggctctcaatcctttattttcagggaaaagacacaatttatacatatgagcaatttgtgaagatgtgggaaattcactagattagcagttcttttttcttttttttttggcctttaatcagctatgtgatcaggaacaagttatgaactattacatgtccttgcattctttatctgtaaacataaaggatgatactaaggggcctctcagtttccttccaactcttaacattctgtagttctaatgcagacaactatgactaaacctaaggttgctgcttttatacagttgtactcaggktctgtgtggccttccatttttgtagtccctgtaacaaagactttgagaaggtaaaaataatccttactcatgcagtgggaaggtttcttaaggagagtaggcttgtattttctgttgctgtgtaacaaattacccccacatttagcaacttaaaacaacacaggtttattgtctcacagtttttctgggtcaggagtatgggcacatcttagctggtttgctgcttagcatctcaaagtgtcaagcaggctgcattctcatctggaggttcaactgtggaagaatctgtttgcaaactcattgaggttgtaggcagagttcatcttttgtgcctatatgagtgagggcgctgtcttcttcctgttgactggtggcttccctcagggactagaggctgttccccgtatgcggccctgtccgtaggcagttcatcatacggtaccttgtttccttgaggccagcagaaaactctgtctccagtctgctaagatgaagtcctttccatcttttctaccatttagtctactataccataagtcttttctcgagcctgttagactgctttttaaacctgacattctggtgcattgggcccttgcagttttcatgcaagttgattaacctttatgttaccaaatgactcactggagtatgctttttgctctctaatccataattcaaaatgtatcttcctcttattcacttctctgtactttatttttttggcagacttttgatagtagatttctaaacattctgtatttttcctttcttttcacagtctgtcatgcagctgaccaacgtaagtccaaagtgctttagaattcgagtaattctgcaaaccctgctttgtagttagcggtgmagtggtgaagttcaaaacttagacttgggctgggcacagtgggtcacacctgtaatcccagcactttgggaggctagggtgggaagatcacttgagcccaggagttcgagactagcctgggcaacagagtgacactctgtctctaaaaaacaaacaaagaacttagacttgaatgtaggtgacaggtggcactaatctcgggcactaatctctagttcaaaatgatcctttatcagttcaagtatgaaagacttcatatagtaaacattgcttggggggattaacatataatgtaagaaagggcagatggtatttcctgcattctggagagccttaagaggattggatgctctctatccaccccagccttgcttcatcagtaagctgctttcagctgcaagtaacagaaactggattcaagttggcattaacaataaagagggacatagtaacaagaagtccgcaaacagagcacactccagtgcctcagttcagagctcccgctctgccttgtccatgtcagctttgtccttaggcgggctccctgtgttagtccattctcacactgctgtaaaaatactacctgagactgggtaatttataaacaaaagaggtttaattgactcacagttcagcatggctggagaggcctcaggaaacttccaatcatagtggaaggcaaaggggaagcaggcaccttcttcacaaggcagcaacaggaggcagggagagggcacaggggagagtaccatttttaaaaccatcagatctcgtgagaactccctatcatgagatcagcaagggggaaactgccccctgatccaattactcccaccaggtccatcgcttaacacgtggggattacaatttgagatgagatttgagtggggacacagagccaaactatgtccctttaaggttacagagtggctgctggaacccccagaatccatatgtttccttgctcacccccagtttaggagagagaattaggtccccaaaccatggaatgtaagttctcaaaatccttagactcccctaagtcacatgcccatccctggaccaataacagtcagccagccacacaatgctatgagccctgtccttttgatcgggatccatcattggagctgggggctctggtagacagctacctgagcagaacagggcctctgaagagggaagaggggagaggatgcttagtaggcagccaacactttccattaccttatctaaccagtaatttagttaacactgttttatctattgttcttttttgtaactagacaatcttaaagtggaagtctttctgtatactatgaagccatgttgtctaatacagtagccatcagccacttgttactattgtattgtaacttaaagtaattaaaattaaaatagaaaaattagtacttaagtcacactagttacacttcgggtgttgagtaggcagctgtgtgtagtggctaccttattgaacagcacagatatagaacattttcatcatttcagaaaaatctgttgaacagagctgctctaaattgtttcaggtaaagtttttgtgtaagcattgagccacagtagaaacaaggatagcacctactttactaggttttcatcttatgttggggattataggatctgaaatttagccgaaatgggaaataggaattcattcatgttgaggtgattgaatataatgtttgatactacttaggacttaaaaatatcagagctgtttttaaaaatatacttttttccattaagaaagtacaaattattttttgttgtgtaataactctgtgcaagtttggtgatatcttgaagttcagaatatggaaaatgttgtaatgtgaacaactttatgtggtggtaacatacccatgataatgaatctcacagtataatgaaagtgactgcccagtttgtcattctagtagagtatgctaaacttttcagggaatgtagacgaatatgtattagtgcaatcacagatgtgcttgatataatcctgtctccactattctgaggccgtatctgtcaaaccagaattagggctaaagaattattatattaagtatcttaaaaatagttatgtccccctgtagtctcagctagtgggaaggtgggaggaycacttgagcccaggagttctgggctgtagtgtgcagtgctgatcaggcgtctgcactaagttcggtatcaatatggtgacctccctggagcagaggaccaccagagtgcctaaagagaggtgaactagcccagtctagaaactgagcaggtcaaaactttcatctgatcagtagtgggatcacacgtgtgaatagccactgtactcccagcttgggcaaaatagcaagaccctgtctctgaaaaaataaataaatatttatgtataagattatatatatatgtacattatataactaggttattggacatgtgcatatatatatatatccagtaaccaatatatcttcamtaacctagtaatactactcctaggaatttcttgaagaacttaaaatatggacaaaaatgttatacatgaggacgctattcatagtgcattaaaactggggacaatctaagcttctaagagtaagagaataaccaaatcaattatggggtgttaaatcccccaagataatgaattatttcttatccagctgttcagactcatatttttgtagctctttaatggtgtatgcataaggtgatggtaaagaatgcaaaattacatgtaatacagaaagcagtaatccaggatctaaattaagttcctgtagttctcaactggctcctgtgtacaaaatccaaggtcaaagaagactgaayagccagataattgttttgagcagatttctctataaagtaaaatacagtttcagaagcaactgagttcactttatgcatcttgctgtatattaacctgcttttatcatatcactttcttgctcaaaacttcagttactccttaggaattaaaaaatcctctagaattccagcctcatttctcattaccctgaaaaggcccatctttacatattgacactctgtgcctttccaagtaccatttccactttaacctagaatgactttccatcttcttttccaatgctctgaagtttttctttcgaaggtatcctgcagccttcaactgaccactgtagttcagttagccttttctttattcccctaatacatagtatgtttataaacttgtaactcatgtytgacatgtctcctatcttggaatatttaatyacccgtttataactagattgtaaactacttaaagacagtgaaaacacatattatactaatttgttctaggtgccaaaagggttacagttctgtgtaatgtccaccctttggtagggggtcagtgaaaagctccactgttaagttcttttgtaactgttttacgttagtagattttaggtactctgaagatatagaagaaaatcccctggttcgtacccctggaggagttataatttagttgagaaaactaagagttaaatttccgggagtaatgttgggcaactgggagatgcttagtaaatatttcaggccaggagctgtgtggtatgctacctgagaggcagaggcaggaggatcgcttgagtcaggtgtcagaggttttgatgagctatgattgtgccactgcactacagcctaagtgacagagcaagaccctgtctctaaacgtgtgtgtgtgtgtgtgtgtgtgtgtgtgtgtgtgtgtgttttatagtgacatacttccccgctactaatcacggaagcagtggaagatggaatgactgtagaggaatcattgtcctttcactgtgatgataggaaagaggtggagctgcttcctctgtcctcagacatcgtttgatggtctgtgctcactcaccaggcattaccttcagaaactgcaaatatatttttgttaattcacatgtttaaatgtattcaggattatttatgtatgtgtacacatgggrtgattttagtattggtgtgaattttacctagtttaagaagtactctgaaggttgagagattttaaatcagtagtaaggaagaggaggactaagaatagaagaaatatatcatgctaacttggacaaaaggccataaaggatgagagtggcagaacataaaatcttatctcaggtatggaaattgtaagttatgttgttaakttatgttgaatttgtgtatcaacatacaaacatacattctagacttaggcaagaacagcaaaagttaatttatgctttaaggagaaggtaatggttttaacatcaaaaaagttaaattttttattggtaaaaaaagttgtgctgtaaggaaagaggccttcttatagatgtatagttcaaacttgtaagtagagataagagtatctccaagtcatcccttcaggatctgagcatcttagctgttaacatctccggggtttgtaacaacgaaagatagagctgggctggaggaaagccagggcggcaaatgagctacttcagtaggtgacctgtctgttccaagtccacaagcactatctgtcctttttcaggttagcacactgctatcagtctttgtatactgcagctttcatgttttgaagtacttagttttgagtccttctatcgatggaatttctcaggaaggatatgtggtgtctgagtccgttcaggctgctgtagcaaaatactgtaarctgggtggctcatraacartggaaatttatttttcatggttctggaggcaggaaagtctaagagcaaggtactggcagataaaggtgtttggtgtgggcccacttgctggctcacagacagccctcttttcactgtaacctcgcatgatagagggtccatgagctctcttgagtctctttttataaggtcgctattctcattcaggaatgctctgccctcatgacctaatcacctccccgaaagccctacctcctaatgtcataatttggaggttaggacttcctatgtggagggacacaaatattcagatcatagcatgtgtgcaggatttaggagcttttaaatatttgaaaatgtctttaacatgactgtcaaattgaattttcttacaatttttaggtcacatgcttttctctttaagttctgcattaattgctctgttgttttctggttcgtaataaagctgaaaagtctaaggccagcatgatagttaggtctatgaagacaagctgtttttccctgtgtcttaatagtatatttttcttataatttaaacaagttcatgtaaggaatttaatttgccttaaacatattgaacctgttgattttgcagtctggggtcttttcaccattatttttctaattgtagttttagaaacctaagatctcttttgaatctgtgtatttgtgaacttttttttgtcattttcatcttcttgaccaatttctctttattcttacacagcttctctagtttgcacagtactctccacagtaccgattttaggagacttgataaattgctgagtacaagggaataggaagatccttggctgaatttgatacagctttttgtcttggacaacttgggctccaaaggaggcacatatttggggagtgggaggaagaggtagtcattgagtaccatgtaggatcttttgtgtcccagatacaaaagatgttgagcaatccaggtggatgctgagagtcagaaaaaaatctggacaggaaacataaattggggttcatcacctaatrgatataaaagttattgcccagataaaatgtatagagcctgcattcagatttaagagaaaaaggagtctattaccaagaccaggaaggaagctccatgataagaaaagcagaagaaaggagctggagttatagaaaggaaagtcygaaagactttgaacaagtaggatgcaagtagtgagggtaattatgtgtaacagaatgaaargcccaaaaggtatcaatagaagctccttgctgattttaataggagcattttggtatgggaggtagtgaaaaagagaaggctggtttttttgttttgtttattttgttttttgattgggggggttgttttttgtttgtttttgttttatttttgagaytgagcctgtctgttccccaggccggagtgcagtggcacaatcctggctcactgcaacttctgcctcctgggttcaagggattctcctgcctcagcctcccaagaagctgggattacaggcacccaccaygatgcccggctaatttttgtatttttagtagagacagggtttcatcatgttggtagactggtctcgaactcctgacctcaggtgatctgcctgccttggcctcccaaagtgttgagattacaggcgtgagcctccgtgccaggccaaggctgttgttttaagacacttcgctggtaacaggaagaagaaaaattgggcaaacatcacataaagacctactttcttgatggcrtatctatacaacaatgaaggaaagaagccagtagtgtaattgcccagtgggttcttcctgcccactgcatggaaaacagtttcctgagactgtgctatttgagtacacaaagagttttattaatgtcatgctggccatacaggagatagagttattactcaaatcattctccctgaaggctcagaggttagggtttttcaaggatagtttggtgggcagaagactaggggatgggtgctgctgattgctttgaggatgaaatcatagggtgtggaaaacggtctttgtgtgcccagcctgtctctggatgggggcagtaggactggttgagtcatgagtcacaagtccaggtggagtcagtataaaaaatatttaggaagaccaatcttaggttgtacaataatgatgttatccatagaaaccattagggaagtcacacatcttgtgaccgctggccccgtgactgctgaaccccatgactcatgaagtaagggattatagaaactatgcctacatttaggcygggcacggtagctcatgcctgtaatcccggcactctgagaggctgaggtgagcagatcacctgagctcaggagttcaagaccagcctgggcaacatggtgaaaccctgtctctacaaaaaatacaaaaattagctgggcacgatggcacacatctgtagtcccagctactcgagaggctgaggcaggagagttgcttgaacatgggaggtggaggttgcagtgagctgagatcacaccattgtactccagcctgggcaacagagtgagaccttgtttcaaaaaaaaaagaaaaaagaaactatgccaacatttaatcagaatttaggcccttcccataattctaatcttgtggcctttcattagttttacaaaggcaatttcagtacccaaacaaggaggacatcagttttagggagggatattatcttggcttcaaagttaaactgtcaactaaattcctcccctggttagcttgctctacacccaggaacaagtgaggacagctagctagtaaggctagcagcaagatggagtcagccatgctagatttctctcactgacataatctttgcacaggcacttttgatggagtgagcagttgaagggacaggaaagagaatggcagtagaaaaatacaaggaaaatggggtcaataacttgggttcactttcaaagggaggagggaatagtttcatctaattatttattccctcaacaaacatttattgagtgcctcctgtgtgccagcaagccttagttttaggcacctgggatgcaatgaaaaaaacagtgaaaaagctytactcttgggggaccataagtagtaaacataataaataagtaaattrtataagaagttagaagataagtggtgtaggaaaaatgaaaccaatagagcaagrtaaggaagactgggatattggggccagaaatgagtggtgctatagttttaaataagatggtcaaggtaggctttacagagcaggtggcaattgaacaaaggcttccaggaggcgaagcagttggccatgtaggtatctggagaatgacttgttccaaggasagggaactgcaaaaagtcttaaagcaggcaccttttcagcctatgggcagagctgcaagcccagtgtggctggagcagagtgagcaagaacactgagagagatgccgtcatgggtaggggtgtgtggagggggtacagattacttaggacctggtcttacagtttaaggacttcggctgttactcaaagaaaaatgggaaagttttaaaaagaggagagtcatgatctgacctagatgccatatatatggtcagcttatatatgaggcttgaagagrtttggaaaggtatggaatagtttctgagcagaatgtgagaggaatctgatcagaaattgtcatggactgtcacggagcagacagagccagtctgagatatgatgatgtactatcatgtatgctggcattattttactctgttgttttgttagcagtgattagttattgagatgtggctgtggaagaaacagataataggactggatttgctgaagggcaaggtggtaattcaagtaatgtgctgtagaatctaggctggttaaagatttcagcgtgaaaccaggagaaactgttagatttgaactaggaaaaggacagggtcaggcaaggcgctagtactaggctctggagaaaagaagggaatggaggctggtagctaaaagtgagatagtgtagttttcagaatttcacttgtggagcagtatcagatgatttcaaggccaagggcatgaccagtgaaatgaattgctgaagaagctaggtatagtataatatgaaatatatttggtctttttcccccatgcttgtctcagagctgctaaaaccattgggaatttcctgagygataggagtacgttttattaataacaatccccgtaacaggttatgctaatragctaacttagggtagggcttctgtagcttcagaatggggcgactcactagaaatacagaggattagagtggtggaactttgagactcaccccaccatcctccaggaaaggctagggctggagattagtctctacaaaaactcttgaacaacagacttgataaacttctatgttgctaagcacatggaggtgccgaaagggtggcacacccagagagggcatggacatccagacacccccctaataccttaccctctgcatctcttccatctggctgttcatctgtatcctctgcaatattttttataataatccagtaaatccttcttagcaaattaatcaaacccagcgttaaaggactaccaggttctattgcccattgcaaggcgacaagcaatatgcagaaacaatgggaaccgcagcagagaaagagttcaataactgtagggcagcaaaatgagaagatgaaaccttgttaaaagaaaaacttcagctgaattaaatgtaaaggagtttaactgagcaatgaactattcgcaaattgggcagcccccagaatcccagcagattcagagagactcctgcgcagccatgtggtggaaraagatttatagacaaaaaaaaaaagggaaatgatgtacaggaatcggaagtgagatatagaaacagctggattggttacaggtcggcgtttgccttatttgaacactgagcacttagcagtctatgagtggttgaagtatggccactgggattggccaagactcagctgttgttacaggcgcacactcctaagttaggttttcaatcttgtctgcctattaagttaggttacagttcatccacaaggactcaaatgtagaagtacagagtctttctcaggccatgtttagtttgctttaacagttcccctcttttggtcattctttcaattttgagagattgaccaaaactttagtccttgatgtcactattaccatcataaatatacttacttggttttgaaaaccactgggaaacagtagaactgagttttgcaaaggcaggaacaaggactgagtagagggtacctccttatgccagaatgtcctgtttataggagaaaaacaaaacctggtctgttctggtctaggatctatgtgtttccttaaagttttagtttgattatgtcagatttaacaggagtggctccacttttgtttggtttggtctgttggggcctagtgcatgagctcagtccaaaacaatggcctcctataatttaaaaaattcccccttctgttctggttctcacttaggtgagagtgtgaccaaaacttagggccttagtgccactctcagttaccattattttgggtttcgagattcagcatgtcatttataggttatggtgtcctcatggctgcacatttctttcarctcttgtcattccagttgaagagagaccatgtgacgttttagagatggctacatgaaaacatttaaaacctctgagagaatacagcacaccagggagactgttatcatgactgtcgggaggatagtaccaagagtttggagtatgcttcttacccagggtcccagtaaatcaaacgacctaaaatcaaatagatcaaagaatgagctaaatgaagagtctactggcttaactaagtggttttttctgttaatcccctacaacggaatttttataatctacatttgacgtatttcttcataggccacaagtgccagcagctgcacagatacttttctgtttagccaattctgttttttagcataaccttcacaagagaatttaaagtctgttgtgcaacaatagcctttacagtagaaactgctataaagcctatcatgaaggacacattttaaatcattccctcttttattccaaaccgtgaaaaaaggacctaacaaacattgcccttctagaagagtgaaggcctcctggcaatgttctctttaacctatgtgggttaagaggagtgaatcaatgtgctgtttctgactgattatgaggcaacatatgtaccattaaagtttcttacctacattggggcttcgtgttttatctatgaaggtataaggttatccatatataaggctggctgcaaaatcattttcaaataaaagtataccccataagttcacacaacagacgacccccccccattttcatttctgttgttcatagaggcataaacaagggaaaagtatttaaagataagagtctcatggtagtagaactcttcatctgtgatcttgggaaaagctgttcacatcaaggatgccatctttttctggggagaaatttccctggttagctttaccttgagggttccagtgggtgtacagttccaagattgtggagggacccttctctattgtgagattatgaagccaaaatacaaggtcctgaagttttgctgcagtatggatagcaaggacaatctttctctgatgtcctcagaatattcagtctttgggttctagattgtgaaagggttgattttcctcagtgaaccataaaaatacactgtggcataataacttagtgttataacatcagtcctcttgcatgggaaagcttttatacaaccagaaaacatgcattgaaaatgacaattgaatgaaatccctctacaaatgtttaaatgacccatcaggtagccaaatatacctgaagctttcatggtcttctcaggcacgtgggtttgacaaactaaacattggttatgaaattattttagcaggctgggcacagtgtctcatgcctgtaatcctggcacttcgagaagctgaggtgggaggatcacctgaggtcaggagttcgaaaccatcctggccaacatggtgaaaccctgtctctactaaaaagacaaaaattagctgggcatggtggcacaygcctgtagtcccagccactcgggaggctgaggcaggagaattgcttgaacccggaaggcagaggttgcagtgggccgagatcatgccactgcactccagcctgggtgacagagtgagactctgtcttaaaaagaaaaaaaaattattttagcaatgtataaggtaccacaccaatatatttaatttgaattattttatattttccgtgatgagtcatggaaagcataacttttagtaacaaaagctgtaaggactcaggaaggacaaggtggctatcctggttctccatgtgtccatgcttaattaacgttagacttatgtcctcttgaatgccagttgtttttccaaattaggtacatagcactgataactgatgggttatcataggcaatttgacttagactatggagttcatttaaattgtatatttaaacaatttcagtaccagctgatttaacgtgaaaatctggcaaagtattttcttggtgttcaattaatttctgtctacttgggttagcagttttatgaaccagtcagtctttttattaaagttccaggaattcttacccagattaaatgatatgattctaaggttattagaaacctgtattcaagagtgctttttagggtcctttccatcctttcatgaatctcctaaaagacaccatattctaggattttacatgcttatgaagtttttagaaaccgcattaagcaattaactggaaatgactttaaatagttatagttaaagacacagatgacaaggaaatgtggttatttccatggtctataacaacataataactgtarttatggatagcatatacacagacatattaattttagaaatccaatacaattttggaatatatattaacattcactaaaatataacttgaaagagttaaacataattttttattttgacaattcttcacatgtaacttaacatgtcaaataatcctgtgyttacctctcttttggatgcttcaggggccctctgtagtatcccaaagttagaagttagaaaagacaattttgaagctgaaatttgattttcggaagcctatcaaatatgttaaaggtttaaaacactacattatacttaaccagtttgaccatgaggtgagatttttataaaccttatataaccctttgcaatttttgtgaaagagtagatcagttctttaagaaaaccctattgtgcttttatttcaaggtttaatttatggaatgctgaataacacccctttaagtttagtcaatatgttcacaaacagaatttctttttgcaagattagtttttataaaccttatgcaacttaaacctttagttttatgttatctaattaaaaaaccccttcaccctctaggcaaaaacttacactcccatgccttcttataatcttttatcaaaaacacatttcactttcctcacacgccttgcatgtaaaactattttttttagtagttttaattacatgttattatgataactcttagcagcttttacttttggtgcataaatttctttcacaacttagaccatctatggcatgcttggactttgacttgtcctaaacatgcctctttttaaacaactagttattttactttgggaaaagaatttaccatacaagattgtttctcctataaaatctcttttttaaaagtcaaagaagtggtttatgaccttaaagcatktaggaaacctaatatctgacctgcacaatttagaccaaatgtttttattttaccaataaccttccaagctgtttttatttcccaaagatcactaaagttatgtgaactaaaagatactacagtttttatttttctttcaaaatgtttaagtgcttgtttttctttaagccaattaattagagcttttttacgtaaacgctatacacacaacacatatataactacacagacagatggaaaaaaattaagtagttgtaagatttttttatttcctagtttctaagtttcttaattggattactggctttagggtggagtctttggaagaactggctagggaaacatgcagtttctagtgcctaayaagcaggcacagctggaaggcaaaaacagatccccaaaattaagggtcccatttttatgggtcccctgaaagagggagatactattggaaaagacagtgcawtgcttttactgtgcatttaattgtatggcatcccaaaaccaatcagcccatttgtaattagcccaccccctataggagtcttatctttcagtggggttggggacatctccatacttcctaggtttcccaaagcatgcttctctgatccaaatgtgcagagctcagtgtttccccatagctggcactagacatccctaaaagtgtatttcctacctaattattacataccaaagctctttcataatgtgaagtaattgctgatacccccaaaagtaaaaaatgttagatattgcaatgcaaaacagtacagagccttagatgttgaaagaaatctatccacttccaattcctgggatttaatgaggaaaacagaagtttttcccaaaatggggtctctggtgcctcctgtttttcccaaggggtcccatgctgttagagcttgaatatctgcttgtaattaagctgacttttaaccacagtggtctttttttwaaaaaagtccttttaaatttcctattacccaacgttagccaggccaaatggctgatattgttggcatttaaactttatcaaaagtaacctcacaggtgctcttagaaaggagaattccgcagttcctggaggggaagagaatcaacaaatggtaacrgttatgaagatatcaaacaggaaagaactcattccctaagccaggtattggacccggatcaccactatgaaagagaaaacatgagctactgagctacagcactgggcagcctccattgccctttccagaaggagtctagagtagttaattttgagcttgcaaaggcttttaactactcaggatgatttttagagctacccgtgacatgaaccttaaaattcctgttccctggaaggcagagaccaagagtaagtgtagccatgtggtcacaggatcaagctccgaaggaaataaaacacgatggagacctcgtacagtttttttgtttgtgtgagggacctgcagcaaagttcgttactgaccagcttgctgggccgtcttgagcagcgggcttatggggtttcaagcccrtgttctgttctaagttagctgtctttatgacagaaggatacaggaagacatagcaagcataccaaattggctgcagcttaagactagcctcataaatcctttttcccattactcaaaactttacaagagatagtgatttttaccattcattcaaccagtttgcacagggagagagaggtagaagtctgactggtaagaaagccttacccttttgctggcatgccaggcttctgagttcccttcctctgagtggccctgtgacctggctggctgcaccacagccttgggggccaagccgccacacaaagcaaaatcatctttttctgttttgtggaaccacgggtaaaagtctcttaattttgcaagttgctgcccaaccagctgcatgggggcgccaaattatcgaactggcaaggttcaaatttgcccctgattgggccctgtcatctttaacccattttttatccaagagagactttactgacaggagggyctctaacccagttccatcctttactcaagtaaaatgtaccccataacttatccaaagtcagccaattggtactgcagtctatttcctttggatctggataataactaagctaaaaggttagtagatttaatttctgagagacctcatttttaaatgcacttcagtgcattgtggtttattcagaacattctactgtaagttagctttagtaagattttgccattctgtaagactttgctgctttctctgcctaatgtataagctggaaggaacttagatttccagaaattgaggatcctattttgcctaaaatgttggctatagtctcaggttcccttgattaacttagccaatgatttttttttgcccctacttaaacacacaagaaaaatgaaacaaaggggtagaacacaaaaatccttgcaaatttttaaaagccaaattttacaacccctgcaatattaccatttactatcagtttctttctgacccagtcagatgtaagaggcctctaactggatccaaaccagttaattaccagatctaatctgatcctgaacccagttcgatttctgttgcgatttccaaacccagtttggaccagaaatttgctcagagaaactcaagagctcaaaacacaaatctgtagagctccgaaatctgagagaacttaccatgatccccagctgctctgagggatcaaaggacacaagtgggtccagcaggtaccttgcttgttcattcggagctcctggagatcattagaagctctatttcagatcccacttctgacaccatctgttaaaaacttaggctggattacatttaaaggagtttaattgagcaatgaatgatttgcaaatcaggcagcccccaggctcaaagcagattcagagagactcccatgtagccacgtggtgggagatttatagacaaaaaaagggaaatgatatacggaaatcagaagcaacgtatagaaacagctggattggctataggttggcatttgccttattcgaacacttagcagtctatgagtggttgaagtatggctggccactggaattggtcaagactcagctattgtacaggtgcatactcctaagtttggttttcagtcttgtctgcctcttaagctaggttacagttcacaaggactcaaatatagaagtatggagtccttcttaggccatatttagtttgctttaagaacttcaaatctgccttcccgagaggtttggagatgaagattttaaggattctggacaagtgatgggctaaagtgtggggattgctgattaatcgagaagtgagaggtaaagtctggtgacagggagatgaagaaactacattcctttgctgagttagttccttggtgggggtcttcagacagtttggtgtcagctgttttgctggaattcaggatctggaaaacaccttaaccaattcttaggttaaaaggtccggtgtcagagattctgtctataggaacagcagggagtaggtggttcagcatgctatgtgactctcagcagctatagggaagtgggccagagtgcaccagtgcatgcatcctggtcaggtcctaactataattctgcctaaaatctggcttgtaaatcttattagtttctccaatggaagggttatcaaattaattgaacccaaggtgggaacttgaatgtatagcctgttgagaagtatgggtaacaacttactacttgtgatttgcatctgaagtggggagtaggagtagtcttgtgggactgagcccttgatctgtggattctgactcttaactcaaataagacagtgttagaattaaattgaattatagggtacccagttggtgtcctctagagtattgcttgatgtgtggagaaaactccttcacatttagttgtagaagtattctacattgagtgtgagagtagagagagaaaaagagtttttttacccatagtgtaggattttgcatggtcacccaaattaaataatggcaaaagtttagatgaaggaagaatatgagcttggtttgaccaggtcatagatgagaagatgaagaagggagctagaactaataattattggtaaagcatagtaagtgctagacacttaaccagctcatttatctcataaataccacgcgataaaaggataacttaattttactgataaggagaaggctaagaaaatgttagcactcaggtctttctgatggcaaagcctccattcttcctgcaacctgtcagaagtgaaaaggaaaggatgcaagggaactgtggattctgggtttatgtcaccattacagataataaccatggcttagatcctctgaaaagatacaaagatataaatattttgtataaatgagtagatttatctagtgattttggaaaaatcattgatttttttttaagtggtacacttgacatttaagactgctctggaaattaatgaattattaatgaacttccataggaattcactagggggggcataatttaatcttttctgaaaattaagaatttggcagtggcttcatccttaattcagcttgtttatgtggttcaaatgtggtattagaaagcccccaaagcagaataggctgaaggagatggattatatagtagaaattaaattggagccatcagtgcattagggagtaggaaagtaagaacccagaaagtactgtcaacagactttcacacctttttactttctctaagcagcaaactgaatttgatttaaaacagcagccaaagtatgattaagaaagagattgaggccaggcggtggctcacgcctgtaatcccagcactttgggaggctgaagtgggattgcgtgaggtcaggagtttgagaccagcctgggcaacatagcgagtccctgttgttaggatttgaagggaagacgagagttaaagacacacacacagagaaagagggcggctstacagcaactgcaggcatttatgtccagcataaacctgagaggttggggaccagtttaatgccagtgctcactgccgcttacaggctggagtacttataggtatcggggggaggggtctgggcggtatgccttgctgccccggaggatatcgataagatgtttctgtggtctggcggtttggccaaggatgttccttgtgccctttgcccagcaagatatgatagggatgttccttcagttgggcctttacctgacatggtatgataaaaatgttcctgtgccttttggtcaggtggctaggcagggtgtttctcatggcctgaacccctgcggaatgtttcactctgaccaaggtctgcaaaatggcgggggggcttacaaaagcagtttggactaacctgtctctgcagtaaataaaaagaggtggaaaggaatgaatcttaggatatttggatattcttactctgaattaattcttgattttaggatcttgatcttaggatcctcggatattctcaggatcctaggatatttagatattcttaatctgaattaattcttatttttttttttttttttttttttgagatggagtctcactctgtcacccaggctggagtgcagtggtgtgatctcggctcagtgcaacctccgccccctgggttcaagcaattcttccgcctcagcctcccgagtagctaggattgcagcacccgccaccatgcccagctaatttttgtatttttagtaasgacagggttttaccatgttgggcaggctggtctcgaactcctgacctcaggtgagccacctgcctcagcctcccaaagtgctgggattacaggcgtgagccaccacgcccggccagttcttaattcttaagctggaattacagatgtgagccactgtacctgaccaaaaactgttttggtgttgtgtgagagtatagaaagtgtgttttcccagaataacctttttaagctggcttctttgacttggcaatatgcatttaaggttcctctatgtgttttcatggcttaatagcacattactgaataatgttctgtttgtatgaaggtgccacaatttgtttatccattcacttattgaaggacatcttggttgcttctaagttttggcaattatgaataaagctgctttaaacatctatgtacagttttttgggggcataagttttcagttcaggtgggtgaatagaacttaactgttggaatttttttttttttttttttttttgagacagagtctcactctgtctcccaggctgcaacatccacctcccaggttcaagtgattcttgtgcctcagcctctccagtagctgggattacaggtgtgtgccagcatgcctggccaattgttggattgtatggtaagagtatgtttatctttttaagaacctgttaaactctcttccaaagtggctgcaccattttgcattcccaccaacaataagtgagagttcctgttgcttcacatcctcaccagcatttggtggtgttaatgtttttggattttaggcattgtaataagtttgtagtagtgtcttagtgtttttaatttgcaattttctaatgatgcggcattgaacatctttttctgtkttttttgccatctgtagatcttaatgagggctctgttcagatctttttcccattttgtaaatgggttgttttcttattgttgagttttaagagttctttgtatacagtcacacgttgcttaacagagatgtggtctgagaaatgcatagttaggcaattttgtcattgtgagaacatcatagggtatacttacccaaacctagatggtacagcctattgttcctaggccacaaacctgtacagcgcattactgtactgaatactgtaagcaattgtaacatgtaaatatttttctgtctaaacatacctaaatggggaaaagttacagtaaaaatgcagtataaaaaatgatacacctataccagagtacttaccatgaattggagcttgcagtactggaagttgctctgggtgagtcagtgagtgaatgtgaaggcctaggacataactgtatactactgtggactttgtaaatactgtacacttagactacactgagtttatttttaaaaatttatttagtaataaattgactttagcttacctttatttttatgcttataagcttttgcctattaatattttcatttttattttattttttaaactttttgttaaaaatgaaggcacaaacacacattagcctgggcctacccaggggcaggatcatcagtatcactgtcttctacctccaccatcatcaccacaaacacgtgaatatgatgtcattaagcaataggaatttttcygctcttttatcttatggcaccgtctttcatgctgtccatcactggctgaaactgaagctctgtgatacatgactgtattggatacaagtcctttatcatataaatgttttacaatattttctgcttagtgacttgtcttttcattttcctagcagtatgtgttgcagagttgtagatgtttttttagtgaagtccaacttaccaattttttcattcatagatcctgctttttggtgaagtctaataatgtgagtctgctaatgaatgtcaatccttgttcttctccagtattttgttggctattctgggtattttggctttccatataaacttcagaatcaggttgttgatacaagaaacagtttgctaggattttgattcggatattattgttgaatctgtagatcatactgacaaaaactgctatcttaacaataatgagtctatctatgaatgtagactatctctccatttatttagacctttgatttctttcagagttttgaggttttccttatataggtctcatacatatgttgtttatactacctattttgggagagtatattattatataaatggtattttttaacttcaaattcttatgtatcattgctagtatctataaagacagttaacttttatatatttgatcttataaaatcactgtacttgcatattagttccaggagtctttttatatatatatactttaagttctagggtacatgtgcacaacgtgccggtttgttacatatgtatacatgtgccatgttggtgtgctgcacccattaactcgtcatttacattaggtatatctcctaatgctatccttccccctccccccacccaccgcaggccctggtgtgtgatgttccctaccctgtgtccaagtgttctcattgttcagttcccacctatgagtgagaacatgtgatgtttggttttctgtccttgcaatagtttactcagaatgatggtttccagcttcatccatgtccctacaaaggacgttaactcatccttttttatggctgcatagtattccatggtgtatatgtgccacattttcttaatccagtctatcgttgatggacatttgggttggtcccaagtctttgctattgtgaatagcgccacaataaacatacgtgtgcatgtgtctttatagcagcatgatttataatcctttgggtatatgcccagtaatgggatggctgggtcaaatggtatttatagtcctagatccttgaggaatcgccacactgtcttccacaatggttgaactagtttacagtcccaccaacagtgtcaaagtgttcctatttctccacatcctctccagcatctgttgtttcctgactttttaatgatcgccattctaactggcgtgagatggtatctcattgtggttttgatttgcatttctctgatggccagtgatgatgagcattttttcatgtgtctgttggctgcataaatgtcttctttttagaagtgtcttttcatatcctttgcccactttttgatggggttgattttttcttgtaagtttgtttaagttctttgtagaatctggatattagccctttgtcagatgggtagattataaaagttttctcccattctgtaggttgcctgctcactctgatggtagtttcttttgctgtgcagaagctctttagtttaattagatcccatttatcaattttggcttttgttgccattgcttttggtgttttagtgatgaagtccttgcccatgcctatgtcctgaatggcattgcctaggttttcttctagggtttttatggttttaggtctaacatttaagtctgtaatccatcttgaattaattttcatataaggtgtaaggaggggatccagtttcagctttctacatatggctagccagttttcccagcaccatttattaaatagggaatcctttccccatttctagtttttgtcaggtttgtcaaagatcaggtggttgtagatatgtggtattatttccaagggctctattctgttccattggtcaatatctctgttttggtaccagtaccatgctgttttggttactgtagccttgtagtatagtttgaagtcaggtagcatgatgcctctagctttgttcttttggcttaggattgtcttagcaatgcggactcttttttggttccatatgaactttaaagtagttttttccaattctgtgaagaaagtcattggtagcttgatggcattgaatctataaattaccttgggcagtatggccattttcacaacgattcttcctatccgtaagcatggaatgttcctccatttgtttgtgtcctcttttatttcgttaagcagtggtttgtagttctccttgaagaggtccttcacatcccttgtaagttggattcctaggtattttattctctttgaagcaattgtgaatggaagttcactcatgatttggcattctgtttgtctgttattggtgtataggaatgcttgtgatttttgcacattgattttgtatcctgcagaagttgcttatcaggtttaaggagattttgggctgagacgatggggttttctaaatctacaatcatgtcatctgcaaacagggagaatttgacttcctcttttcctaattgaataccctttatttatttctcttgcctgactgccctggccagaacttccaccactatgctgaataggagtggtgagagagggcatccctgtcttgcgccacttttcaaagggaatgcttccagtttttgctcattcagtatgatattgtcataaatagctcttattattttgagatacagcccatcaatacctagttcattgagagtttttagcatgaagggctgttgaattttgtcaaaggccttttctgcatctattgagataatcatgtggtttttgtctttggttctgtttatatgatggattatgtttattgatttgcgtatgttgaaccagccttgcatcccaggtatgaagccaacttgatcctggtggatgagctttttgatgtgctgctggatttggtttgccagtattttattgaggacttttccatcgatgttcatcagggatattggtctaaaattctcttttttggttgtgtctgtgccaggctttggtatcaggatgatgttggcctcataaaatgagttagggaggattccctctttttctgttgattggaatagtttcagaaggaatggtaccagctcctctttgtacctctggtagaatttggctgtgaatctgtctggtcctggactttttttggttggtgggctattattgcctcaatttcagagcctgttattggtctattcagggattcagtgtcttcctggtttagtcttgggagggtgtatgtgtcgaggaatttatccatttcttctagattttctagtttatttgtgtagaggtgtttatagtattctccgatggtagtttgtatttctgtgggatcagtggtgatatcccctttatcattttttattgtgtctatttgattcttctctcttttcttctttattagtcttgctagcagtctatcaattttgctgatctttccaaaaaaccagctcctggattcattgatttttttgaagggttttttgtgtctctatctccttcagttctgctctgatcttagttatttcttgccttctgctagcttttgaatgtgtttgctcttgcttctctagttcttttaattgtgatgttagggtgtcaattttagatctttcctgctttctcttgtgggcatttagtgtataaatttccctctacacactgatttaactgtgtcccagagattctggtatgttgtgtctttgttctcattggtttcaaagaacatctttatttctgccttcatttggttatgtatccagtagtcattcaggagcaagttgtccgtgtagttgagcagttttgagtgagtttcttaatcctgagttctagtttgattgcactgtggtctgagagacagtttgttataatttctgttcttttacatttgctgaggagtgctttacttccaactatgtggtcagttttggaataagtgtgatgtggtgctgagaagaatgtatattctgttgatttggggtggagagttctgtagatgtctattaggtccattgggtgggtgcagagctgagttcaagtcctggatatccttgttaactttctgtctcattgatctgtctaatgttgacagtggggtgttaaaatctcccattattattgtgtaggagtctaagtctctttgtaggtctctaaggacttgctttatgaatctgagtgctcctgtattgggtgcatatatatttaggagagttagctcttcttgttgaattgatccctttaccattatgtaatgyccttctttgtctcttttgatctttgttggtttaaagtcaatcagagactaggattgcaacccctgccttttttttgttttccatttgcttagtatatcttcctccatccctttattttgagtctgtgtgtgtctctgcatgtgagatgggtctcctgaatacagcacactgatgggtcttgactctttatccaatttgccagtctgtgtcttttaattggggcatttaacccatttacatttaaggttaatattgttatgtgtgaatttgatcctgtcattatgatgttagctggttattttgctcattagttgatgctgtttcctcatagcattgatggtctttacaatttggcatgtttttgcagtagctggtaccagttgttcctttccatgtttagtgcctccttcaggagctcttgtaaggcaggcctggtggtgacaaaatctctcagcatttgcttgtctgtaaagtattttatttctccttcacttatgaagcttagtttggctggatatgaaattctgggttgaaaattcttttaagaatgttgaatattgacccccactctcttctggcttgtagagtttctgctgagagatcagctgttagtctgatgggcttccctttgtgggtaacccagtctttctctctggctgcccttaacgttttttccttcatttcaactttggcgaatctgacaattatgtgtctcagagttgctcttcttgtggagtatctttgtggcgttctctgtatttcctgaatttgaatgttggcttgccttgctaggctggggaagttctcctcaataatatcctgaagaatgttttcccacttggtttcattctccccatcactttcaggtacaccaatcagacgtagatttggtcttttcacatagttccatatttcttggaggatttcttcatgtctttgtattcttttttctctaaacttctcttcttgcttcatttcattcatttgatcttcaatcactgataccctttcttccacttgatcaaattggttactgaagcttttgcacacgtcacgtagttctcgtgctatggttttcagctccatcgggtcatttaaggacttctcttcactgtttattctagttagccatttgtctaatcttttttcaaggtttttagcttctttgcgatgggttcgaacatcttcctttagcttggagaagtttgttattaccgatcgtctgaagccttcttctcaacttgtcaaagtcattctccgtccagctttgtcctgttgctggtgaggagctgtgttcccttggaggagaagaggtgctctgatgagtattttcagcttttctgctctggtttctccccttctttgttgttttatctacctttggtcttgatgatggtgatgtacagatggggttttggtgtggatgtcctttctgtttgttagttttccttctaacagtcagaacccttagctgcaggtctgttggagtttgctggaggtccactccagaccctatttgcctgggtatcaccagcagaggctgcagaacagcaaatattgcagaatggcagatgttgctgcctgatcctgcctctggaagctttgtctcagaggggcagccgtctgtatgaggtgtcagtcggcccctactgggaggtgtctcccagttaggctactcgggggtcagggacccacttgagaaggcagactgtccattctcagatctcaaactccgtgctgggagaaccactactctcttcaaagctgtcagatggggacgtttcagtctgcagaagtttctgctgccttttgttcggctatgccttgacctcagaggtggtgtctacagaggcaggcaggccttcttgagctgcaatggactccacccagttcgagcttccctgctgctttcttttcctactcaagcctcagcaatggcggatgcccctcccccagcctcactgccaccttgcagtttgatctcagactgctgtgctagcagtgagcgaggctccgtgggggtgcaaccctctgagccaggcacgggatataatctggtgtgctgtttgctaaggccgttggaaaagcgcagtattagggtgggagagtcccgattttccacgtaccgtctgtcacggcttccctttgctaggaaagggaattccctgacccgttgcacttcccaggtgaggtgatgccctgccctgytccgtgggctgcacccactgtctgacaagccccagtgagatgaacccggtacctcagttggaaatgcagaaatcacccgtcttctgcgtcactcatgctgggagctgcagactggagctgttcctatttggccgtcttggaaccacagccaattaattacttctaggagtcttttaatagattcttttggatattctacaaaaacaatcataycatatgcaataaaaagttttacatcttcctttccaatcggtatactttttaaattttttttcttgccttgttgcactagctgggaattgcagtatgatgttgaatcacggtggcagtagaggttgtctgtcatctttgcctygttcccagccacgggggcgagcgtccagcctcccaccattaagtatggatgagtttagcaataggtttgttgtacatgttctttatcaggttgaagaagttcccctccaagtttgctgagaaatttgtttttaatcatgaataggtgttgggaataggtgttagattttgtcaggcttttgctgccccaccaattcatatgatcatatgatttctttagcctgttgatatggtgggttacattgattgtgataaccaaaatgagtgactgaggtaggtgtcacagtcagtggaggcttattgggccatctcgaaggcgtgcccagaaaaaacacaagttacagacacatctgtggctgattttttggttctcaggaggtttagtgacaggaatacttgcatatttgtgaggttttagttagtgcccagtagatgtacgttttacacaagataaggtgaacctctgaaggaaaagggracagaggaagcagatgcctcagggagggatgaaggaagtgatgcaggatattttcttgaccccttcacaggactcgcgacaggggtgccctgtttactyggcctgccccgctcaacccctcacgggagggagcatgtgagcaaatgagcatgggaactggccagccactttggtgccagcaggagcaaactctgctcactcaggtctgctgtgctccacccatcacaggagaaagcacgcaggcaagtgagtgcaggaaccggctgctttagcaccagctggagcgaactccgtgcaggccatgtggtagcatctaggtgggggtgcctgcaaccccaaggccctagaggccatgatacagtgctgccttagctccgccatctacagacagcagcgttatccgctcagtggaccctttggctcgtcacgtggggtggctgctctccgccagtgagggcaaagagccagagtgacaacctttttgggcacccacacttggcacctcctgaattcttgtccaktgcccaagaggaatgaggtcatgcagacgattgaaggataatgaatatggagaattttattgagtgatgaaagctgctttcagtggggagaggagctggaaaggggctgagaagggcagcctgaaattaagttgcctctctgcctcatgcagccatcgtctctgaagtcaaggtgcctctcttgatgtccagctgttttttcctgacgtcyagccacttctcccctctgtcagctgagtctgagtctttgtaggcacaggatggggccgagctgtaggtagttttggaaaagacaacattcgattggtaaaaagacattcagaaagaaccaattgggagagagcgggcacacacgtttggaagttctcactttgggctgtgggtttcaggcttcctgctcaaaggtggggttttgccagggacctgtccctgtctgcctagaatttctctgcctcctgtccctatcattgtatcagaataattaatctcatcttgtctttgttctgtacatgggaagataagctagtaatcgacattatcagtgtggagtcttttggagagccggtttctgtttatctcctagggaagaaagcctaatggaggttaatgagatggggtatattgaagggtttgttactggtgggaggtatccaaaagttaccagtggccaattcatgcgggtctgcagcaatctcatttcttgcctcctcagaagaaagaatttgactgatgggcgtaaggaagaaaaagagaccgaggcaagtttcagagaagtagtggaagatttttcaaaaaagctgtagaacaagaaagaaagtatgcttgggaaagacccaagcgggcatgtgaagggtaagtgcagtgtttaaccatgatcctaggactttataggctgacccacttccagtgtcttgcacacttttcccatgattctccttagggtgggctacctgcatgtacagtgccctccttacacttgggaagtgagcacgagcagtgtgtttaggaagttgtatgcacgtccatctgaggcttttttcccttttcttgtggagtgcccctggaaggtcatactctgccattttgtctcttaatgcatgtgcccrgctcactcgtccaatacctgagattttgttggaagccctttttgcttctccctggtgccttcattcaattaacactttagtgtaacaggtgtgggccatcaggaaatggcctctctctggcccctgctgccaatttatcacttttagaaaggtagtgtgataattgctgaaccatcacctgacatctctagtgggtgggaaagagccctctcctgcccccgccatacctgtctaactactggtaacaggcgtgtgacctgaactcagcttccaaggtttcaccagggtccccttggccaagagaggtccattcagtcatttgggagattacaatttcatttttattcccagytgattcttaaatatacctttaagttgattcttagatatacctttgcatatctggattaaatcccactgggtctgggtgtatgatagtttttagacattgytggatttgacttgctaatattttgttgaggatttttactttctatgttgataagaagtattagtctgtagttttcctttcttggattatatgtagctggttttggtattagggccacttttggcctcatggaatgagttagtcttctctgcctctgttttctgaattgtattattttttccttaaatgtttggtagaattcactaatcaayctcagcctgggatctttttttgtttgtttgtttttggaaaggatattaatttttgattccatttctttaatgaataatgaatatagrgttagtaaagtcttttatttctccttgtgtgggttttggcagtttgtctttttgaggacttggtccatttcatctaagtttgataatttgtgggtgtcaacctgaaacaagctgaagcaaaattattgtaagtaaagagtttatttgggcaaagcctaaggattgcaacccaggagcatagagtcaagttgccctgaatatacacacttactagcagcagttataagtaagtggatttttaaaggcaaaattgtgggggacagggaatgaactaataaagagttgtttgtcaggaattctcactggtttacagacgtagcattgagttattggctatacgttaagctatagattgtgaattatagcattattaggttaattcatagttacttatggcaataacragcagtttcaagaggtgaatacacagctcagaggaggtgggttggtgaggggaggtggggcgtgatttcggtctcattttaatgtctctttgggcctgatggttaaaaagacttgaattcctcagataagatcttttctcacaggcatagagttaaagttattcatagtattcctttattgcttttttaatatccgtgggatcagttgttatgactcctcttttatttctaatattggtcatttgttttctctcttagtttatcttggctagagatttatgaattttattcattttttccccaaagaactaggttttggttttgttgatattttttgttttcttttcctcatgttcgttgctttctgctctgatttttattgattctttctgcttgctcctcttttctagtttcttaaggaggtaacttagcttattgagtttagatcttacttcttttctaatatgtgcattcctcctgtaaactgttgataaaagagtcaaactctgtgaaatgtttaaggaggtttattttgaaccaaatgagtgaccagggtctgaggcagtctcaagaagttctgagaacaagtgcctaaggtagttgggttacagcttggctttaaacgttttagggaggcataagacatcagtcaktatatgtagggtatacacagacattggttccacctagaaaagcaggacaattcaaagtgggggcatatgggtcataactggattaaaagattttctgattggcaattggttggaagagttattatctaaagacctggaatcmatagaaaagagtgtctgaattaagataaggggttgtggataccaaggttcttaatacatagatgaagtctcaaaggtggccgtccttagagacaatagatggcaaatgtttcctattcggacctttaaaaggtgctagactctcagttaaccgcttcaggattgagaggacctggaagcagggatctgattatgttaatagagtctttacaaatacagtttttctccaccaaaaaaaaaaaaaaatggctttgcagggtcmtttcaaaatatggcagagaaacgtgttttggggtaagatattttgatttccttctctatctgtcatgtgatgttatgccagagtcaagttggaaagtagccatttatatagggttaaataaaacccctctgatggaatttcatggtttgcagggtgtgactccccagaccccttagataggaatttggacaagaggaaaaaggtcaaagtttagtcctcaaagcactgctttgctgcatcccacagattttgttaagttgtatttttttcaattacttcaaaatatttttaaatttctttttagaagtttgaagatttttttttagaagtatgttgtttaaattccacataattgggagtggggggrgttcccggctatctttatgttaatggtttctagtatctcttttagtttgagaacataactttgcatgattttcattttttagaatttgttacagtatatttaatggcccagcatggggtctgcttgttgaatgttccatgtgaacttgagtggaatgtgtattctgctgttgttgaatggagtattctataaatgtcagttagatcaaattgattaacattgttgtttagtttaactctatccttacagacattctgcctgctgggtttatcaaggttgttgaccggagtgttgacgtctctaagagtgaatttctttcctcctttctgttctgtagttttcacctcatttattttgatcctctcgttaggtatatacgtgtttaggattgttatgtcttcttttcattcttgttattatacartgcccctctttaactcttataatcmaagaatgtttgcagtctgctttgtctgaaattaatctccagtatcacttttttttttctttttttgagacgagtctcactctgttgcccaggctggagtgcagtggcgcgacctcgggtcactgcagcctccrcctctggggttcaaatgattctcctgcctcagcctcccaaatagctgggattacaggcgtgcaccaccatgcccggctaatttttttttatatttttaggagagatggggtttcaccatgttggccagactggtctcgaactcctcaccaggtgatgtgcctgcctcggcatcccaaagtactgagattacaggcgtgagccaccgctcccagcccagtatcactttttaaaagacttcttgggagcctatttattttgcaagatttgcagtttcccttatcaactcatttgtactgttgttggattatctgtgagagtctgttaggagctgatgttaattattcatttgggagggatgagtcaggggattaatttttgtaggtggataattactaatgaatgtttttatatgatgacagtttttgttttgccagtcaactttgtacaccagataaagaatattcgtgtaagatggagtatctgtatttattgcagtgctcatttataggggtgctaattcagatctcactgtctgttacttaggatatagttaaagtgtctgttctcaacatgttagtagtaaggtagagctggcattgggagtgggaaggcatgtgtggtaccacctgatgttgaaggaaggggactgattgactatatggtaatggctactataattacatttaccactgggagaacctttgtctagagaggctaagtaattatctggaagtctctataattcttaaaaaaaaaaaaaaaaaggcttgcagtcttgctgtattgtccaggctggagtggagtagctgttcacaaatgcattacagcctcaaatacctgggctcaagtgtcctcccatctcagcctcccgagtagctggaaccacaagccgaagccactgtgtctcgccatcttgtaaatctttgttctatgctgatgccagatcaaatagtgagacatcactctacactttttttctctccaccattgatatgggggtggggaagaaaataaataccaggcaattcttctcgccattcaataacgtaagtgatttataacttgataacttagtccgaaggcattatagtgtaaataatactaatatcaacaattcatcagattttaacatttgtaatcataaataacatttatgatgctcattagtttacaaaagtgtctttacatcagaaattttatgtaatycctggtgacaatcctgtaaagtcatcttcattttagtagtggacatgggcttggttcctgaaagggaattatgtggaattatatccccaaagcatcagaacccagatcttattttttcccccactatactacactgcttctatagaacaagaggcctcaaaacattattccccatggtgtcagctggactagtttaccatatcatatttaaatggtgtgttttatgagatttttattattttattttatttttgaaacrgagtcttgctctgtcccccaggctggagtacagtggcatgatctcaactcactgcaatctccacctcctgggttcaagcaattctcatgcctcagcctcccgagtagctggaattacaggcacacaccaccgttcccggctaatttttgtatttttagtagagacagggttttgccatgttggccaggctggtctsgaactcctgacctcaagcgatccgcctgcctcagactcccaaaattctgggattacaggcgtgggccacctcacctggcttattttattttatttttctgagctggagtcttgctgtgtcacccaggttggagggcagtggcccgatctcagatcactgcaccctccgcttcccgggtttaagtgattcttctgcctcagcctcctgagtagctggaattacaggtgcccaccaccacacctggctaatttttgtatttttagtggagatggggttttgccatgttggccaggctggtctcggaactcctgatctcaggtgatccacccgccttggcctcccaaagtgctggggttacaggtatgagtaaccacacctggcctttatgagattttaaaattacactgtgcttaaactctataccctaacatcagtttttgtggattatgtagcagtgtctgtctttttacttcctaatggttaatgattgattttcaaatgaattgatttaaaatggaaacctaagtattacctaatttttttgaaaaattgtctttgtagaagctgaaacctatcaacactcttcaaaatgcaatggaatgtaccacggactgtatctcgactggcacgcaggacatgcttggaaccacataatgctggtctctttggacactgtcaaaatgtaaagggacctttacttttawacaatgctgaatccaaagtggttttggtacaaggccctcaaaaacaatggttgcatttatctgctgcccagtgtgttgcaaaggaaaggaggccattggatgctcatccaccccaaccaggagtccttcgccataagcaagggaagcaacatgtttcattcaggagggttttttcatccagtgccacagctcagggaactccggaaaaaaargaagagcctgatcctttgcaagacaaatctattagtctttatcaacgattcaagaagacatttagacagtatggaaaagttctgattccagtgcatctaataacttctggtgtttggtttggaacattttattatgcagccttgaagtaagtttttgcttagttgaatgtctttccctgtcttaccagaatattaatctttttaattgtactaatgatagctttagatttttaaatgctttaatgtttttcatcaatagaggataactgttttttcacattttaataataatagctaacatttgcttactgtttggagcaagcatctggtgcagtttttaactgtttcatcttatttaatcctcccagcaaccatataaagcaagttacacagttacacccattttatgaatgagaaaacagattaggcaaggagaagtaaaaatagttcagcttttcccaaaataactcagttgctaagaagtggtgcctggactaaaaacccaattaggtgcgtctgatctcaaagcatacactctcctatatgcagatctcatcctggcattcaggaaagcacagacataaaataatcaaatttcagaaatttggcagcaccatgactccataattatatatttcttagaatgttcataaatgtgaaaagatgtctattttgccatatgtatggttttggtgggaaatttgcaagattttgccaaagtccggctaatttgtttgcattgatattacccaagtccagtaagtgtcaaggaaaggtcttttgttctgatcagaaattaatctagtaggtctagcctmccagtgttttgaaacatacaatttaaagtgcatctctcttgttaatactatgccttccccttaaggtaagttatttgcttcacactgctttaggckyaggaggaccagtgatttcccatttctgccactagtcggccgagtgcccattcctcagtgtccgggcctggtgtgcgtgaaggacttagacacttcagtaaactctcctaattggttgagaattattttatactttccagagttgagtggttttcagtgcttgattatatttaatggcttgatatcaagacattaacaaaatatggttagtgttgtacgtaaagctcactctttagaagcagcctattgcagactaagctataagtagctcttccaggatgatggaatagaaactacctatttttgggaacacaggaccacatagrtttcttgacaaaatttctaaaaggattttttttcaccttgtgtaattgatgctgttctrtttcactttgtatctttacattatgttcctcttatttaattatatccttcttcattgcatatccttttctttaagaattgtatctttccttgcagaagattctttaggtgtatattttatggaattgtttcttggtttattaatgacatttttggacatgattaatatttatagaagtcttcaaaactgcccttggttttttgacagaaaataaagttaccattttgatcaaaagttattgtaggcattcagtcctgctatgtaatgaatggatttctacatattaaattttcttttttgagtcatggaggatttttgtgattcagtctgtgaaagatgacatgaaaaatacatatgtgtttcttttgccctcgtcaggttgcccatgtatgataaggcaaggcattcggcctcctggctggccttagagggagaaattcaagcttttaattaattgaatatgagattctcatttaggctattaagaataatatttttgttccttttacttttccttattctctggtaaaagttctgtaactgaaaaagtagacccagaataatctagtgatcttaataatgcttaagatttcttcagtgctgtgggcatctgaagcagctgtgggtgatgctctgtcatcccctgtaaaatgcaactttcttagttttattttcctccctcttttttgcagaatgcttatatgtaaacatggtgatacaactgtctactttaaaataatacccttccccattacaccttgctttggggctatttgttagcataggaatcgggttgctagaccaccactactgccccgccacgaccactgggtcaattctgtcatagcatcacgtagagaatttataatgggcaggatgggttgctttccagaacagtcctccttggggtttttattagatccttcaaaatttgaaagtcaatttattctatatgaagatcttaatcacaagtaatgcttaaaaaaatcaaattcatgaatgaaagaaaaaggaattcgaatattttcactgtaggatgattgtatttaaaagttgaagttgattatactaaatacagattgtcaattcacctgacaagaggctagttatattttagtgttgttcgtttgtttgttttaactggaaaaagttctgtgttatttgcttgttgcctacttactattaaaagaaagggagaaaaatagtttgtagctggaaagawgggcatttgacatcatgcctcattactgaccagtgtttgtcttggttaccctgatagctcgcattactgcctttctaggcatcgtagagcaaaatgtcattctatatttagaatgacagagtgatgaagttctcaggtttttgaaatactttatttcagggagttctaaattgtgcatgctaatagattttattttaaactgagctttgttgccgctcctatctggcaaagccttgcagagatctggtgtcttatgtccagaagtgctttagtttgatcaagtgtggctcagcaatgatgatgtggtccctgcatttagatgccttgtgtttgagacctcaagttcctaaagttacagatccactgtgaggcaaaaccctgattgatttctactgcactttatccagacagtgaatgtgcttttgtccttgtgtgtttcttcatctgtggaaacagttgtaaagctggcagtttgagaagcacagattcctggctggctgtgggcacttcagagtagaaagtgacaaacagtagatgtttctgtttgaatcagaccctcattaatacttcatgttcagtaattccagaggaaatgaaagttatttttaagaaaagtcatcaacagtttagaaataagtggggccgggcacagtggctcacgcctgtaatcccagcactttgggaggctgaggcaggcggatcgtctgaggtcaggagttcgagaccagcctaacyaacatggagaaaccccatctctactaaaaatacaaaaattagccaggcatggtggtgcattacactacagaattrcagagcctgtaatcccagctacttgggaggctgaggcaggagaatcgcttgaacccmggaggcagaggttgccatgagccgagatytcaccattgcactccagcctggagcgaaactccatctaaaaaaaaaaaaatattggaactagatgcttgcttctttatctgacaaaggatgcaggccagtgacaatacagcttgtgcttggagtctcagtccattgtttgtatgatcttttattttttaattttttatagagacaagtcttgacaccacgcctggcctaaaccttatcttaatgagatttagttgttatctagaaagagatttgaaaaagaattgaaactgaagatagaagatagaagaaatgagattggactcgtagtttattttttaattcatctctttaaacttcccttaagttgttctggtttcctctgacttytgatgataagtaattttaatagtcctttcttgaggatgatcagccatatctaccgagggtgctccctgactgcttagtattatggtgaagtcacagagtaggacatcttttccctaattaatattaaaaattaagagtttacygctaccgttatcataatagatctaggcaatgctctttcttaatgacatagggaaagctgcttttacagtggaggtctaccgaccctgccttcaccaagaggcaaactcagtaatactaataagggaggagaccacccctcgtattgtcttatgcccaatttctgcctccaaagaaagaagtaaaaactaaaaggcagaaatgaagtccacaagcagacagcccggcgccacaccctgggcctggtagttaaagatcgaacctaatctgttatctgtaaattacagacattgtatggaaaagcactgtgaaaatccctgttctgttctgttgtgttgtgttctgttctgttctgattactggtgcatgcagcccccagtcacgtaccccctgcttactcagtcgatcacgaccctctcacgcggacccccttagagttgtaagcccttaagcgggacaggggccgggcgtgatggctcacgcctgtaatcccagcactttgggaggccgaggtgggcggatcacaaggtcaggagatccagaccatcctggctaacatggtgaaaccctgtctctactaaaaacacaaaaaattagccgggcgtggtggcgggcacctgtagtcccagctactcgggaggctgaggcaggagaatggcgtgaactcgggaggtggaacttgcagtaagccgagattgcgccactgcactccagcctgggcgacagagcgagactctgtctcaaaaagaaaaaaaaaaaaaaaatagagggacaggaattgctcactcagggagctcagttttttgagacatgagtcttgccgatgctcccagccaaatagagcccttccttctttaactcagtgtctgcggggttttgtctgcagctcgtcctgctgcactaaggatggacagactggctttatgtgtcccttgttgtgatgtgctgaggtggacagtgtccattctgtcgttttcctgtgcgaaagtacttaacgtgaatctcctcttgaggaaacaatcagacaaacccaagttragagatgtccttccaagtagccagcctgcatgytgccctcctccaccatagaatgctgagaagcacttctagagaaaagcagactagagagacaggaaaaatagccataaaggacatactgggacaatttaggaaactgtaatctagattatatattaactgtagactattgtgtatgttataaatgtgatgcttatgtaggtgaatgtcttcgttctgatttaggggcgaagggtcacagtgtccaaagagagcaagagccatcatggcaaaatgttaataatcaggaaacgaaatmaagaagccagggctcaggaatgttaataatcaggaaactggaaataaagaggtcaggggctcaggamtgttaataatcaggaaactggaaataaagaagccagggctcaggagtgttaataatsaggaaactggaaataaagaggtcaggggctcaggaatgttaataatcaggaaactggaaataaagaagccagggctcaggaatgttaataatcaggaaactggaaataaagaagccggggctcaggaatgttaataatcaggaaactggaaataaagaagccagggctcaggaatgttaataatcaggaaactggaaataagtcacggctcaggaatgttaataatccaggaaactggaaataaagaagtcggggctcaggaatgttaataatcaggaaactggaaatmaagaagccagggctcaggaatgttaataatcaggaaactggaaatgaagtcggggctcaggaatgttaataatcagaaaactggaaataaagtcggggctcaggaatgttaataatcaggaaactggaaatcaagaagctagggctcaggaatgttaataatcaggaaactggaaatgaagtcggggctcaggaatgttaataatcaggaaactggaaatcaagaagctagggctcaggaatgttaataatcaggaaactggaaataaagtcggggctcaggaatgttaataatcaggaaacaggaaataaagaagccagggctcaggaatgttaataatcaggaaactggaaataaagtcggggctcaggaatgttaataatcaggaaactggaaatcaagaagctagggctcaggaatgttaataatcaggaaactggaaataaagtcggggctcaggaatgttaataatcaggaaacaggaaataaagaagccagggctcaggaatgttaataatcaggaaactggaaataaagaagcctgggctcaggaatgttaataatcaggaaactggaaataaagaagccaggctcaggaattataataatcaggaaactggaaataaagaagccagggctcaggaatgttaataatcaggaaactggaaatgaagtcggggctcaggaatgttaatagtcaggaaactggaaataaagargtcggggctcaggaatgttaataatcaggaaactggaaatgaagccagggctcaggaatgttaataatcaggaaactggaaataaagaagccagggctcaggaatgttaataatcaggaaacmggaaataaagaagccrgggctcaggaatgttaataatcaggaaactggaaatgaagtcrsggctcaggaatgttaataatcaggaaactggaaataagtcggggctcaggaatgttaataatcaggaaactggaaataagtcgcggctcaggaatgttaataatcaggaaactggaaataaagaagtcgggtctcaggaatgttaataatcaggaaactggaaataagtcacggctcaggaatgttaataatcaggaaactggaaataaagaagtcggggctcaggaatgttaataatcaggaaactggaaatcaagaagccggggcttaggaatgttaataatcaggaaaytggaaataaagaagtcggggttcagraatgttaataatcmggaaactggaaatgaagtcggggctcaggaatgttaataatcaggaaactggaaatgaagtcggggctcaggaatgttaataatcaggaaactggaaatgaagycggggttcaggaatgttaataatcaggaaactggaaataaagaagtcggggctcaggaatgttaataatcaggaaactggaaatgaagtcggggctcaggaatgttaataatcaggaaactggaaataaagaagtcggggctcaggaatgttaataatcaggaaactggaaataggtcaggggctcaggaaggttaatmaggaaactggaaataagtcatggctcaagacttaataatcagaaaattggaaataaagaagtcggggctcaggaatgtaactggaaataagccagggctcaggaatgttaataatcaggaaactggaaataaaagaagtcgggtctcaggaatgttaataatcaggaagctggaaacgragaagttgcggctcaagttggagactttctctgccttctctcctgtctccagaaatttgtcgcggtatrtgttaattgctccttcacctgccttaagtcttttaatagaatagaagcatccttttagagtaattgaagttttcatcaaacccatagtgtcgtttattctttgcataataacagactaaagtgatgttaaaatatctcttgcttttacagtgcaattttacacataaaattacatgtaattggctgggcactgtggctcatgcctgtaattccagcactttggaaggctgcggcgggcagatcatgaggtcaggagatggacaccatcctggcctacatgatgaagccccatgtctactaaaaatacaaaaattagctaggcgtggtggttgcgtgtctgtaatcccagctactcaggaggctgaggcaggagaatcgcttgaaccagggagtcagaggttgcagtgagccaagattgcgccactgcactccagcctggcaacagaacaagattctgtctcaaaacagaacagaacaaactaacaaaccatgtaattttaaaggtaaaaattttaggtcttaaaatgtgagttggagcattctaaggaagtggtatttggttgaggaaactaagaccaggcaaatgattctgatccttttctcatagtttatttaaagctgttaattttattctaataactgcctctatttttctaaacatactaggatgcccacatgaagcaaatagaagttgtaggcgataagataccgtgtgatgtgatgtttgtgtgcatgttgcatattgtacatcaagtaagatgttctcttagagtgaaggtaaagtgcttgataatgtagaatcaacttttaagcaaaatttaataaaattatagtgtggttttggtattttcagataatttttgaaaatatcattaaaagtttgtacatatgaaaattacttttttttttttgtagaggagtgaatgtcgttccttttctaraactcattgggttacctgacagtgtggtaagcatcctgaaaaactcccagagtggaaatgccctcacagcatatgccttgtttaaggtgggtactgtaacaaacccattgctcctcagaactcactggtggtgacctgctcactttcccatgagattccatgttagcttccaattgtatttcgtaacttgaaacgctgtatttcatctctgatatgtctggtgaataatgtaagataatttttttttttttttttttggagatggagtttcgctcttgtttgccaggctggagtgcagtgatgccatctcggctcactgcaacctccgcctcccaggttaaagtgattctcctacctcagcctcccgagtagctgggagataacaagataacaaaataaagtggaagtaaaaatgtggttttaggaagaaatgccttaaaaattggtagatcattcataacttcctgtggtcarataattgttagacttatgtgattttccatggtagtagtcatctgtttgacattgctcccgttgataaatggagatataattattttaagtataattatatttgttttttcttattcagtgatctgcatgccacctgatttgttagcaaaatttagcatttattttactgttttttgttttgttttgtgtgtggttttaaggagcagagagtttaataggcaagaaggggcaagaaggaagggagaaggaagaagctcccctgtacagagacagaaggggggggcctccaaagccaaaagaggagatccccctattttactgtttttaataattcatcttttcttagcaagtaaaataggtttaatccaaattgtcttatatgataaacccttttctgttagattttaacctaacatatgtttcattttaaaagttgataatctttgtaactattctccggattcagacaacttttttgagacggagtttcactcttgtttcccaggcwggagtacaatggcgcgatctcggctcaccgcaacctctgcctcccgggttcaagcaattctcctgctttagcctcccaagtagctgggattacaggcatgtgccaccatgcctggctaattttgtatttttttagtagagacggggtttctccatgttggtcaggctggtctcaaacttctgacctcaggtgatctgcccgccctcggcctctcaaagtgctgggattacagatgagacccactgcagccggcctgacagcatcatcttgatagcttctatgcctatgggtctttattttggaagggaagactcactgtaaattgtggagtttagccatattaatctcattttctaaactgacaaatatttatgagggtctgtgaaacttctacctaaggaagttgaaaacacagaaactagatgttttattttacttctgttgtataagaatatctaagaatyacagttttacagcattactcaaaagtagcattgtttcattctgtcatcctcattagcatcctctgaaatcttggtagatttcctcttttattataattttgatgagagggctaacatttaatttttgagtttttctacattaaagtgtattaaatttaaaaattatcaagtttctaattatggtgggtataattttaacccgagtaagtcaaactatcatgctgatgtaaaccttccctaatttrattgctccttatcccactcccatagcatgacagttgatagcacagtgtgtgctaggtgttaagtgtttgttttatttgattaggagctcccaggaactcagaatcatgtcttctttcttgttttttttcactgcacctggtattatgttctgtaggtgaataaaatgctcagcacgtgtttgtggagttgggattgaaaatgaggctgtaggcgtcatggtagggagatgagtgccagtggtgtttcttccccctcactattcctctgtgaagtaggagatatggaggggattctcctttgtattatctgtaacccccagtttctcaaatagagcaacagacacagatttattgcttcaacaagacaaagtccccaaatgaagtatggcatgtatggtctggtggcagttggctacgggatatattcactgactgcctcataatctctttgaaatacacccagagttttagtcatcctctgctgtgtgctaggtaccattctaggtactgggaataaacgaatcaaagaagacagtgcaaaatacctgcctcatagggctgatagtgtagtgagtggtagtgggttggggagacaaggtaaagttagaaatgcatgcacacacaaagtgtgtgtacgtagatgatggtaactgctaagaaaggaaaccagggatgggggtatggatttgtttttcaatgggagatggcacaccttgctgagaaggtgagagagttgctcctccaagagggaggagcattccaaacagagaaaatccgaaagacaaagttctgaggctgcaggatcctgggagtatttgagggatgcagggaagctagtgtgaccggaatcagtgaacagggcagagaatggcgtgtcatcagatcaggacagccttgttggcccttaaaaggactttgctttttaccctgaggacatggaaagccactggacaattttaagcatcctgcctctgttccatcaaaatcactttggctgctctagtaacagaccatggcgggatcaggggagaagccaagggacctggtgtgaggtgaggtgattacagtattttagttgagaggcaatagtggccagaacccaggtggtagcaggaagtagttggattctcgatacgttttaaagacgtggttgctggggttttctgatggtttggatataaattatggaaaagaaagaggggttgaagctttcttgtaagtttttggcccggacaactggaagaatagaattgccattttctgagatgagtaagactttgagagaagcaggtttgaagtaggacagtcgaagatccgaaggtcagttttgaacatgcagtcatgtgccacccaacagcatttcggttaaccatggactacagacagtgatggtcccataggtcccatgtttttatgaatgtcatatttttactgtaacttttctacatttagatagtttaggtatacaaatacttactgtggtcttataattgcctactgtgttcggcacagtagtgtgctgtacaggtttgtagcctaggagcaataggctataccttgtggcctgagtgtgcagagggctacaccatctaggtttgtgtaagtacactctgtgaagtttcacacaacaataaaatcacctaatgacacatttctcagaccgtatccccattaagtgactcacctgcattaagtttgagatcttattagatatgcaaatggaggtggttgtatatactggaattcaggggaaaagttcagtctggagattaaagttaagaatcatccatgtatagttggcactaaagaccagagagtgagataggtagagaaaataagaggtccagggatcgaatgttgtcacaccacgttcagaggtgggtgaaaggggaggaattggcaaaaatgagargccgccaygaactagaaggaagcccagcaagttgagggcctggagccaagtgaagggaaggtgaaagctgtgtgggatggttccagtggttcaggggctggttccaaattgacaactggatttagttttgtagaggtcactgtgactttgaaagcagttttggtgaagaggtatgggtgaaagcttgcttaacgtgagtttaggagagaaattagagatagagcagacagctctttcaaagttttgttatacaacacacctatgcattttgttttgtttcgtttgagacaggatcttgctgtttcccaggctrgagtgcagtcgtgcaatcacagctccctgcagcctcgaactcctagactcgagcagtcctcctgcatcagcctcccaagtagctgggactacaggcacatgccacttactcccggctaagtatttttcttttctttttcttctttctttttctttgtgttttaagagatggcagggtctcattatgttgcccagactagtcttgaacttctgagctcaagcagccctcccgactgagcctcccaaagtgctgggattataggcgtgagccattgtacctgccaacacctatgttttttgttttgttttgttttgagaggtagcktcactcttgtcgcccaggctggagcgcaatggtacaatctcggttcgctgcaacctctgccaccgggttcaagcgattctcctgcctcagcttctcaaatatctgggattacaggtgcctgccaccacgcccggctaatttttgtacttttattagagactgggtttcaccatgttggccaggctggtcttgaactcctgaactcaggtgacccacccacctaagcctcccaaagtgctgggattacaggcatgagccactgcacccaacctgatttttgacttagaatatgatgcagcctttttacttgtatggttctctttgaccagtcatccatctgctatttagtattggtcctaaaagttccaattaacgttaaacctgtgcatgtctgcagcaggtgtgccattttactacttttggccttgtgtaaattagtggctaggatttgagactcagggtagattgtgatgagaaggtagcataggtttagaaaagtcaaaggaaagggatttggaagtgaagctaacctaaatcccaacagagagtggtttcatgctctgcctctcamcatttgaagacattcagttctagtttagctccagatagaaagcatttggcaggatggcagggcttttaaggaatagaaacatgtgttcctctgttrtttttactggtactgagtcctctttctgatttccaggttgacctgtcccccaagtttactagcatgcgattagggacatcagtgctatgattctgttatctgggtcaggattgtgtagaggacaaacattcataaaatgagtttacagaagaaatatctcttgttaggagggaaaamcatataggatattactacattagctttgtgaaacaatgaggcaatttattctgatgggttattaccaagaattttaattttaacttgtttttgcytaagatgacagtaataaccaggttttgatttgcctctgtttgctttttgcttaagattgcaacacctgctcggtataccgtgactttgggaggaacatctgtcactgtgaagtatctgcgcagtcatggctacatgtccacgccgccacccgtcaaggagtatctkcaggacaggatggaagagacaaaggagcttatcacagagaaaatggaagaaacaaaagatagactcactgaaaagttacaagaaaccaaagaaaaagtttcctttaagaaaaaagtggaataaggtgccttatatagcagtatagaaaattcctgcactttaaccctttggaaactatgggcaaagatacatgtgtctgattatttttttggttagttgccgaaatatactagttctctgagggttaaagaagtaaaatacctttttaaagttaaatatcactagaaaaatcagtgttattacaagggaagaaatgaacccagtttaagaatttgccatcagtagcagtattaagcagtggttaatgtcttagaagtcagacttctttttcaaggtcttcagaaccacacttgatttctgttttgttgcagctgtaattgacacayactaggcagctgactccttgaatatccagtgtgacccataaaatagtctgttaataccggatcttaatttttatgttattcattaagattttaactatattcagtacgtaatttggagacaaactagcatcatcaaaactgcctgtaaataaggtgtttagtctttctataaaaacagaatagagcagttacctaccagttaaaatatcttatatgaagaaaatagaataaagatccagtcatatatgtaaataagatgtactgattgtacgtaaatgaaaaatggaccctttaaaaattatttttacctgaagcttgtcataatttttttaaagcaaatatatatatggtgatggtacttttcaaagtgtgtattagtggtgatcacctcaaacataaacctctgttgtgaatcatttgtgtccttttcaactgtctttcagaggaaaggtaaaaaatcattaaacctkaaattcattgttaaaatcaaatatttgtcagcagtaactcaagctcatggttctcaagcagaaaaaggtttgggagactaaaaatggagtcaggttgtcatggagactgctaactccttggggtagacatgggccttgcctcagcaaaccagtgcaatttcccaatgtcttagtttcagaattcatgctgatttcattatggagtaaagttttaaattgtggctgctgctttttgtcttacattgaagggaaatatccttgtttgagcattctacttgattttttttttttttttttttttgagacggagcctccctctctctctcccagactggagtgcaatggtacaatctcggctcactgcatcctctgcctcccaggttcaagtgatcctcccgcctcagctttccaagtagctgggagtataagcgtgtgccaccacactcagctaatttttgtatttttagtggaggtggagtttcaccatgttagccaggctagtctccaactcctgacctcagcctcccgagtagctgggactacaggcgcccaccaccacgcccagctaatttttttgtatttttagtagagatggggtttcaccatcttaacaaagctatcattaaatcatttgcttgtaatgaaattcagccgttgtcagctgtgagcgttgcggggctggtggggtgtgtttgagtatgtaagtgtctatttcctgtgctctaacagtgactatttcagttctaacccttcaattgctaattggatgagggaatggcctcttagattgtccttgttttgacttatctgctaaggcgagagaatgtctgggtttgccacacagtcccgcagggacccctgctctttgccaggatttttatatcaagtacttagtttggccaaatttagagtatagtttaaaggggaaaaaaagtttgtatttgatgagtctaattactatattagaatgctttttaaatgaatatgctgtgattggaatctcttcttgggggccggggagagtgctgagagatgcagctgtgtctctgctctctgcagtcttgggcaggcagcaccgctgtctcctgatacagagggttgaatgcactgcttcacattgatgccacattttcaaatctaaacatgattaacatgttttttaagtatttatcaaataattcacatttttgcaggtttaagtgctgttttttaagatattaaacatgttccttgtttcttttttctttttaaccactggagactatgtgaaaatcttgtgttatatggaatttttctaaaacaatttccttttacttttcatgttgcatattttccagtggggataaattggaggttcttattactaataatcctgaaactaaaatttgcttttcctgcatagacatcttttgttagtccatttgagttttgttgccatccagtttcatgatcatgttgtgttagtctaatagacaatgagttactgcttgaatgatatgaaattctctagtaaaaaatgctctgaagatgtgagaagctctgttgtattacttggcaccaggaatgttacaaaaatgttgttgctagcatattgctaacctagtccttaagtttcagggattcctgtaatatgttgagtttggagtattaatagcaggctaacagaatacagtaccaatatgccaagttaaataattgagaatatatacagtatagtttgctatgtataatagacctcatttcatttacagtacacctcacacttgggattaattcacctataacctctgtgaactgcgagtgctcggcagaagcagccctgtgtcttacatgtctacatttatatttatatttatatttatttttttgagacagagtctcactctgtcacccaggctagagtgcagtggcatgatcatagctcacttgcgtcttgaactcctggctcaagtgatcctcccacctcagcctgctgagtagctgggactacaggtgcacaccaccatgcctggctaaaggcatgtctgcatttatgcgaggtgtgttgaccgggtggggagggagctaggactgagattcgcctgtgtaaaatgcacaaaaagggtttgctaagcaaattgatatttgaaatgaaagatggattaggtgagagacttagtttattcaggaataagagcaaaaccaaccacatcaaaaaatgtatttcactgagacagccttttgtacatacagcagggtgctgtttacagatttcaagaaaggagaaaaagaatgcttatactgagattacctacctcccagtagtgaaaataataaatttatcccttgaaatataatcgtgtgtttatttgtcacagaatctacacttacttacaaatgctttatgctcaggatgaaatggagatactggctctcttgtttcagtgatcttagatgataattccaggaattttaaagatatatatatatatatatatattttttttttttttttttttttttgagacagagtctcgctctgtcgcccaggctggagtgcagtgataacgatctcggctcactgcaagctccacctcccaggttcacgccattctcctgcctcagcctcccgagtagctgggactacaggcacccgcgaccatgcccggctaattttttgtgtttttagtagagacggtttcaccgtgttagccaggatggtctcgatctcctgacctcgtgatccgcccgcctcggcctcccaaagtgctgggattacaggcatgagccaccgcgcctggccttaaagatcttaatagtatgcgcagaaagatgtttgaagaaaagaaggaaattgtatatttgacacactgagcttctttctgtgttcttagtgttgggtttgggtcattcaggatttcttaaccaattcagacatgaatcaggctgctgtagaagatagtaattacaatggaatggacagaagatgatttttagccaatgaggcaaaaaaagtcatctttcctgctttttctgaaatgatatgttgagaagatgtttttgtgagatacacatttctgaattaaaggattccttctgaaaatataacttgttaggtaatgtggacatattttttctgttggccaaagttcattttttgaaatgggggccttcatttattttttattttcaaaattgagtttctataaggcctaaaataaaatagattaaatgtcaccaaagttgtttgtacctgtttaaatatcttttttgcaagccacttacattttttggtactgaaagctcactactcaattgtccttatgagcatggaggtgtctcagtgtgtcagatcatactggcccagatgcctgagtggcacatgtgcactcagagaagtgggagcctctttgctgcctgccttggaattcaaccacctgagccagaaatctatagaaccagaggtggggaattttacctattcattttgcagatgttaacattgttctcttttggatcatttgtatgttatgtagtattaagttagtattaaatgagattgcagaacgtactgcatcatgttccctgaggacaatgggagtcaagacctcattcttcctttctggacttgaatggtctgggggaccacacctccttcccagaattcatctgcaatcatgaattttggcctgaccttctggttcttgaaacatctttcccctgcatttggcgcttgtaacttgtctttgagaaatgctgagtcaggccaattgatgatattttccctctagaatttttcctttgtgacttttgtgtcaagtttgttcattttaagtagtcaaaacaagcttttaattgtcttgcttcttcagggttaggctttgaaaatcaagctgtattcttctttatgcatcattgacagtcaccaacaataataattacagatcataattatcttgtggcaattatgataagaattattttcttagtagaaagaatgcatcctgatttcagaaacctccagggcagtgtataacatgaagcctgttctttgttccggtgacttgattggacagtcatagtggagagatgcacaggccgccagaggcattctcagagtatcaagtctctacagatgaagggcgcttgtggagaagcatgtttcagtgcgttttctctgggacaacatgccccataagaaaagttgaatacaattaaacacgtcctgcctgcagccaaagcagattttcactgtccttgaaagtgaggattgaacacaacctctcttccttccctctccctccctctgtccagcttcttctcttttggattttgaacaatgtaaatgttagaaaaactttgaagtgagaaagaaaaagacaaatttgccctgagcatgtcaggtacacgttctgcttgacgcttctgtgtgggcctccctgttgcagtctctaggggaggataggcacactgtctccagaaagaggacagtgaacttccagctgcatttgactgatactaggccatttttagttcttagagaaacaacattaaaacctaaacttcatcctttttattttgataaaacgaacttcccctcattttttaatcaaatacatggcaaaggtcagccttatcctctattttgatagttccgtaaaggctattctaagcatgtgataagaaatgatggcaattctggatcttctgttataccaattagatgtttaactctaaaacctgtgattttttttttttaatgaacacatggcattttctcatacacgtgtatttcagccttaccgtctgtgctcctctttgtacaagatttgtgactttataatggctgaagcatattttgactagtgtgtattttattccatttgagtcagtattttctttggacacttaatatggtgacttaattagtgcagttgctttgcttctctaagaatagtggcgactctggttctcttatgataagggtgccaaaagtcctcacgtgctcagctgcagcctggagctggaattacagggctttgttgccatagtgttgcatcaacatgcacttcttatcctctcattattcaagaagatgcaggatacagtgggtcgcagtttgcattcctcacttcttttggtcccgaaataaaagtctcatattccaacaaaaagttgagaatattattgaacaaatatgtccacaaaacctaatgcaatttttgttgagaaacattcattaattgcatttcaaacacattttagattaatagttttttgcaacataaaccctacgcctatagaaccaatgaatttgacatttcatgggtcacattagaaccaatatttttagttgaagaaagaaatacaaaagaattggatttaaaattgggatctcaacttccagtttagtgctttcctttggtgccaattattcaggtaagaggccaggctttggggcttctgaaatcccttgtatttttggagacagaagctcaagtcaatttattataaatattcctttccttcctcctctgctggtgctttcatcttctttgcctttcagcttcttttagatctcttttcatctttttgtccttaaagtgataggatgggacgatagtcacttctgtgacctcagtttctgactgcaggaaggaaacgtgtatttattaaaatttctcatgctccagcttcattttctccttcacctgggatggactatgagatgggagacttatgtgagccagttcagtgatgtctgtcactttctgggtgggcttggtgttggcaaagccattaggtagctatttccatatataaattacatatatatatatatatatattttttttttttttttttgagatggagtcttgctctgtcgcccaggctggagtgtagtggtgcgatctcagctcactgcaacctccgcctcccaggttcaagcagttctctgcctcagcctcccaagtagctgggattacaggtgcctgccatcgtgcctggctaatttttgtatttttagtaaagacggggt

SEQ ID NO: 98078 - DNA, 13363 bp, Homo sapiens
tctgcaacattggtttgggtctgttccatgcacgtgctattcaggagacttgtgcaggtggttcagatttcatttaagttcccgaagccttggctatacatctttgattgtgcctcatgcatgcatatctcaaggtttagtctaaaattagttctggttaatacacagaagtaggagaaccctttcctgtctttcttccctgtagaatttctccccaaattctctgacccactgaagctcccttctctggtttctctggccaaaaacaaacaaacaaacaaaaagttaaatttatatcagtttcagctacatgtgccacgtgcaactcaatggctgaggcctgccctcagggtaagactgtgagagaaaagataaacaggaaaccccacttccaaacatttcacttctccaagctgtgattcccctccaaaatcctgtgctttcatttagtttttggagtcctcacgttgctgtttattttgttttcagtttctagttgtcaatggcaggtgagacagctggggtgggcttacaccaccacagcagtagcaggatgctcctccctccttatttgtttgctaagatatcaggaaggctcagccaggaaataaaagaaccacttcagttttttcaaacgcaaggatatcattataagcaaattgggttttcaggtgatggaaggtctgagaggctaaaaagagacagcaaatcaacacagagattgacaacagctggaagctgccaccaaccctcatgctagagggacaatggaagattttgttattagaggccagatgtcaggctctctggcaggagctagaacactggaatacgcactggtgggaccaaggtgggaggaactcagttaggcttggagctaccgagaagacaattcacaaccagagatgctataagaggcatctgactaggggtagaatatcctggcttctcccatcattctcgtcttccagtctaccaccagtaactcccattaagcaaacctatctggaagctagagtgcaagacagccagagaaatgagtttccctaatttagagagcaaagcaggaaaaggcaggtgctatggtttgcatgtctcccatctaaaattcaggtgttgccaatatgctaatattaagaggcaaggcctttaagaggtgatagggccatgaagattcctcccttatgaatgggattaagtctcttacaaaagaggcctcagacactcttcaccccttttgactttctgccccacagtttaccatcagaggacacagcagcaaggtgccatcctagaagcagagagcagacccttaccagacaaccaaccagctggtgccatgatcttggacttctcggcctccagaactgtgagaaataaatttctatattctataaattacccattctgtagtgtcttgtaatagtagcacaaatagactaagactgtaagaaaatggatttgggtcaaacaagcatttgagtggcgcattaaagaattctcaaataaacccgatattttttgcccataaatagtagtactttacatcttaagatgcattttaaaaaacgaaaatttagataaaacaacaaatagcgtcagttttctacatggctaatatctggcagaaatctaggaatggctaacatttgaaatgattatttcttaagatgcgatctgtgttctctaactccaattcttggtatgagagagagaggagccatccattgttctttccacattttgatttccaactgagatcaaaacacattgatcaaagccaggaaccaagagccaaaggtgaaagaatccacaaactcagatacatgaggacatactgagtaagatggagaaaatgggttcctcttcctatataaaaagccagtctgacaatctaagagttgcactttacaaggaaatgagctcatacttcaacattataacacctgatagagtgttgatttattttaacccatagagatttaataggaaaatagtttaggacagctgtcaatacataccctctagcatgcctcagatcattttctctaaaggaaaatatatcttgggttcttagaagaaaattcaaaataaatttgtcaataaaaaaatcttctaaacacttccttttgtcatacgcaacctaaaatattttgtggttctattttcatgagatatttaaattcaaatttttcttatttataatataatcatttgcatgtaagcaacatcaaaaactattttttaaagcaggttttgtacaggttatttcaacaagaactcaatttttcttgataaaaaaatgaaaatttaaaatgccacggaaaatttaaaatgccacggaaatttttgtgttttcattatatcctttccatatcctccaatgcaaatgttataaatcagcctataagtggaggtctgttcttaaactaacatctcatttgtttgagctaaaagccaaatactttaactcatttacccatgaaaatttttgtttcacatgtaaagtaaaacaaacacaggggcaaacctttataacatttattatagaggagaaagagagtaggatagttaagaatatatttcttctgagagagatttcatctgtgtagtttttagaccagtcaactgctgcataaagtttccaaatatgccagtgcttctcaaagtccccagtctcagtgaaggcaacataggttcacatatggggcagtcccatggtcagtccctgatttggccaggaagtggcataatgggagctagttctccattaactagttctaacttcaccttttatcacaactgagcccccacgacccaaagaacagcctggatgagaagtatgtgatagtttcttcttaaagaatatatttccccttagacaaaaaaaaaaaaaaagttataatgttcaaactgaaaacaatacatgtatcccttttcagctatgtgtggcatatatacacctgggtaagcataaatagtgtagaaagcactcctagctgacattttaacattcccaggaaagtacataaacttgcttccgtgccttctcggaaataggatggccaatatagtgctttgtacaggttcatttttcagttttatcacacataggaaatggccttaccactgaaaaatactctttggatgtaaaactatccaaaaaacaattcatgctattcacaaatgagaaaagtgtggaggtcaatagttaagctgcaattgctccattaaagttttctcaaccgcacacagacaagtgtggagggagagaaggaggaagagggatggagggaaagggaaaaaaaggagaaagagctacaggagagatggaggaagagacaggatttaaaccatgtatgcctttgtccttgcaatcttagttctattttatgttgatatctcctacagctaattatgttacttctgtttcacatggatctcatatagaaaatgcacaagtgtttaagaacagaatataatgatgaaggaatatcaataagtatattttttgcattggttatattagtcaaacatggcattacaaaaggagtgtctaatcttccccagataccattataaggtaaagttcttacatattattatcagcatcagtaaaatttgataaatttctatttgactgacagaaatacagatttatctttgttccatgccactcctgatagacatttacctccaccttggaagaatacaaaggactccacttaaaaggcaaatcaagccaaaccttataaagacaagccacagacttcaggttacatgttttgagttctgcacaaaatatttgaatgggtgcttcataaaagatgatatatgaggacttggggcagaacaagatggcagaatagaaggctccgccaattgtccctgcttcaaggacaccaatttaacaactaactacataaaatagcacctttataagaaccaaaaatcaggtgagtacctggctttaacttcgtattactaaaagaggcactgaagaggcaggaaaaaccgtcttgaattgctgacatcacacctcctctctcccgcagcagcagtggcatggtgcagagaacatttttgtgtgctggggagaaggagatcacagtatttgtgaggcattgaactcagtgctgccttattataacagaaaacaaaattggaccaatctattcatgaattggaaaaatcaatattgctaaaatgtccatactacccaaagcaatctacagatttaatgcaatccctatcaaaatgccaatgacattattcacagaaatagaaaaacactctaaaacgtatgtggaaccacaaaacacccagaatagccaaagctatactaagcaaaaaaaaaaaacaacaaaaaaaaactgtaggaatcacttacctgactataaattacactacacagctaaggtaaccaaaaaggcatggtacccacataaataaaaacagacacatagatcactgaaactgaatagaggatccagaggtaaatccatacatacatctacagtgaactcatttttgacgaagtagccatgaacatacattgtggaaaggacaatctctccaataaatgatgccgggcaagctggacatctatatgcaaaagaacaaaactagattcctatctctgaacagatacaaaaatcaaatcaaaatggattaaagattgaaatataagatctcaaatgatgtaactactacatgaaaacattagggaatctccccagaacattggcctgggcaaaggtttcttaagtaataaacacttcacaagcacaggcaacccaaaacaaaaattgacaaatgggatcataccaagttccaaagcttctgcacagcaaaaaaaaaataataataataattaacaaagataaaagccacagaacaggagaaaatactaatttatattcccatcttgcaaactacccatctgacaaaaggttaataaccagaatacataaggagctcaaacaacagtgtaggaaaaacatctagtaatccttttttaaaaaaaatgggcaaaaaatctgaatagacatttctcgaaagaagacaggtatatgaaaaggtgctcaacatcattgctcatcagagaaatgcaaatcaaaactgcaataagatattatctcaccccaggtagaatggcttttatctaatgtctggcaataacaaatgctgacgaggatggagagaaaaggaaagcctcgtacattgttagtgggaatataaattagtacaaccactgtggagaacagtttggaggttcccaaaaaactaaaaatagagccactgtactatccagcaatcctgctgctgggtatataccccaaataaaagaaatcgacatatcaaagaatagttgtagcactgttcacaatagccaaaatttggaagcaatgtaagtgttcatcaacagatgaatgaataaagaaaatgtggttcatatacacaatggagcactaatcagccataaagaagaatgagattctgttttttgcaacaaaatggatggaactggaggtcattttgttaagtgaactaagctagacagagaaggacaaaccttaaatgttctcactgatttgtggaaggtaaaaaggaaagtagttgaactcatggagataagagtagaaggatggttaacagagattgggaagggtagtcagggagtgtgggggaagtagcgatggttaatcagcacaaaaacattgttagaaagaatgaataagacctagtatttgctagcacaaccgtgtgactatagtcaaaaataatttgattgtacattttaaaataactaaaatagcacaattggatcatttgtaacacaaaagatcaatacctgaggtgataggtaccccaattactccgatgtgactattatgcattgcatgcctgttttgaaatatctcctgtatttccttcctgtgcgaggccagctgagggcacttgctcccgttgtttctgctcctgggttaacaatcaagatggtacatgctgatgccttttctcatcctttgagtcacaatgaagttgttggtttaattttccatttgacaatatttggttcagtaacatactttagtatcaaatggatggtagatgcaattgatccaatcagaaagcaaaaagcagaagctcagaaacaggcagaaaaactaatgaagctaattggtgtgaaaaacgtgaagctctcagaatatgaaatgagtgttgctgcccaccagtagaccatcttttcttttcttttcttttyttttttgagacagagtcttgctctgtcaccaggctggagtgcaatggcatgatctcggctcactgcaacctctgcctcccgggttcaagcgattctcctgcctcagcctcctgagtagctgggattacagatgtgcgccactacgcccagctaatttttgtatttttgtagagatggggtttcaccatgttgggcaggatggtcttgatctcttgacctcgtgatccacccgcctcagcctcccaaagtgctgggattacaggcatagagccaccgcgcccagcctagtagaccctcttaatatgcatgttacttggaagtgatatagcaggtttagatgaggtcattacggatctgaaagacagtcatcttacctatcaaaaagaaacatttgtttgagaattccaggcttctgcagcctccaaaaggtgttcttctctatgagcctccccaggctgtggtaaaacgttgattgccaaggccacagccaaagaagcaggctgtcgatttattaaccttgagccttcgacactgaccaataagtggtatggagaatctcaaacactggctgctgctgtcttctcccttgccataaagctacaactgtccatcatcattatagacgaaatagactcctttgtacgaaaccgttcagagttctgaccatgaagctacagccataatgaaagctcagtttatgagtctctgggatggactggacactgatcaccgctgccaggtcatagtaatgggagctaccattcatcctcaggacattgacacggctataacgagaagaattcctacaagatttcacatcaaccagcctgctttaaaacagaaagaagcaatcctgaaactcatcttgaaaaatgaaaatgtggataggcatgtagacctgctagaagttgcccaggaaactgatgcgttttcaggaagggacctaaatgcgatgtgttgagatgctgccctcctctgtgttagagaatgttaattctacatcagaagaaagccatgatgaagatgaaattcggcctgttcaacagcaggacctgcatcgggcaattgaaaagattaagaaatcgaaggatgcagcattgaaaaaattaagaaatcaaaggatgcagcatttcagaatgttttaacacaggtttgtttagattaagagtgaagatcatttgcacagttcactgatctagtttggtgtgtcctcttatccgttagtggaagtagaatggaaagagtgctctttaaacaatgagggagttcagtgtttatggttttgtactctgaattctaagttgttgagatacagttgttatataagtggcattactgtttgtcagaaatcatgaggaggaacaatttaatccagcatgaacgtgggtgcttgtgtttgagctctttagccatatgtcgtacagccttatagaatctaagctgctcttacagtcatgaatgattcattgggtcattagtgagaaatagggatgtggttaggcactgtttccttgacatgtgagtatgtgtttgtgtgtgtgcacatatgtgtgtatattaaatgtatatatccacacattttatatggacattctgtagatatgtttgaatacagaaattttttttatcctaactactgaatccagaagtaccgaataatatacagtaaaactaagatttaagattgtgtcaaaaaggtacagtgattcaaccatttccatttgtcatttgtttcaaccttttttaagttgagtgtttttctttctgcagttgattaattggatcctccaccttgcatatatacatcttgcatatatatacacgggctcaattattagatttgtcaggataatcaaataaaaataccaggtcagtgatcagcattgaatggttgttagacagtcatgtcagtcaacactgatttcacctctttctgtaagcatactgagtaaaaactttttttcagtttaaattgatttacgtgaaagtggattaaaaggcctttcaaaagaatgggtttgaaaaacctcagtccgctttaatacacgtacatttctttcctttcttcatttaatgtaacatatgtctgttgtaactacgtttcttaaatattattttaaggttatatgttctttaattatgctccaacataatttggtcaccaaaaatgaaataatagtttaaaacaagtagctgttactaagtgtgctaaaaatactcattttgtaattaatttttaaagttttcttagtatattataaattgttccctggtcaagtacaaacgtacacatcaaaatgcccatattgtgtctatcatttgatgtgaattatatgtgaaatttttcttgttcaaaattttactaaccagaattctgttacaggcacttaaacacgcagcatgaggaaaatggaacaacaatcttgaggtgccttctgaatcatcagattaaattatgcttcgtatgttttgttttactgtatttctttaaaaactctcaatctttattcatgtgttactggattaatttatttgataatgtctcacaagaatctattagatcatttattcttcagttgtgctttgaatggtggggtggaagtttcaggtgaacactgtggataacaaaagcaagttgtggaagactgtgaagaggatggaataattgaatacaagaaaaaaatgaaaaaaattgtcccatttttaataactatattacactattattttataaatgtgtaacaaaggggtccctctttaaaaaaaagaaatatctcacgtaacccataatacatacactgactttgtacccacaaaaattaaaaaatagctccttaataaataaataaataaaagaattcctcatctgtcacctactacccaccaaaattttcaataagtacaactatttgtttggtgaatgaaatagtaatattttccctttgaaccaggtgttttaatgctgtgagctgctaaagatggaaatcagcaaagaaggaaacaagctaggccactactcactccttctccttagcccatgkagatatattccacaaagccagctattgattgctaccattagtcggccaggcaaaccagcaataattgctttagcaattttgttcatgaacatttcctgttaatttcccaggagtaaaaccagctcctccccctcttttaacaaaaagtcagagagcaggtggaaattatcatactcataaatgttacaaaagtattatttacttggtttggggtagtgaagaatgcaaagcaaaagatgaagtatttcaagtttttaaaagatttgaatcaaccacatgtatcagtaagtaaagcaaagaccaaaattaaaaagtatatttgattttttatttatggaaactcttcaccattccacttaaaaataagtaatatcccttcagggtttggtacatttcaagatgtctaactttctaattatttagacaaaaaaacaatggtttagctcactaattttcactgcttcttatatcccaaatctttttttttttttttctgagtgggagagaattttcctttgttctgaagtacatcctttcaaacatcatttagtggtggtctcatgtgatcggcttcttggttttgtctgcctaaatatgtctattattttataaatgtgtttataaattaaatgtttaattttctgtgtcaacttggctaggtcatgacacccagatatttggccaaacacatctggatattgctgagaagtgatttttttagatgagattaacatttaaatcagtggactttgagtaaagcagattactctccataatatgggtggccttatccagtcagtcgaaggccttaacccgtttatgccagaggttgcaaattttttgtgtgaaaaatcagaccttggcaatgaccttgagcagtaggatataaataaatcccacaagcttagcgttccaatagtggagcactaggcataaatgccttaaagaaaggactgatctcccctgaagaagagagaattctgcctctagattgcttacaatttgaactggaacatcagctgttctctaggtcttaagtctgctgctctaacctacaaattttggacatgccaatctccacagtcacatgggccaattccttagtttctctggagaatcctgactaatgtatgcaatgtctttatttcatcctcattcttaaaggatattttcatcaggtatgctattttaggttgatggttattttcctagtgcattgaaggtattattttacaggtttagacttccattgtttctgttaagaaacagcagtttaattgtttttttgttttttctttgaaggtagtctgtagtttttaatgggtacttttatgaactttttttttttgcttttggtggactgtggtttcactagatgtgtgcatgggtagatctcttttttattttgctatttgagatttactgggcttgaatttgtgaattagtgtctttcaacagtcctgggatgttcttagccattgtattgtcagacattgattcttctccattttctctctcttctctttctgaaagttcaaatagatgattgttagatcccactctgtccttcctatgccttaatctctattttgttttctattagttccctcttcagctatatgtcttttttttttaattaatagatttgtttgtttgtttgtttgagacagggtcttgcactgctgcctaggctagagtgcagtggtgcaatcagggctcactgcagcctcactcaacttcccagtctcaagccatcctcctacctcagcctctgttccactaatctacttgtcaatttttccagcaacaccacaccctcctgatcaccatagctttatggtaagtctttatttatttacttattcatatatttattctattttatttgaaatcttttattaaaatataatgtacacacagaaaagtacataaatcagtgaatcttccaaaactcaatataatactatagccagcacccagatcaaggaccagaacattttaccagccccaaggatcttcctcatgtgttctctccaagtccttacctccaccaagggcaatcaggatcccagcttctctcactaaagagcaattttacctgtctctgaacttttagaaattgaattagttatatatgtactctggtatgtttggcttctttccttttctgattatagaaataatttaacctagaaaaaaatccaatacttaaatttatcatcaaaggaagttaaatattacattaagtacataggttttttttttaacttgtattttaggttcaggggtacatgtgcaggttggttatataaattgcatgttgcagaagtttggtgtaccccttattttgtcacccagataaagagttctgctaacaaccctgtgttttttcccttcattcactcctgaattgattattattcttacttgttggattatttatgggataaagaagttctttttttcagattaaaactatgttatccagtatttctaatggttttcagattcgtataaaaaggtaactaccagtttgccagaggattgtacccaaatgctctgtgggcccttagctccacctggagcatgtatggccacagccatggcacctgcacccttggcaagctggccacttctccctggagtagaccgtgtgggagcactctgtgtccctgcccaggaggtcttgagatggactgatgaaaactgaaaggtcatatttgccatgtgctgaggttaaggtggatactagggtgactgtggaaaggcagatgggagtgagggatgttggtgaggatctgcttggtgatgacatcaccatagtctggttgtaacattgcctacagtatagcttggagtgctcttccacagtgcaggcgtccacatcactaatgaaggtcttacaccctatgcattcaggaatggggttgggatgggagagtaggtttggctgctttggggatggggagacccagccctgatagttcaccctcagtacctgcaaaggcctggggaggaaactgtgatatttatttttgacttgagtgtttatattctatttcttttaaaatggtatctgttattcttatgttacttctaggttaacctttggttataaaatggtttttcttttatttctacttctctcgagttattcaattcatttataagattttctagttttgatatatgttttcctttatgccttatgttattttcttaatgactgttttgaagtagacagttccaatttttatctgttatgttaatacatctttctggtataatttcattgtctttaggagatatgatttactatttgttctttcttttctcataataatttttcatgagacttgagagatttaaaaacatggctgcagctctataatcatcctctttatatcttaagcagacaattcatacaataagcattctaagtacattgagttgtggaaattgttttcttgaattggacacagcttgataatagctgctatatattaaagttctcatgctgcctctccttgtagattcatgccttggtactttctgcttttaaagaaactttctcttatatttaatatcatgtcacaaataaacttgatgatttaaggctttaatttattttgtatgtatccgaacctattagaaataatactaggagcatgaattccacgttaaaacacctccggttacttattgcaaaaagttctcccctcatttcggagcaactttcagtgtctttccccaagctatatatctttgttaaaattacattggtcatgtcactaaataatgcttggtacctaaagaaataaaagaatttaagtggaaaatatagatattattttgaaaacatttcaaaacaatgaaaatgtgatggatttcccctctcattttgaggacaattttagccttagatggaatcttctaaagtgttgtttaagtaagatgcattgtttctagtctttttttgttgttgttctcttttgagatggagtctcgctctgtcacccaggctggagtgcagaggcgtgatctaggctcacta

SEQ ID NO: 98079 - DNA, 53934 bp, Homo sapiens
taccttctaatgaacaagaaccagtgaagatttatgatgtggtaacatgaccaaagtatatttacaagattatgctagtcatgcttgtaaatagtttcaagtggagagaggtctaagagaaattagggaaatatggtagaaatctgactattcagcaagaatgctgtggaaatgaaagatgcagaaaccaattggccaagttatatcaaatactctgagcacttcataaatacttgccagtcatatccaggaaaacacatatttatcttcagataatgtggttgggtatctggtagttttaactttggttatgtctgtctgttccctaggctccgaaatattcactacctctttaatactgccctcttccttatcgcctggcgccttctcattgcaagatctcagatggctcggaatgtctggttcttcattgtaagcttctgttataaattcctctcctactttagagcatccagcacgctcaaagtttaagagcatttagccatcgctttttatctggaacctctcagatacctctaaaacagcaaactgtgattctcaagattagaaagtaacaaggaatatgcccaaactgtcaaatgtcacctgttatgtattcgtccctattccttaactatgtatttttatttcagtgagagaaggaaagttgtaaactagcccatagtcacctatattttagggaaaaaaatccaaattgtttcctaacattctattttatgcccttgcgtattaaacgtgaaagtactcccacttttctatatttagtttttcttttctctctgagatgattcatttaaactcagtaaatatggaaagatgcatggcagaagctgaaatgagctcaagcagtactaaccttggaaccattctgggtacccaaaagaaaaatttaaaatcaagatgagtaaaaggagaatggtctcaatatcctcaaaaatgcagtaagagaagtaattccccactgaaaatgtctctctttctttctatgttataccctggagtcctggttgaggggtgggggaatcagaaaagtaggtttacatttaacatttttcttaactacattcacttcttaaaaaggaacaagaagtgtaaataagtatgtatagagtgagggattaagcatatttgcattggggactcgtgtattatgcttttaagtcaaaattaatattctcaaattcgaatttgatagctattatttctaaatctttttaatcctcaattttcctggtaaccttctttcaagagtctccttcttctaaaagttgccaaaccctttatatttaagctttttccactcaggactcaattagagtggtcaacagggagagggatggtcccatttgatctttgccactgagcaaaacaaaacttcaaatgaacttttaaactgtagctttagtcttctggtataaagtggggaagattacacttatgtgatcaccaaaggatttactagtatcttggtcattccaattgcacaatgttaactgtacaacacacagcagaaaagtgaatagacttcactaagggattctaagtttagaaaataggttttgttttcttaaaaaattttgtgtataatacaaactaatgaaaactatacatattctccaattcctatagtaataataatgtaactgttacaccaactttcctcatatttgagagatgagtacatgttggattgcagcatttcttcatgttaaaaacatggaatattattcaaatatagtacttggggcctaaacaactaaaattagtcaccgcataactagttgaaaatggcataggcataaaatgttaataaagaatggcagttatatttatgctcacttcctggagtaattgggtaatattcagaaaggcacatcgtggtagtttaagtgtacaaggccttagggcagtatctagcccagtattattccagattctcctgagctctatataaagggcattttggaggaactcttctgggcaatatctttcccaatctcatctaaattctgggaaatattttccatagcagacaacccagctctgaaactaagcacctggtgatctttagtttgagatgtctatatggtacttttgagttatatcaattaagatacaagctatagacatgataaaaatatgaaatcaagatatagctcagtgggattggattaagacataataatagttctaagaattcacttttgattgtatgttttaccaattcaataattccactaatcaagtattcacattttgacttttgattaaataaaaatttgaattaaaattattcccctcttctagtgttgtctttaaccgttgactaccgcagcacttctccctcctttacaccccctgcaccccaccccccaagcccccagaaaaaggaaataacttccaaagaactctttccaccaaatcacatcacaggaataactatcagatgaatataaattaacctttagctacataatgcttcactttttctaacaccattaatacggctattttgacatgagtagtcttctatttgtggcatcagataaatgacacaaagttctcttgtgatgattaggcagtaaaaacaggtatctgtatgaagggaaatctctagcatataactatttcacatcaagaccaattagcaattacttgaatgcctaatataaacaaagcaatgggaaagaaccttctacttaggggaaaagaagatggaaagtacaaagaaaaggtacctatgtttcaaaagttttggcaatccctatattctctacccacaagatacctgatacagtatcaagtattacagagttgaagagtcacggcctgaggcaactaatactagaaaaagttaaggcaaatgggcacacaattcagaaaaacacttcttgcgattttcaactaacatcattacttccatttaacacctcatgtaattaacttagtatctcaaggtagagactggtctaataatgcccaaagagcatgttatcttacaataaacataaacaattaaagtagatcagcctagtttccaaaaacatcaataattttcaaagtttacaagaatcacttgtaaatttccacatggctactcttctagaactgctattctaataatgtctgggaacataagcaactgcctatagtaagaagtaatgattctcatatgcccacataaaggtatggaaaaatgctcactgcctagatcgcttaatttttttttttttttgtaattaactaagactagtaattgctggttttcagatgtaactggtttgagagacagtagtaccgtgcaaaacggagatactactgtggcaaaggatgcttgagtttaaatagccagaaacacctttaccgatacacaaatattttagatgtgtccctactttatttgaaatactgattccaacctggaactgcaaaagggataggagatgtgattgatacggcaatttgggtcaagtaaatgtaagtacagtgtaagaaatcaccaaattgatttacataactgcttgaaaacaaaatacaaagcatttattagttatgagctgttgttgaaggtctgctttagtatatagctttcactaatgtatacttttcctcatgccttctcatccttaagtttctccttattaaaatagtataaaatgagttatatttggaaaagttaacctaactccttttgtgaaacacaaaatatttggagttgccaaaactatttgaatgtttcactgcttgtaatcttgtttgtattcaactgttaacatatatatatatatacatataattttgagtcaactactcaattttcactttttcatctttaatatgagaaatataaaataaaccctgtatcatatagcaatttagctccatctggaagaaaagcaaatgtaaccatgtgatatcttaaaattcctgtagctttcctatgagaaaaaagtttaaatatgggaactgaggcttatttgggggtacatgattttaattttctcctagtattaaaaagacaaaaaaagtttcataatttgtcatttattgagtccaaatgtttatgcttgcaatactaaatattttatgttttttctctcaagacaaaaaaaaaatccaaggcagtctgttttctcctcttaaatgtaaagtgatttcatcagtaatatttcagaaagtagaaaaaaactatgctttgattgcatcatcacaatatgggggggatacatggatcttgatccgggcattttaccataaggtagtaaacaactggtgacctctctattttgattgtgttgaaaaagggctaccaccttggcttgctgaaggtttgctagagctcaaaacaggaaaagtactagcttaaaaggcatgctgagattttaaaggtcctaaagctcaggtttaagtaacttttaaacaatcaaaaataggcattttgaattcaagtgtaagctctgaattttcaaggagtttcatattaaattactttttggtacttgaattactaactcaggacatagatggaatgcacagtgtatctctcttacactattaaaaaattagatctgtccaggggcagtggctcatgcctgtaatcccaacactttgggaggccaaggtgggcggatcatgaggtcaggagattgagaccatcctggctaacacagtgaaaccccgtctctactaaaaatataaaaaaattagctgggcttggtggtacgcacctgtagtcccagctactcaacaggctgaggcaggagaatcacttgaacccgggagacggaggttgcagtgagctgagattgcaccactgcactccagcctaggcgacagagcgagactcagtttcaaaaaaaaaaaaaaaaaaattagatcttagtcattccttcatgaattccaaaattaagattgtattaaagactgtaaatcttgtttgcattagtaaatttttaattataaaaattcaatgctatcataaaacatacatgagaaaagtgtgatattaatcatctaacttgagaactagaagtaatttgggtgccaggtgcagtggctcgtgcctataattccagcaatgcaggagactaaggtgggaggattacttgagtccaggagttggagtccagcttgaacaacacagcaagatactaactatataaatgaaaaagaattagccaggtttgttggtgcatggctgtagtcctacctactcagcagatggaagcaggaggattgcttgaacccaggagttcgaggatgcagtgagttacgatcatgccactgcacttcagcctgggcaacagtgcgagaccccatctcttaaaaaaaaaaagagaaagggaattttgcaatactaagttaagcttttcctaagaggtagtctgaagtgtacaaatactgcagcagggaattattcacctaaatatttaatcttctttataggtcaatgtatgcaaacacagtatttaaaaatccatttcatataatttgagatctcatttttaaatatgtagtctggaatataaacatatagatattatgaatactcttgtaaaacaaaaaggagaattgggtaacaaagtagggtatcctggctggaggcacctccaggcatagggaaagttgcataacaggtaggtgagtaaagtgctctctgcaatagaaaagaatcacttggtgaggccaaaaactcctaacaaatcctaatatgcaggtaaacttcatcgtccaaagggctgatcggaattttaatacttccattgccaaaaatctgactctatttgaggagtttcagatggaagcctttaacttttaaaatggaaatcaaaggcaaagcagaattttgctttaaagaaattcctttcataggagataaatttcattaaaattttaatatggtatttggaaaatacgaaaacaattaaaaatcatatataagtatcaaaataatttttaaagtcctttttaaaggcacttaactgttctaatcctaaatgaaagaaaataatcctaaatcaatattgttctccctcccatttagaaaaagccttgaaactcgattgaattttcttccaagcatacttaaaggaccaacaatcagtctacaattctaatcctttcctattaaaattcctgtggatagatggtgttagtttatagccaaactttgttggaaataatttgaagaaaaaaaattaaaacctagagaaggctcattcacgattcagaattttctgtttaaaaatctttcaaagtatgttatatcacttattttcatcagttaacgtcatggctcttaatgatatattttttaaagtgatgcttctgttattttctgcaaaacgtcattctgcataaactttactgcaaaacagacccatcactatttctccttctctccattatattgtttatcctgttttcataaatttatctttaaaaaaatccatttgaaaaactgttacttgtgatatcctgttttctaaaaccactattttaaatctagtttttcagtcttgttatttacctggaattttgtttccccatttccttaaatgatttaaactttgaggattggctgctgattcttctactgccattcagtactacaaaaggaaaactgatattggtacacatattccaaatacagcttttaatagtacctgtgtgatagctccctctcactgtttttaatcttttataatgtgaagatttagaaccaatccttaaatagtaagaaagttagaacacaatctaatacagaatcaatcatattcaggacaccctgaatgcaaatacttcataatacagttttatagtttaatggacaatgtttaacatggyacctctcaaatctgatatatcttgtggtgcttacaatttgccttacactttcatttaaagttaccctgttctccactcaccacatgtataaaatatcctattttttctcttaatgttttacaaaccggtaattttcactatcagtagcggatctttttataactcaccctatgttgcccaaaatacaccaataatataatgattagattaaaaaacttggcatcttttttaaaaaaatgtgctttcttttccgtgtataagattctactataccatttgtgaatgacaccctagttacataacacctacatatctgcccctgtgagaatttaccttagtcttctaagactctatcttcaacagttagataagtcaataaccagagttcaaagaaaagtagttactttttaagaccaaattattggataactggtcttgtcaatatggcttaacattaatatggctataacatagggactagcccgttttttttttttattaacaatgtgacctgatcacaattctttaaagtctagactagttttccgtatgttttccacattttattctgacatcatatcttttaaaaacaaaaggatgcgaacatttgcacttctcaatgtttttttttttcccatagatgtagtttcacttatttccttcaggctttttatcagcaagaagcaatgtctgattttgataccacccatttgctatgaaaatataagaaggcgtcatcttcaaagcaacactccagttgggcttcttcatcgtttagctgcatgatttcttctacgacatttgtaacagacacaacgtatatagaatttcagtttgggtttttttatccttttttttcttttttaaaataagtatgttttctgcttatttgtgttttcttttctttgaatatattgcacaatattttattattaaaaaaaggttttatgtctcaggcaaaaagtttttctccttcaatcgggaggtgttaatgtgtattattttctaaaagaggtaagtggttgtctgtgtggccatcctcaaaaggaacctaaggagaaaaggagggaaaaaaagaccaaagaattagttttattccttatactctttcctctaaacacaaggttttattttgggcaatcctttctagtaaccaaaagctactatttctctctctctctccccctatttctctatctctctatctctatcttttttgaggcagggtctgctctgtcacccaggctggagtgcagtggtacgatcatagctcactacaacctcaacttcctgggctcaagtgatcctcccactgtgccctcccaagtagctgggactacaggcttgcaccaccttgcctagctaattttttctatcttttgtagaaatggggctctcactatgttgccttgactggtctcaaactcctgggctcaagcgatcctcccgccttagcctcccaaagtcttgggattacaggtgtgagccaccatgactggctcatagacttaacaatgattctaagatttagagatcagcaccatgtatactacaccacttacagaattgacaggtttataggatccaagtctgaaacgacagcaaattatttcaactataaattttccaattccatgtaacatgcctgtaataaacaataagtttatgcttttaattatttcctaaactgttatttaagaataaataactataatggaatagattacggaagaaaacaaagcagtttgcattattcacttccatggttaaaaataatcaagaaagattttaaaacaaatggatttcttttcaaagtcacaaggccacataattcacgatctcagcacaatctttttttttttgagacgtctcactctgttgcccaggctggagtgcagtggtgcaatcttggctcactgcaacctccacctcccagctcaagcaattcttgtgcttcagcctcccaattagctgggattacaggcatgtaccaccatgcccggctaattttttatattttcagtagagacggggtttagccatgttggccaggctgatctggaacttctggcctcaagttgatccgccagccttggcctcccaaagtgttgggattataggcatgagccactgcaccgggcctaaacacaatcttttcaaggttttcccacaccaatacaattttggaaaataaatgatgtcaacaacacaaatttaaatagattgaaatgaagcactaacaaagaatttcgaaagaaaagctattcattcatttaaaaatatgattctaagtataataaactacccagctccatctaatactgaataaggactgaagatgaaaatagaattgtttcctttttctctattgtacttaactcccaattttcatcattacaattcgacaaataatcttagcgaattccaggatctcaggacaaaaatcataaacatgttactgattacaaatctagtttcatgtattgcataattcaaagtactataacatatgattttacatactgtacagttaaaaatgtcttaaatgccttctaggcattttcatatttaatcctatagcacacttgcaaattaggtattattattgctatttttactgattagaaaacctcagaaaaggtaggtgatctattccaagctaccaccaagtaaatgacagaacttacattcaattctacttcaatctgatgttaacacccaggatctttccaactcaccattatataatctaccttacatcattgaatacaatgaaattagttatgtttactggttagtcaatataattttggagttttgtaattaaagcaaaagctatttaaacaccgaaacatgaaaatctgtatacttcttgcccctttgagaagaagcaacttaagtataagcaacactttcagaaattagacaaaaaggaaatggttgttaacctgttgttgaaaagattcctccaacaataccacagagtcttacaaaaaactgccagaatggcatgtgctcctcagtaactgtcaccataagagaactgagatcatatttcataaatatcccagagactccatggctgcctgcagcatggttaatgatacgttcctaaaaggraggcaaaaggaaggggagaaataggaggaagagagaaacagaattcatgtcatctggttacttacatacattcaatattaagccctgaagccctactgtaaaagaaggacatccacatttccttatgaactgtcctactagactaagctcttcagagacaaattattttgtattctttgtgtggttagcttttgaaactatcaaaagagcagaatcattctttttttctcaaaaaggtcaccttagatacaagttttctactgagctcaagagcttacaaatatgtatggcatgttcctcatgctataactaaactgcaagctttaggaatacaaataatgaggttaactactaccaagggaaattaaaacagttttacgtagggcattacaaaactctttccctattactagcacaatacagccttataagccaactgatcaagtttccaataaagtgactacatcttaaagctctaaaatgctcaatatcatgctgagttataaatatattgtcactacctataagggtagaaactgttttagggatcagggcatatacataatgaaagactaataatgattcactttgggttccaggactaatgaatgtcagccctctccctcccaccccctatcctgcattttaccaaccccagttactccattcttttttaagttaaaaaactattttagtcaccctatcagtataaacacatccttcaacagtcaaatgccctgggattctattacatatgtatttttggttttgttattttaaaaatataccctggagatattttcctatcagtatatagaaatccttctcatttgatttttaacaattgcatcttcctccagtgtgtgtagatgtaccatctgggttgtttctaatcttctactattacagataacaatgcaacgaatagcctgaaacacacatttttatatttttgcccaccgtatctttggaatagctttctcgaagtgcaattgctgagtcaaaggataaatgcataggtccttttgcagatactgctaaactaccttcctcaaagattatgccactttgcatccccatagcactgcatgtttgcctattttccccaaagtcttctcaactgtatgtattgccttgaggtgtttgccaatcttacaggtgagaaatggaatctccctactccttaaagaaatgttgaaaagcacaatatgttctggtataaactttacctagtttctttgtgtgagtgtatatacacacatacctatacatatatatgcagttatatgaacttgtactttctcccaagccaagtgaaaagctatagacacatgacacttcacccctaaaaactccaatacctaatctcataagaacaaaaaaaaaaattccacaattattgagggcatggtcatcatgagttataaggctagtaaaagaaaacactatataaaggaaagcaaaatttttaaagcacttaaattttgccttagaattcttctggatacaagtgtttgaattcaccattcaaacacaaaaataagaaaacatgaccccaaagtagataagaaatctattaaactgtccaattccaaaactttgctcatcactgtcagtatttacttatatggccataccaccctgaggtagtggaatgttcttcatcacaatcagatgaatacaaagcattaatttaggaaggcaaaccctctaaatttgctatctaatccatgataaccatgtatgcccagagaaggtagtacatttattaataaataagtaacagaattcaaagaatctgctgccagatcaagaactgcttatatcaatttatgagaaaacatttataaaattaagacattaagaataaaataattaaggccatcacaatttaacaattttaagtcttaatgcaatagaaaacctttcagattttttaaatatctacttttattgctttagaatatactaatattcatttctgacatatttctgatttaaaataaaatgttaattcatttcaaaacttccacagatttttaaatgagggaagacaccaagtaaaacaccaccttattttgtagccaggaaactttaaaatgcttttttaaaaaaatcaccaaattattttaccggttggattcaacttaccctttctgtcacagaaaactgatgggtgtctgctgatattttatatgtatgtagttttgttggcacaactgtaataaaatattggaacatctggttgtctagaatacaaaaaaaactttttatcaattcagtagcaacaaaactactgccaaatatattcttctattaaacacatttaacctgaaatttagctggatgtggtggctcacacctgtaatctcagcactttgggaggctgacgaaggaggactgcttgagtgtgggagttcaagaacagtctcgaacttgagtctgggagttcgcgaccagtctggtcaagagagccagaccctgtctctacaaaaaatttaaaaattaactgggcatggtggtatgcacctgtgggtcccagctgttcaggaggctgaggcaggaggatcatatgagcccaggaagtcaaggctgcagtgagccatgattgtgctactgcactccagcctgggcaacagagcaagaacctgtctcaaacaaataaaaaataaaaacatttaatctgaaatgtaatgttacatacaacttaatgtctaacaaaaaaaatttttaaaagaaccaatgaaagcaacatatttatactcggtaaaacaagttctcagcaagcataagatgggcaacacagatgtttaaaaaaatgaattggtgacttagttaaatattccttaaaatcgttaacatccttttatcaattatggaaaagtagcatttttctttttcctttttttttttttgagatagggtctcactccatcgcccaggctggagtgcagtggcgcaatcacggctcactgcagccttgacttcctgggctccagcaatcctcccgcctcagcctcctgcgtagctgggactacaatgcacgccaccaagcccaactaaatttttttcatttttagtagagacagggttttgccatgtcgcccaggctggtctcaaactcctgggctcaagtgatcctcctgcctcagtctcccaaagcgctgggattataggtgtgagccactgcacccagccagcatttctttatagtacagaaactaagaataaaataaaattataagagaataaccaccacaagacatattttcagtttctactaatatcttaagatatacactaaaccaaaatcaaattagctagcctttgaataaatacaaggaactgatattgcagtaggaagaaaactaaagaaactactcaatgatggcctggggttactgtataatcaaaaggatcatttttatacagtcattaggcatctctaagtttgacacaagttttaaataccagaatattaccaattactaattaactgtaaacaattacccattcacataatataaaacatgttaattctccgggtctagagaattctctagaaaaagtataattagatacacctatccatagattcaactagagaagcaagtaaatgtttttattatccttttgttagagatgaagcaactcaagtacagggatgttaagaaacaggccaaagtccaagttattaagtggcagagtgagaacttgaacccaggcggttccactcaaggggaatatggtcttaaatttaagcagaaaaaattctcccagatttaaawagaagcttgcacccctttgtacataaaagagtaaaagctttgaccttcctctccacttctctctcactcatggaaggaatgattcatctgcaaaaagtaatcatgtgtggctaagccactcaattagatagtataggcattctctctcttaaacagctctgtcttcaagacatacataaccaccttctaccattaggaaagtgagccatccctgccatttgagaagtcagcagggtaggaggagtatggagttaggttgtccagtttgtggcagcacatataggttgttttatttctaccggcttcattaataataaagctgcctgcaatgctctcaaaaagataatcgcttagctcacttatttacttcactcaagtttttttcaaataccacagcctcttccatgccctttctcatatcataggcaatctcctttattttgttcagagccgtttgccctaacacttattacctaaagatctaattccctataggaacgtgcrctctatgaagggcagggactatgtctaccttgtttatccaaatctgtactgcattaaagatgttaattgttaagtaactcctgcaatacttctggagaacatcaggaaagggatagctacctgacatagcagatatgtaatgttgatttttttctttttggaaaaagaggctgaaaaaaacatatattacgaaggagaaaagtatacaaactgctttaaagctttgaaaaacctgatgatactcacctaacggcatttcagaatatgactctaaatacctcttagtttctctgaatttataaagaagtacacttaaaaacagctttttgaaaattgacctgtttatatttagaagagcttctgtgcaaaaatttgtagttcattttagcatcttgaaacaaagcatcgaccagtatgtttccaaatgagcatctctcaggtaacatgcaatgcatttcagaggagaattaacatatgcttagattacagattagattatactgactaaagcttataaatctcaaaatgtttccatccacacatttctaaatttagtacactcaggtttcctgaagtgaaacattcccacatgaacataaaatattcatgaatgtaaatcagtattctaaattctaaacatctttaatatatgattataacactgctaaaaagtaaagaatatgaataaatctgaataggatattaataaatctacttaaattaataaaaaactaaatccttaattacaattttacaaaggatagaattcctactagctgaacaagcttcagaagtccttaaaatgtccaatagctggaacatggtatataatatgactattttagaaagaggcaatcaaaaacctgcagaaaacatgagaacagactactttctaaaaaactaagaaaatgatctttccatatttggatagacttgatactttaaatggagcagaaggttaaatagaacattttaaaaaggttatctgtgctataatgtactccttctatgttaataaccaaaccattccagaataactaggtttctggtgtttgtaaaattctccagagaggtttctgaaatgatatatatgcattttaaaactttgaacctatattatacaaagaagaaaattcttctcataatgttgaacctttttttcattcttattctttggtgaatacaaaaaagtgcagttatgccctgttaatgtattaacctttcatctatttctactgtttaaattgaactccttctgccttttaattccttcatcttttaacttgaatttctttattctgttctatggctcatttttgaatattcaaatttcatccactactaggacaaattctcttcacatacatctcaatcaccaaccacttaaagrttatctttacacagtagttaggaagacattaaaartgtattaatattcaggttataagcaaaattttctacatgtaaaatccaacaataattattaaatacttacgatctatagcaattttttcagttccatctaaaggattaataattgctggaacaagctctccaaaagacaaatgatctattctatgagaaaaattgtaagctaaaaggcaaaaaataaaaacaacttagcagagaaattatattattcaaaattacttggtacagactggtttacatccttatctattctcaaatgaaaatgtttaaaatcttcaaggataataayacagtattttaagccacaatactttgagaaaaataaatgtaaatatatgcgaattaaatgtataaaataaattctgacaaaatgctatatctcaaatttaataattatatacaatttaacgtctagaaaatattaatatataatgaaagccaaaaatatacatctttccttttccaaatcatcatatagttaacaggacggtattgttagaattggaatgatggccatgtggccatataataaaactgatcagatatatttttaatacactattgctaaatgtgaccaaactaattttctgtggaatccattacttgttttgtcctctaaagcagactttaagaacttaagtcttaagacaatcatgataccaaactaacctgaatactttatacatgtctatacatccatatttcaatttgcaaattgaaataaactgcaaatatattattttctttatccctaaaaattagcagaaatgtgtacaaagttatagaaagtacactaggctttcctccctaacctcagcaactcagagccatgaccaaatacaaatgcagattaaagtaaatcaatttaaaaatttattttttcctttggatgaatatgttttcaraacagctcactttcaactacactatatctgcacttttaaaaataatattttttcaagtacatctttactgaaaaaaagtcagaatctgcttacattcatggttgacaagtgctgccaaatgtgcatgaccacgaggatgtggaattgccctgaaaggagaaaaaacaattattaaagtagtaccatttatatgtataattaattaaaatcagaaactggatcttccctaagttatataatttttcttagtacaaaataacataagaatgcatttggcctattgactgagcagacaagtctactcatctcagcaatgcaataaactgctggaggttggcaaacatttttggcaaagagccagayagtaaatactttaggctttgtggaccatgatgcaaaatcaagtatattatgtagttacataatgagaaaaagcaaattttcacaaacttttcattgatataatagtaatgagtccttttttttgtaatacaactgttttgcagggagattacactttgtttaattggggtttggaatgttccctattttcaaaactgaccataaatctttatctgatgatgatgatctgtaatgaaattttaaatatttcatctttgaaaatattaatccacgagtatgtgttgagcatattcattgcttgaaagacatttatagaattccagtagattattctcctaatacttatttacttataaacatgttattatattgcagattaataacttccaatctaaattaaagcaaaatttcaattgcgcagtgaaatgaatttgaaacatggaaatttcctttgtatttgtatcaatgtctgaagttctggaactatagtttgaaaggtcagaaaatatattcaagtatgagaatgagtccagatccttgctttaacttttgacagcaaacgctatcaaggcatgaaaattaaaagaaaccactcaaaatcactagtcattgaaacaactttactacaatataaatttcataaatattggttttcccttatacttttaggctaaattcattaaacattattaagtctgcatgaaacttaatttccaaaaatattcattgctcaataattgtaactgatggaagttctctcactcagaaaaaattcaatcttggcactgagctcaaaaaatatactgctaagccatcaaactgctatgtagtagggcaagatggaatattcagtttttatatctgacaaaaaaaaaccatggaaatgtcaatatttaggttcaggagagcaaatgaagtttaccactgacacaccagtttaaaatacaaaatcaattcaaatattttctgcaaagcaataggcattaaacactacattttcacaaggtttgaaatgcattcaagtaagcctttttctgctccacacaccaccatcagttataatacatttgtaacatataccagattccactttaggatgtactgaatttgtgttctctcaacttctataaaaatattcttgcctatagtttttgttgaaagcaggcgattcatagatactaattctgcaatcacttcaaattcagcattgattcctcaaataaacaataagcagttctagtaacatctgtccacttatcaaaagtttaggaactactcaaaatctcctggcttgttttttaactggctattagatactgctctcaatgtcctcatctaccggaacactcttcttgaagaaggctagtcatctgattgtctaaagcaaatttattttttctggagtcatttctttagctttggcagtcaaacattgcttcacagacttatcaatacttggatggctttccttacttgctaaacaatgaggcacttaaagattacagcttcattttcacgttttatgataaaattctacagtgtttggatattccatttttaattttctaatttttctgatcattgcttttttataggttggtaatattgtgatgaatgctcaatctggcaccatcaacagatactgtattctttttagcacaattaaatagtgtcattgcttaatacgcaggatgttctgcagccaaatttgatcaaataatccatggtacactgtgctttaaaaatgcaacatttgaagtccatatttcttttttttaacatagtaatacaataaataaataaaatgttgcaggacaggaatacacacagcacttttaatgctgtcaaattataactgcatcactacaattcatagtacaccaaagtacaaagtaatgagagagtcatatatggtctctgccataattactcaactgtggtactgtaatacaaaagcagccatatataaacaaatgagcatggctatatgccaataaaactttatttttggacacgaatttaaatttcatatatttctcatgtattatattactccccttctgatttattttcaartatttaaaaatgtaaaaaccatgtctgggcaaggtggctcacacctgtaatcctagcactttgggaggccaaggtgagtggatcacctgaggtcaggagttcgagaccagcctggccaacatggtgaaaccctgtctctactaaaaatacaaaaattagccgggcgtggtggtgggctacctgtaatcccagctactcaggaggctgaggcaggagaatcacttgaacctgggaggcagagattgcagtgagcccagatcacgtcactgtactccagcatgagcaacagagcgagactctgtctcaaaaaaataaacaaacaaataaataaacaaaatttaaaagcccttcttagctcatgaaccatacaaaaacaggtagtaggctggatttggtatataaactgtagtttgcctaccactgcagtaaacctttgttctgttatacactgttatctttcaaatttaacctgttcttttagcacctttacacttctacaaataagtactatccttccctgttcctggttaaaaaaaattaaaaaatcaccttgaagatctcctttatcacaatcctgctttacccagttactaattctagcaattaactaaaaaactgaaaatagaaactctccataaaggagccttctttctttataaccaattaactgtctgttaccattgtcaagtttcagaatatgccctagtaggtctaaacattgtttaatttgttctatgtgttacctagcaaaacaccaggcactttaaaaaaggcaatacaatgattagggaaatgtattaactgacattcaacataaagtatactaaaaccttgctcaataaagcatttcctgatgcactggaatgattggtagtttggtctcgtaaattcttctgtgttcacagtcaagtgtattacctcaagcttactactaaaaagaaagtctactgtcataaattattmctagctccaatcatattgtcagtctaacagtgttcctactattattttcaaacaaacaacaaagtttttctgaataaccaaattacaatactacacgttgaatatcccttatccaaaatgcttgggatcagaagtttcaaattttagattttagaatatgtacattttatttgccagggaggcctccctaacctgaaatctgaaacactcttaagcatttcctttgagcatcgtgttgacaatgctcaaatttggagtattttgaatgctccaaatttggagcattttgaatttcagattttcagataagggatgctcaacctatacattttacttcaatgatctctctcaccacccaggattttactctgagaggaacagagagctgttttaaataatatttccttcttcttttttttttttgttaacaggtgtattcattttatgaagtaacagcataagtgagcatcttcttcaaaaaattaaatttaaaaatcaaattaaatcaccctagtacagatgactgtagttatctgacacttgttaaaactctgcatagggaggatggatattcagaatttacctgtttcttttctgggatattttctaccctatcagacaagaatctagcctgaatgactttcagtggaggaaaagttgttctgaaaattggtggggggtgaagagaggcattttgagttgtcagaattattgggaaggggttgctattgggatttactggacaacagccacagaaacaaggcatcctgcaatgaaattgacagtctcacacaaaaaagaatcattccaggatttgcctgactttcaaatgttctaagagatactcatgtacatgaaaagcctattataataatctgagtctagaactgaaccccatttagctatataaagttgtagttttaatatacactaaatttcccagaaaactaagggaagcttatattctgttttgtttaatattacaaagaggtattcctatttctgaatatcatctcatcaacggaaatgtcactcatgatatctgagtagccaatacatctgtttcagtctgcatttgtagcaattatacacttaaaaattctacatataagtggcaagcatctgcctacttcattatgtcttctagtgtattcacgctcaagcatattgaaatacatattgtgttacaaattatgttccttttattactcttttaaattacagttgagactgacattgtgtctgagaggtaatatgagaccttcaaaaagatcaatattgaacttgacaaatgtaacactaaaaattaggagtgggtttacaggatatccctgagatgacaagatatgaaccaaatgcttttctatttggcctctctgatagtgtgagttaccacctgggaaggaaagtgaaattgtgaaaagaccaaaaacaaattttaaaaagggacataatatagagtctgattataatatttgtcaaaatttccctctttgagttggttgtggactagaatattgtttgtatccaaaggtgcaataaaatctgctaaatttctttaagctaagatttcaagacattccaaggttcccagcaacaggttgggttggagatgggtaatggtaacaaaacaacaaaacataaatttcaagagataatgaggaaaaaaacaaatgtttgatctgagtattgtaaatactgaaatactttttcatagaaatctaatgttatctctatatgtattttataaacttccagccatgctctttcctgctgtatgcccttccctcctttatatattaaattcctcctcttctcctagtgttcaaaggtcttcctcaataaagtctccactgacttgcagcgtacatttaataccttgttaaatagtctcttatcagccatacttctcctttacaggctcaatacaactataattaaataattattaatgtattcactgcttaagtgtggattttcttatagaatgtcaggcctatttaaaataacaagtcatatttatactgtatagtttggaataaaataaattaaaaagggcaaaaaccctttatttttttcttcactgtttatccttagtttctagcacagtactttgcacatagcaagtactcaaaaaatgtcttgtacaataaagaattgttcagttcagcactctatatggaaaagaagggagggaaagatggatggatctatttattcattcaaaaatttcacaagtgtttatgacaatttctgtgctgagtgctgctcatatttttccttaacttttacctaatttaactttattctagacactgctaatttctaactttatcaaaacacttatctaggattagtcaggaattacattttgatgaggaccaccaaaacgttaagacaaaaacctaataacataccaaaaaaaatgaacaaattaatgaaatgtctaggtaagagctctctggccactaaaacctggcaagtagaaggctgtaattgatatttacctacagttcagttactttaatatacaaaacatgagatgactgttttacttttgttttgaagtagtttttaaagttagtagtcttctctatcctgagactgaagccccagacaacaatctcaagacattaaaaatatatgtacacaatattttaagcaagcctttagtagttagctgtatttatttgattagcaaagtatttacttttttttttttggatacagagttttgctcatcgcccaggctgtagtgcagtggcgcgatctcggctcactacaacctccgcctcctgggttcaagcgattctcctgcctcagcccctcgagtatctgggattacaggtgcctgccaccacatccagctaattttttgtatttttagtagagatgaggtttcaacatgttgggaaggcagttcttgaactcctgacctcaggtgatccacccgcctcagcctcccaaagtgctgggattacaggcgcgagccatcggccagaatttacttttaaccaagctccaactttgtctaaagtattttcagtaagtgaaaagaacatacttgcccactgttatgtgaaaattccctgctactttattgacatatagatggccatgaattctgcatgcatttggagactgtgatgaatcatcttctctgttaaaataagatatattatttaaagcacattcaatayagttaccattttatgatgagaaaaatgtgtatagaaaaaaaaatccctaaagatcattttttmggtaatattctaaatgttaaaaatagaatagtttcctgaagtctagacatttataaaaattatacatctataaaatgggaaaaaagtatttaatatctattacatttacataaatttgaaattccatggttcttcaactctaaccagaggactaagtccagtgacagaagactaaaacaaaataattagtccaaaaagacatatttttttcatttatttctggtactgtagcagggagagggagggagggcagaaacatgattgaggtaaaggaaaggcatgccacctaaattcaaagagacagtgacattttcttcctaagcaaatgtaaaatcttgtatatttttattatgtttatgattatagcatttccaaatatccacgaatcttttttttttttcttttgagacacagtcttgctctgctacccaggctggagtgtagtggtgcaatcttggctcactgtaacctccgcctcctgggttcaagctattctcctgcctcagcctcccaagtagctgggactgcatacatgcacccaccacacccagctaatttttttgtatttttcgtagggacggagtttcaccatgttggtcaggctggtctcgaactcctgacctcaaatgatccgcccaccttggcctccaaaagtgctgggattacagacgtgagccactgcgcccagcctctaatctttaattaaaatacaaaaacgggaaataaaacaaaatttctaaccaaagcttatatatcctcaaaatagtaaatgaaactaatttttcttaaaactcaatataattttatgtgggggtataccacgcataaaaaagaaaattaaatgcaaataaatatttgtgataattctgatcaaaatcacaggctataaatttaagagcaaaaggcgtctttatagtacagaatgattctattttcccttcctaagaaaaataagattcagaaaactaaaccaacactttagttttaactatgtcaaagtaaattcataataaacagttgcacatttaaaatacagatctcaccttggtggaagagctgttgatgtacttttaaaagcacttttaaatatcacatcttgaagtgaatgctcttcttgtagcctactctgaatcagctgcagcatcctaaataagaagcaataatttagaactacagaaaggtacacaaagagagctgacacttattcaaaaatgacaatgtttagctgacttagttaaatcatacatttattattacaggatttcatattctaaaataacataccaagttttctttggtcatttccttgaaagcaaatgaggcagggtggctaagaggtctaatagctgagctccataagcttgtttgattccatcagtaatggatgtgccatcaggaccaccaaagtagggcttctactcacttaagtatctcaattcatctttcatgcatacatgcacaattaacaaaattcttatctttgtcagacactgaatgaaatattgtagatacaaagagtaggacaaataaggggctacacaatggacttgatggacttgaaatggtacattactcagtataaactcataccacaagtaactgattttcactacaaaaatttttctctctacaatacttctaccattgagccatgttaactcctacaattttcagcaataactttgtgtcattagatgtagtcctattttatctcttttaattctatttcttcaaataactaatattccaaatcatctgtagtaaagttcaaacttggtaagtacaaatgttatacacagtgggaagggaagaataaacaggcagagcacagataatttttacagcagtgaaatcattctgtatggcagtatggtagatacatgtcattatacatttgtcagaactcacagaatgtacgttcaacaccaagaacgaactctaatgtaaactatggtgatgatgatgtgtcaacataggttcactgattataacaactatatccaatctgatgcaagttgttgataatggrggaacctgtagcgggacgggtatataggaacactactttctgctcaattttgctgtgagcctaactactctaaaagaaaaatacatacatgtaacttggaaaaaagttataaacataggtactcacaaaaagaaagcaaatgtgaatctcataatactttaccatcccaccataatgataaaataagtactttctagatgtgcaagcagaagattaaaaacttatgcatcatctatctagaaaattagtataacaggcctatgtaaaataacaactcatatttatactgtatagtttggaataaaataaatctgaaatctcgacataaaaagtagaaaccagaaaggttctgtccagggtttgaaatttacagttaaagagagattaattgtgatcctaaatattttaggaaagtattatagaacaccaactgagagaaaatttaaatctcttagaaaattctagaagtaaagaacattttggtatgcacattagttaggaagatatctaccttgggtatctctaggccattcaagagctatttaataatgtttagaatcagaacgtgataatctaggatgcttcaagaagccagatcccatcttcagattcagacatttaaagacattgaatctttgacattgaatctttggattcaatgccagcagaaatggaaatcttcactttttttgtgtcttgtaattcgagagatcaacttttgaagcatggcagtgatcaaggggtttgatgacaacaaactatacatacgtgtatatgtatgtatatattatgtgtgtttatgaaaaaaatttctgccttcactgtgccaataaatatcccagcctatattccacacatgaaagtatgcagaaaactactatgatggcaaatttatatcatcttaatagtaaaaatacaatctcttctcccacttattactagtttcgagcattgaaaaaaattctaaatgaaaggagaaatctcactttaatgtttctggatcaaagtaaagtatttcatctgtggatggctttctactaaaaattctaagagcccagagacagctaatattcagtgcttttgttcacccacattcaagtggtgaaactggaaattaaaagagaaagactcttggaatatacttagggactagggaaaaaaaaacgggtaaagaaaaattttttggaataatcttaaactatataaagcctttataagtgcaagacataacctagaaaataaaaagcaatatatgggggtgggagacggaagcacttataacaaagtactattttctttaatttaaaaataattcttctaagaaaactaaccaagcaaaataggcacataggcaaacattttcacaaaaaaatacaaataaggaaaaaaacctcacaaytgattcataaagaaatgttaattaataaaagcatagtaccaattttcacccatcaaactggcatacatttaaaaaaattctaggcattcctgttgttggtgaggttgtacagaaacaagtactctaatatagccttttggagtataagtgaaataataatttgggaggatataggcactatcaaaatgttaaatatcctcagagaaagaaattctatttctagaaatacacacacacacaaacatgtacagaattaggttcaagaatgttcattgagtattgtttttaatattagaattctaaaagcaatctaaatatgcatcaataaggatccaattaaataaactacaatctatccataaaatagaccattatatatatagaaatgaatccaaaatatcatgttaggtggaaaaaagcaacttatttctgtatatatatttctgtatagaaataattatatgtttttaaatataacacattataaaaatatataaatatgatatattataaaatatataatgaatatataaacttttatatattataaatatataatatactcatatatgatatacaagaactatatatacaattatgtactatatattatatagattatatgtaagaattatcataattttgtatatatatacacagaaatatatataatatacatattatatacatacacagaaaatgtctgtctagaaggctacccaagaaacttatcactggttattactgctagtcagtggcattagtttacagaaagagaagggggcttttacatttactttgtatctgggtgcccaatcttttggcttccctgggccacactgtaagaagaatkatcttgggccacacataaaacacactaactatagctgatcagttaaaaaaaaaagaaaatcacaaaaaaatctcataactttttcagaaagtttacaaatttgtggccgggcacagtggctcatgcctgtaatcccagccctctgggaggccaacrtgggcggatcacttcagttcaggagttcaagaccagcctagtcaacatggtgaaaccctatctctactaaaaatacaaaaaattagctgggcatggtggtgtgtgcctgtagtgtgcgccagctactcaggaggctgaggcaggagaatcgcttcaacctgkgaggtgggggttgcagtgagccaagattgcgccactgtactccagcctggcaacagagtgagactctgtctcaaaaaaaaaagaagtttacaaatttgtgttaagctacattcaaagccttcctgtggggccgcagtctggacaatcttgctttatatcatttctattcaaattgaatttttaaaatgatcatatattacttttgtaatcaaaaaatgtaaatagttgataccattttaaataaaaactaaaacttatgaatcaaagtttaccagagaaaagattatgcatgactttcttaagatctgatggtttttgaaattgtaaggattatattatataccaaattctgctaagaattcatccaaagaaatccctagagaaatgtgttaatctataaatagtttacaatagacaaaatatgacttagatttctatggaccacaatactttgttctcttattacctctgccactctttctgctgtggtgaaagatcaaatactgtctgaaatgaaagaaaacataatcactagcattgtcaaattctcttggcttttacatcataatttaaaattttttctttgagcwggaaacataaacttaagtgttgttaaaaacaagtattcatggtttacattcaacttctataagtcaaattaaaattttaatgtgctatctttactgaaaaatagcataaagaaattttctaatcacaaataytttcctgttacagttatcgacatttacaggaatatatgcaagttgacaatttatcatatgtacaaaatggtatcctagggcttaaaatcatttaaatgatgctagcatgaaattcacaagtattagggtasaaaaatacagagttatattcaagcatccaaagcccaaattcttgctggtaaaatacaataataaaatcaacaatttttgaaatgagtttaaaaatagcacagttaattcccaaatgcattgatcaacaaagaactacttaagaaattttatctaggcatgatcaaagttagacttggctacttgcagagtcagagaaaaatatgcaaacttctcatagtagctatatccacaatttaattttgcaacaataatccacttttcggccgggcatggtggctcaagcctgtaattctaacactttgggaggccaagacaggcggattgcctgagctcaggagttcaagaccagcctgggcaacatggtgaaaccctgcctctactaaaatacaaaaaaaccctgtctgtactaaaatacaaaaaatcagctggtggtaggcacctgtaatcccagctactcaagaggctgaagcacgagaattgcttgaacccgggaggtggaagttgcagtgagcagagatcttgccaatgcactcagtctgggacacaaagtgaaactccgtttcaaaaaaaaaaaaaatccactttactagtcctagttcacagctctacttctgtgatttgattttttaatttaattacatcaatctggaacatgcctctccggtaactgtgagagcctcatgtctaagttttatataactatatgcttcaagttaaattgtcccaatctttctgatgtttcctttgattacacctcctgatgaatttgcctaaagcatgctaccaaacctttttcacattatagcatataaggaaaatgctaacatctataaaacacaacacagcaaaccaataaggctgttggcagttactctccagctaatgtataaataaaatgattgacagtggcgactatatgatttttcctttgaattccaaaaccttctttgtacaatgtttacttagcacaaaggtataaagaaactactttgtaggccctatgctaattcattatctcacttaaccttcctaaccacctcgtgaattttttactcctcttccctttttgcacatgaggaagcaggagctcaaaaagttacaaactttccaaaatcacagatagtaartaacaaccaatacacaaattcagctctgtcagatttcttactttcccaccttttaaaaattcttcttgtctttaaatagtaactaaatgcaatagaaatagcagaatagtaactatcatagcgtattgtatgatcatggcttgtaaactagtaaagttatcagggctaggtttttaatattcagagtgcatattaaaataatgagtgaaaaatttttaagttaaaatgatatttttaataattttatattaaaaataattcttaaacacttttatataaattagcacaaaggaatgaatagtttcctaaaagcatggttaaacactttaaatattactaatgaaaagtatacaattaaatattttgaagttcttaactttctcattaagatacaatttttaattataacaatttaaataaaattttcctgctccataaactactagaagagatggcagaaactgtttacaatgaaaacagtcaacaatactgtcccaactgcttaattctaacatatcactattgcctaaaatctgcaaagcattttgcaatgcattttgagaactacaaagatgaaagaatgaaattaatgattctcaagagcttaaaatccagctagaaagataagagatgtagggggaaaaaaaaagatagcatcaggcatctcataaatgtgaaaaaaaaaaaaaagagagtgaccacaacagttagaatatggacagaatgctagagaaacagtgtaagtgacttttagaggatacattcaagattataatacataaacaataattctcagcatccaaaagaaacataaaaatgaggatgcaacctttattatcatcttaaatcattttaaattaatattcatatgctgtaaactttcatgaatttatacaagacaacatacaaatgaaaccaaattgagaaagagcacaaaataagtttatttcataggatagaaaaacccatgtgaaagggattttcccagttcagagcaacagagaaaatgggtaataaaagataatagcagaagatacaggcagtcatgctagaatccataaaacatacctacacattcttgctgtaaaataaatctcaaaaagtcccccctcaacagaatggagaatccagaaatcaagctgcacacctgcagccatttgatctttgacaaaatcaacaaaaataagcaatggagaaaggactctctattcaataaatggtgctgggagagctggctagccatatgcagaagaatgaaactgggcccagatctttcaccatatacaaaaattaactcaagatgggtaaagatttaaatgaccttaaactataagaatcctagaagaaaacctagaaaacaccattgtgggcatcacccttgggaaagaatttatgactatgtccccacaagcaattgcaacaaaaacaaaaattgaaaagtgggagctaattaaactaaagagcttctgcacagaaaacaaaaacaaaaactaccaacagagtaaacagacaacctacagaatgtgagaaaatattcacaaactatgcatctgataaaggtctaatatccagaatctataaggaatttaaataaattgaacatgtaaaaaacaaccccattaaaaagtcggcaaaggacatgaacacacacttctcaaaagatatacaagtggtcaacaaacatgaagaaatgctccatatcagtaatcataagagaaatgcaaatcaaaaccacaatgagaggccatctcacaccagtcagaatggctattactaaaaagtcaaaaagaaaaaaaaaaaaagatgttggagaggctgtggagaaaagggaacacttatatgctgctggtaaaaatggaaattagttcagccactgtggaaagcaatttggagagttctcaaagaacgtagagtattatttaacccagcaatcccattactgggtatatactcaaaggaaaataaatcattgtatgcaaaagacacatgcactctgatctttattgcagcaccattcacaatagcgaatacatggaatcaacctaggtactcatcagtggtacatgggataaacaaaatgtggtatacatgcaccagggaatactatgcagccataaaaaagaagaaacttttatcctttgcagcaacatgaatgcagctggaggcaataatcctaagcaaataaatggcaggacagaaaaccatacaccatatgttctcatttataagtgggagctaaacgctgggtactcatagacataaaaatggcaacaacagaaagtggggactattagagaggggagggagggagaaggaaaaggattgaaaaactactggttattatgcccagtacctgggtgatgggatcaatcataacctgaaaacctcagcattacacaatatactcaggtaacaaaccttcacatgtactccatgaatctaaactaaaagttgaaaaaacagtccctcttcaaaatgataaacaaaaataaggtaagaatggcagaaaattwaaaaaaaaaaacaaagttaaagttaaataagtattcttaagatagtataaaatgtaatacaaatattaaaatatctaataataatcacttagatcaaaatgagcagataatagtgtaatatgctgtcatatatgaatctgtaaggtaactaagctcataaaaaattacttcaaaatcgattttttgagtgggaaaacgagtcagaaagtagagtcagagtggcaataacaaaagttactgtttctgtagaaatttctatttaaaatgtatatgtcaaaaggcacatatcaagtttgtagctgtaaactaaaattaattcaataatcaaaactggccaaggacttcattttctttcctttaaccccatacattcagtcacttctactccccctccttcaccttcactcttcactttgcaaatttgctaaaagaaaggttcacaattgtcaatgattaagaaaaggaactcaagaacgcatgcgtaaatttaagtaccaccatgccaacagagcaacttttagctgctgagggcctcatgcttattctcgaaagcttctttagggctagttctgatcatgactcgttatcactgtatctgccactgaaatgtgacaatattttctgataaatctacgatgttatattcaacttgtgctctgaagataataagaaaatgtcagcatttcacacgctgagggaaatagaggcgtaaaggaggaaggaagtagtaatgcccatgacatttctcctcttagaaagatactactttattcttgattgtaagagaaatacagttcaaatattttaaatacttaaatttggtcatagtagaatacaaacaggacataaaagtttccaaattactagagaaaaagaaaaaaactcatcactataactagaagaaaagtgaaaaggaaactactggaaagtaataacaaaaatattaaaaaaggttataaaacagactttagacacatccaaaatacatccaaaatgttaataatggtcacctcaagattttggtatataatataacttttctgtttttccccctaaatttattacaaagaatatggattacttttgaaataaaagaattatactaaaaactatttcagacaaaactaaaagcaactatctgtcttcaagcgtaygattcctcaacccgtgtatttcaaaaaaccatgtgaatcaaacttactggttcataaactaaaccatctgcagatgcaaccattgtttctgctaaatccaatacatccgctccaacatctgcatagaaaaaagaattagaagttttacattctatgcttggaggcaaaccatccccaatataaacaaattaagccaactaacagaaaactcaccaagcaaaaaaaaaaaaaaaacctcaccaactatgtagaatcatttccgatatatttgtccaaaagctaaaacagtagccttatatagcttaggtggagattattccaaaatgtaataatgttttttcttacccagtaaaaaacttcttacccaataaaaaaaaaaagataattcaagatctcatttaaaaaggataagcgtcactgaattgaagagctttgcaaatatcggcaagaacctaatcacaagtactaagtggctgctgaacaaaatattaattccaagaaatatttttagagattaaaagaaatcgtaaagctatgctacaaatcaacaaataggaaattttattcggaaaaggctaaaatttaacagtatttaaacatccaaaataaggcagaatatcatatattcagaattaccactaactacaagtttaaaaataaagtatttttttatctcttaaaaccaccaacataaggaaaaacatattgaaaagaaagagattcaaggtcgttctgagatagaatctcacagaaaataacctctaattaattgggtaaaattatttcatacttttaaaaatgtaaaaattttctctgagttcttggtctgtaatttttaagcagtaactcataaaatatttttcatgcaaaagcattcttatttttgaaaacagtattgattcaaacattcactatctggcatattagcatttttccacttctaytagtataaccaagtgagtccagtgacgaaaaaagaaaagggtaacctatcaccattaacttaaaataactggatctgtatttttaaacgcaagagtaaacataaaaggtggtaaactgaaacagtgacacaaggatatgcttgtgaaacatgggtataaaagctagtactccaaacaaaaaaagacagaaaggatgtacataaactagaatgctgattcacaaacatttcctccaactttcttttaattatactaatgtgaaagttttatctcttctctttatggaaaagaaacttgaagaatataagctgaggagtaaaacaatttgtattattaaataataccacagtaaaactttaaaatattataaaggaaaaataaagtacaaccagtgatttttatttttgcttggcaattgtttgaaccataacctacatgtggattcagcaagttgaaggtgtacttacattgacacttcatggcaacrgtaatatctatattaattcttaatttgctgaaagacaaaatattaaacattagtacctaccaattaattagcaaaacatgagaaatataaatcaactgacctattaaaaacttggatttcaagcagaataaattatgtcgattagaacttgaattgcatttctcatggccaaaacaaaggctctttaaattacaagttctattttgcccttattccaaaagcctttctgacttcacaggtttttgaacacagtatcctttaataatggcaactctataatcaataactctaagcaactcagaaaaagtcttaacctcttaatctctatttacataaacttttgatagaatgttcttttaagaatgtaaaactctcaaaatcaagaattaggaattgtctttcttctctgtttatcaaacaccatatattaagcatgatgctagatgttctacaaatattatctcctttattctatatcatggagctataaatggatggcttcacagattttcaagtaaaccactggtgttcacggtagtgtaaatacctggcttaagatcacatcaccattaaagtggcatactggaaactaggtctatgtaactcaggataaatgcaaccaaactaccaaaagtaaatcacctgatgcttaaaatttttcatggcctttcattttcaaatgattagatcaaagcaattttcgaataccagaatgaagcattgcgaataatagactggctatgatcaaattcagtcctgtgctttctatgataacttttttctgtgtaataattttcatctgatttaaaataggaattacagatttttagaccttcatgaagtcttaaagtcatctagagttcaaactgtgttccaaataacccaggagtttaggctcaggagataggaaccaggagtaggccaagtagacaaacttctgcatatcctcaccatgcttatgtggcgaactatgtaatacataagacttcatttggaaaaaaatgaagtattgcattggtgctgaaaacaacaacaaattctttgaaaaccaatactatcctgaatagtacattagagatgaagaaactgaagtccaaaagaagtcagtggtgtgacctgcccaaggttacacagcaatttacaaatgttgactaatttaattctcataaacctcttgaggaagatactataattgctgtctgtastttacaaaaaaggaaactgaagcatatacaggtgcagatttagtaaattccctaaaattatgtaaatggcaaacctggattgtaattgaaaactaaatgtgtcttcctatttggtgcaatcttaatattataaacctattatcttcattccattgaagaaatccaaataatacaaacgaatagatgtaaagtgtataattaaggtactatattttcaaaagtttaaaagtaatcttatttacataaagatttagcttaggtataatttatagacatcaagtcataagggtatacaatgtatccttagacaacttattttccagctcacacagatcagtgaggtatttcaaccagtttcaaatattaaacaatttccacaatatacatatctaaggaaaaatattcccctaactttttgaaacaaagcatgctaaatcaaagaacctcagttttagaattcaaccactatttaaatgattctaaaaggtttcacttaatgcatgcaattaatgagaatttttcaggactatttcttcagaactaaaacaaaccaaatctagaaggttagactttttcttttttaaaaggtatgctctttttaaaacaatttgaatctaaaggtattccaagaagaaaaaaaatgattacctagaaaaatccttgtctacttcgtattcatacttcatccatgtatcttgatatactgagaattccattatggttaataaagccatagttgtaaatgctattagagaaactgggaaatccaacaacaaaagaaaaacagaattaaaacaataaaaaaagcaaagaataggaaactaatttaagtgagattaaattttcaaaagaaaaagcctaataatgtaacttccatttgaatgcatactatagaaggtttttattcaaaatgtttattatgcattttttctaatacagctcaaaagttaaggtttaatatatacaaatatgaacataaacacttgcattactaagaaagcattttatttctccaattttaagggcatctctcactaagtagagttgacaaaatttgtatttcttatataaaacagtgtcacagataggataaatgatgaaagtaagcatgccttatagcacaaatttgaaaacagttgcttcattattaaaaatgcatccatgtctataaatataatttgtatataaatgtatataaattgggctataagcccaatttaaaacaaacaaaaaggtagcctaatttcttagatcctgagaaaccacaataatctgtgtgccagaaactcaaataacatctctaaatagctaacaaaactctcctctacttggcaatctcctaaatatatcacctcattcacagaactgagtaaaagatctgacaaaaagaaaatctattatatactaaagcaaaatacttaaaatagattttgcaagaacttgcactattttcattaacaaaacttaatcacaagtggatcagaaatagtaagcaacttattacccattttaccaaataaaatgtcaaccttaagtgaaatacattattttactacctyttcatagggaaagaaattatactgaatattgttatagtcacacatttttcttatatatttcattatttattttacttaactgatacttttatctgtaccaggcactgggtctaagcattttatgaaaatattaatagtatagtaacccctaggaggtaaatactagtatgatccctatttcatggaagaaactaagacagayagatttgaataacttcctcaaggtcacatatttaggaaagggcagcaaagcagaaacattggtttaatgtattaatgttttaataaacactgccaaaggcacagatggcactgtgttggaggctatagagaatattaataagaattacagccaacagagtggcatgaagacagacaagttacgaagttacggcagaattcattgataaattcttcctcatggctacatttctatatgttgttgactggatcacgcagaagttgtacttactacagaacttttaatgttaactgatactcacctgtacctccactggctgaagtctctacatagctctcaggaaccttcggaaaggcatccaactcttttaccaaacttaaagtttttttccgattcagtcgcctcatcttcaggaaaaccttcctcttccttcayatagtcatgctaaggaataaataaattaatgaataaatgaatcctttaaagagataaaaaggtttctttaaatttaggataactgacaaatgtccttaaaacaacttaacattctcatccccccttaaaaataaaaagcatagtatttatccacactactcctttccccattcatgccctgacaaaaactactaatggaaggcaatttaaatacaaaaacacattatatagcaagaaaaaaagtgaaaagtaattcaatcacatgaataatgtctaaatataaaaattaagataatgttttctattaaattgaaaactatataaaaataatacacttccaataatgaatgacagtgaagtaaaatggcctgctcatacattactaacaagaatataggccaggcacggtcgctcacgcctgtaatcccagtactttgggaggccgaggcgggtggatcatctgaggtcaggagtttgagaaaccagtctggccaacatgggaaaaccccatctctactaaaaatacaaaaaattagccaggtgtggtggcacgtgcctgtagtcccagctacctaggaggctgaggcaggagaatcgcttgaacctggaaggtggaggttgcagtaagccaagatcatgccactgcactgcagtctgggttacagagtgagactccatctcaaataaaaataaaaataataataataataataatggaagaagaagaagaagaaagaaggtgggagaaagcgggaaaaggcgggagaagggagaagaagaaaaagaagaagaagacatttaccacaccactcctcttctaagtaaatgcccattgaggaatgtatcctatgacaataacctgcggttttaaccaaaatttgattacgaggatatttctcacagtgttatttttaaatactgaagacagaaacaaatccattgtatccaatgtacaaattaaggtgaagcatctttacgtagccattgaaaatcttttttttttctttttttgagacaggatcttgctctgtcacccaggctggagtgcagtggcgtgatctcaactcaccacaatctcagcctccctggctcaagcgatcctcctcgcctcagcctcccaaatagctaggactataggcatgcacctccacccccagctaatttttgtattttttgtagagacggagtttcaccttgttgcccaggctgggtctcaaactcctgggctgaagccttccacccacctcggcctctcaaaaaaagtgctgggattatagatgtgaaccaccacacctggcctgaaactcttttatttaaaaaaaaaaaaattaatgacataagaaaatagtcatgatactgatacaataagaaaagactagaaggtcacatggatcctaactttatgggagacaggaaaagatacataagaaacaaaactgaacatctacacacaaaaatgttaaaagtagatcatgaattttaattgcctttacatataacttcagatttcccatgttatctatttttataatcaaaacatttaaaaattggctgcttgctatttatcagcacgtcatctacatctaaaaatgttataaagccaatcaaataactgaattcttagatatttacataatttttatgactgatttataaataatactataggtaatattataaagaattcccagtaatcaaggctttattaataaaatcaacacataatagaataaatcgtacagttgcagaagtcactataagagaaataatgtctctggaagagagcagacagactttgggtctgaaatctaatggggaggattaatatacaaagaataggcaaaagaaagaagattcataaagaaaaagaagggccagagaatgaaaaactggcagtaaacatgaatactgtctaaaggaaagaagctctgaccaggagcactatttatcagtccagcagggagctactactctacagtagagttgaaagcattaatacattgatttcctctgmcattaaaatcaaccaactaaacttcccttgctggttccacactcacaaagcagccttcgaattatgatttttttcccatgcacttagtattcgaaagaaaaaaatagatgtcatagacaaaacagatgacagttttctgacccccacgtcagktataaaactggtattcccatcgataaattaagcttctgaatgtttgttatgtatatgccatgcccgctaaacttgtttagctctgataatcaaatttattttctgtacctttttagtagtaactgcacaaaaactgaccctttttcaatctttcaatttctactctttctgatttgagtaaaatattaaatatctgtatgtctcttctctttaaaacagaactctcccttaaactcaagtccaactccaacaatacatctctcgcagcacacctacagccaacttaaaagaatgagttgtccccattcatctactgtgactacttcctcacccaactctcacctcttaactaaatttgctctgagcaaggtaattaacttccttagtactgacagacactcctcagtccttatctaactgcacctctgagaaaacacactgcttatcacttctttttcttctcgaaacattctcttaccttgacttaagtgatatcacatccccaattttcattctacctggaagaccctctttggcttactgtgcaaattcatctttctctcaagattctgcactaggtctcccccttaacctccacaccttccccaaatgatcgcccactccttccatttcaatctgcatgttgatttatcccaaatcttgattctctgcccagatctctctgcagatatgtataaccccttgccttctgttaccttttcatttggacattccaaacacaattcagactcaacaagtccaaaaatgaatacttcaccctgtaaaaattgttcctcctgtatctatcttaatgataacaccataagcccaactacacaagccagaaacatgggttatatctttagacttaagctatttctaaatttctcttaaatctgcctgtcttctcttcttcaggcctactgagaaattccttatgtccaagtatgttcctagtcccaactgccacaatctatcactacattgcttcaacaacctctaatcttcaaccttccaattctctctctatactgtaataataaattatctttttaatacataaatctgatatttctcttcaaatctttgtaaaacttcccttcccactacacttaagagcttggattctatcctaacatgttttacaaagcccttcaaaaaccaggtcctgctaacctctcttcaaacccaatcactcacagtctacgttccaaccatattaaatcactttcaattccttaaatatcctattctctttgccagaaatattttttcttccccctaccgcatctctacatttgactaactcctacttactcttcaaggtccagtctactcatctctaccttgagcaagcagggggaacaaaaaaactttccatggccttcaaagtctatctgcttctagaacgttgtacctttatcacactatttctaattgcctctttttctgtttcctccaccggattgttagagcaggaaccatgtctaacttgatctttgtatctccaatgcctagcgaacaggtattcaatatttattgagaaaaggaaggaaggaaattttcccagaaacaccacagtagcacatctttcaaatcacagcagtatgtcatacttaggtaagtaaatatataaaaataagatccacaagaaggattttcctgttgtctactgtcccaggacctagaacagtggccatcacatagtcagtatagcactgttaaacaaatgaataaaacagtgaattacatttctaaaagtttatataaatgttatatttgtataatgagctttctaaatgctcttttaatttatatataagcataaagatayggcaagcagttagttttacaaatctcctaataatacatacaacctattcaacactcctcccttgaaagtctagctggaatatatcatgtggctccctacccatctctagcttcctccatccctrttttccaggggatatcactctagaatggagcacctcgcccctcagctactccaccagtcccattcctgaaagctcagcactaacctacctccaagaaattcattccattttgcatacttgccaacctactgtaaaagtcactgtctggcataaacaaggtatccaataacttctagcttttctaaaagaaattgctgtctgctctctttataaaacctgactttctattggcagcagttccattccaatccttagtcatttctgagactcacaggttacagaagtatcatgttttaccatatttctcaaccatctctcatgttttgtgctatgtattatttgaagctctttaaacattaattcatttaatcttgtaaatgactctatgaagcagcaggtactatttttaatcctactttttgatgaggaaatgaggcacagaactgtcaaataattttcccaggctacatagcaggtggtagaacttgaaactatgctccaaaccacagtacacactgattctcacttccgtacttgttgctatattccactaacatctgaatatattcataatttgcttaatgacttcagcacccagatcattcaatatgcttctcccccactccattatcatcctttggaattcatgctctgatggcatttatcctatagcattcattcacaataaaacctttttaccatgtaagcttaacagcgcttctcctcctgtgacctccatcttaattctatggaaagccacccatgagcaaggtcaacccttaaaactgttccacctctaaaatycaaaacacatttacctccccaagtaggaactacccttcaagctctttcctaagataaatctgctcttcattttcactggtgttctcaaatcctttaaatcctaccagatacccaatttcattgctccattcccactctatttgcctctctactcagtgtggtaagccattttcaaaaatgtgtttggaaatacctcagatcatcaatgcttgccagaagtcattgctattctgtgacaaaattttctagtcatggacaacgtagaaaagaacttttaaagctaaatttattccattttaaaatgtgtcctttattctgagattattttattccattttgtcaaaacagcctttcctttatgaaatgataaaaacagatataacagaggttgttttgtttttggatgtctttattcagcaaaattaaaaaatgtaattctaggtcagtttttatacccagcccttttccctgtccacacggcccgcccctctcaaatagatatacattttcttgtattggtccacaaaatctagttagaagccgttacacaagattcctttgcccactggttggtgctgctattcataccttgacaatctccagtactatgtctgttttctttgatgtctctccttaaactgtcttgaatattaaaaaacaaaacaaacataaataaactccagaaagtcactgataacagctggagctaagacaagacagttgtccctcagtatccatggggtattggttccaggacctcccttggatatcaaaattctcagatgctcaagtcactgacataaaatggtgtagtttttgcatataacctatgcacatcctcttgtatactttaaatgatctttagactacttataaaacctaatataatgtaaatgctatgtaaatagttgtactgtttaggaaataatgaaaagaaagargtctgtaagtattcagtacagacacaatacttgttcagtaggcatgcaatttttccttcttgaatattttcaatctgcaactggktgagtccacagatgcagaatccacagatatggaggggtgactgtattttgaaaaacttcctaagacataagagactccctttcaggttggaacacagacattatcaacactcactgtaagtaaagtcacacagcctatatttcatcattgtatccatctgaatataatgagactattaaatgctttaccaaaattaaaatacagaattcatgaactttttatagtctgctcagttaagtttaattctccaaagaaaaatgaagacaaaagttatttcctgctacccaagttttgagttaacttctatttttaatacatatttggcaatatgagaaaaatttaattggttaatacatatggccaagttgcagtctgaactgtgtcaactcacaatttgatacgttgaacaagatatgttgaagtctcaacctctggtatctatgaatgggccttatttggaaatatttgagtctttcagatataactaattaagatgagatcatactggatcagggtgctccaaaatctgagactggtgtccttttaagaaggccatgtgaagacacagagaaacacaagggaaaatgccatgtgaaaacaaaggcagagactacagtgatgtgtctacaaacccaggcatagcaaggattgcccagaagccaggaagagtcaaagaaggattctttcctagagtcttcaagtcttgctgacaccttgatttcagacttctagcctccagaactgtgagagaataaatttcttttgttttaagcctcccagcttatagtaagttgttacagcagccccaggcaactaatacaggcaatataattcaggccatcgctgaatatcagaaataaaaggtaaaactacaacctatctgtaattttaaattacttgattatattgcattagaatactttacaataaaaaacattttataagatagcttagctttactttgcaaatactagatagcaaccccccaaccccctcaattgtacttatttttaccttaaaatttggaccttttacaacagagttaaatattatgtttgtttaccccaacataattcaaataaacctaatgacattctaagtgacagaaaggtttacttggaagccaaggaagacaatataaatgtgagtttataatcagaaaaccctgattacctaggcacttactagttgtgtgacaagtgtggaaagatactcaacttcttagaatcctctctccataattttattttaaaagatgggcagcaggacataatggctacctcacagtgttaagataaaaatgaggcatgtaatatctatttctaattctctgaaaaaaagcaaagatttgtaggatatttgagatttagttgttaaagtctttgaggaaagtgggagagtatgtgaggttagttgacaatctcctgaagttaggatggmataaactgataagactaaaagttaagagagactatagagtgataacagaataaccttaaaagtgcctagtagcaatgtgaagcaaggacaagtataatcctcctcaaagaacaactagactatagtagctctcaataaaagtatagaaaattaaagttaaaaagtattaaggaaaaggtcagggacacatgaaatatatttacaatagaatgaatgttctcaaaagcaaagagtatgggggttaataaggcactcagagggtagatctgagccacactacaacgtgactatatagagcaatagaaaggaagaacttatgctttagtcattaaaagaggataataatttaagaaaacaagcaactggataatgggagtttaaggacacattaaccacaccaatcagagtgtttaatcaatctggagttcagaaagatattattttaaacaatatcttcttcagtctacattttgactaagtaacaaggcaacatttgtaactacagatgttagaaaatgaaaataaaaaataacaagagctaacatgcattgagtgtttactgtgtgccaggtattgttctaaatgctttgtatgtttcaacacattcaatcctcacaaccttcctatgagttaagtatcattatttcatttggccgatgaaggaactaaggcacagagaggttaaataatttgaccactatgacattaagaggcagaattacaataaatattgggaaactattaaataggatttttagcaggcactgactgcctaaaagtaacttctggtaaagaaaaaaaaaatagccatttctttcacttaaatcatcaatccccaaagaaagaaaatgtgtgggtggttgttgttgtttccctaactctcgttgttccagactaggcctgatttcctttgagagatctttcaaacttgatatatttttatgatttgtaccaggaagccattataacacgcaactgtatactaaagttcaccatcatttaaaaaaaaaaaaaatcctcctctctctatccatccctgcaccgccaacccccaccctcccaaaaaatcagaatttttttcctcatgttttccactagaactggcataattacaacaacttaaagatatcaacaaacaaattaggtaaataaccatgtcttttttcagtgaacaagccaggctcattctttataattgctgtatactggagtccaatgtatcaggctaggcaattaactgaaatactgaattacaacttcaaatgaataaatcctgtttttaactgtaactttcattgcttctgaaaaccagtctggcaacattttaacagctattatgccactttgtctttaagtctcgggggcactaaaatataaaagttatttaaacgtgttttctcaaacaatgacctgtcaactctatatactacagataaacaaggctattctccaccacgagttgacacgttgccttcggaaggtttcctgcgccgaggaaaagtagtgacagtcgaacctgtctctcagcatctcgccctcccccgcccccttctcattttccgaagcactgtgcgaaactccttccgggcaaggccaagactcttaaagagacagagggcaacgtgctgccacgaatgtggcatttgtctgaatgggggtagggagtctgacatccgggaggactgggactcgaccgattgggatcctactcgcctgcggactggagaaaccacctgggaaccgggcactgtgacaagcaaagggtcagaatcaggtgcgatcgaggaagcacctgaactccttcgagttgcaggatagcacacaagcacccggacctggcaaagggaagctcccagtagcatcgttgcctagggtcctgccagtaacgcccccgtgggaggtggagcggcttctccgtccgaccggctctctagagatcaatgaagacaggaagccaagcccatgacaggctcccagttccctcaattgcatttacgccctaaacagccctggaacaaccgagggaacagcacccagcggtgtttcagtattttaccttgtgttatggtcccagcctaccgccatgtttcacagaagcccgggtcgccggggctcccgcgtacccggaaatatcgcgagaacaaaagcgactatcacagctgaaaacgtcagaaaagagacaatgtacagatctcgcgatattccctttgcttacgacgtgcttagggaatgaagaggcgtggttaagataaaagaggcgtgcctacagggaaatgaggttgcaacttgttttaggtgtaatcgcgccgccagtccggttctgtttctatgggaagggaggggttactttccgactaacactttgagactgcagaacgaatctcagctcctcacaccgtatttcattactaataagagccttgggcgcagaaattatccctaacaaccctaatgcatatcacctgtgcaattgttttgtttccctctttcagtttttgtgtcattttcccctgacaagaacatttgagcttccttttccgccataggtaacgctttttattatttgatcagcgtttttattgtcttccaggttttaatatcataagaaagcacatatgtcttcctcatctcccttcgccaacaccaactatgccttcaaatatttgttaagaaagaaaattaatacctcatctttttctaccacttcatagaacaggagttaatagacggaacttcggaaagaaaagttaaatgtgaactcctggagagtaaacccattccaggttccttttcacccatctgttaccagattttataatcaaacattgagatttaaattttctgattcattgacctagaagtctaacaacggcataattatgacaactgcttataattactgtttaaaggctttaactgcttttttaaaaaatctgcgtatcctcacaacactcttagaagataataccagtatttacctgttttataaatacggaatttgagtcaaggggtagtgaagtgatttacccaaattcagaccgctgggagagtcagggaaatcttgatcacaatactaaactgtgcctcaaaggaaaaaaatcacattgttttatgtagtgaattaacctttactgaaatactaaatttcactaaattgaatatcccccaaaataaggactgatgaaaagtttccaatgaatcaattttattttcagactttcagagttagtctaattaaatcaatttaaagttctcactttcttgacatgcttaagaagtatagtgtagtgggtgaaatcatagacactggagacaggacttcctgggttagaattccagatcagcaacttactagcatgtaaccttgaccacattatttcatctctttgtgtctccatttgctcatctgtaaaatgggcatgataatatctcagagttgttacgaggattaagtaaattaatatacatctaaaatgcctttttttaatctttgccgtaaaggcatcagcaactcttccttctttgtgaatatgggctcttgcttggatggaggctggctgttgttcacttagttacatctgatccctcatctcctggataacctactttcagggtaacaactatcccatgagagttggatttcccagtgtagcaaaactgactaatttgatccttcttatttagaaaacaactcaccattttctaatctacccagtgaagagggaacttaatttcccctgaagattgaaactctcgggctgcagctaaagccgcattcttttcattaaaggccagggtttgatctaacagtagcacgacatctctgcaagcgaggtcaaaggtttgccctagaccctgtaggacatctatgtacctatcaggatcatctttaaaaagagatagatacttaatcttgtgttatcagtggcgttatgtctgaaaaacaatttgctttaaaaagtccattatgtattacccgcataagataggttttagactgagattaataattgttccataacaacctgtatttagtaaagatgatcaaaaggtgtttttgtgccatttttttctttctctagttcgattgaataattcatgggcttttttctaattctccttagtccttctagaacacaggtcaacagatgtttatgacttcagtccccatgatctgagtcaaggtcccagtggggatccatactggggatggcttgctgaccagtcgggaatttgtccctttcttcggctgtcattctgtcatttacttgactaagataccaggtatctccaaactcttgggctgcagctaaagccgcattcttttcattaaacgccagggtttgatctaacagtagcatgacatctctccaagtgaggtcaaaggtttgccttgaccctgtaggacatctgtgtacctatcaggatcatctgaaaacttccccaggtctgccttgatctgctttaaatcagagagggagaaggggacatgtacccgggttgggccaaataccactcccgctatagcttgaaggggacataaccaatagcccggggttttttgtggtcctttggagatttccttgcttgtttccttctggccaggggagattagaggaggattatcattaataggaaggggagctatagggaggctaggatatggggataagctgagagatcctcctgtgggatataaattgtaagctttgcatagttgtgtattctccctcaatgaaaataaagcttggacatgaggtatttcactccatttgccttccctcttacagaaaagatcaagctgcaggatagtattgtaatttgtacttccctcaggtggccatttttccccatcagagagagaatattggggccaagccgtagtgcagaaaaaaatgagccgcctctttttcagggtttgtgggtcaaattggtcccaatggcttaggatgcatttcaagggtgagcctgttgatgcctgagtgtttcccatctgaaagacaaaactgccgcgttttggtttattttgtttctccccctgcccaagaacctacaacggtccctggaccctgctgatcagaatagttgcgctcaccaacacagcagcagaaacaacccctgcccaagaacccgcaacagtccctggaccctgctgatcggaatagttgcgctcaccaacgcagcagcagaaacactagttttcctcccagaccacatggaggaccaaggaaagtcagatttagcggtccttaccgacgcattctcgaaaacctgcacccttgcctgtcctcctaggccacaaggaggaccaactgagaaaaatcgatttagtggcccttaccgacgcattctcgaaaagctgttagagtcctaagcattctcctgttagtactgggactttacccctgtcctataaagatgttatgccccaaaaatgaagtggagggccataccctgagggagggaagggatctccaggtttggaagagtgacaccttttgtcctcacttatatgaataggaaggatataatttctgaggctccccatatcctagcttcaggaatagcttttgttaggcctgttagtctgaggagggatcctaaaattccaggtagtccccactacgatggggctttgggcaaaaattatgtctttctgattggtgagcccgggtgcctaaagaaggtaacagagtcctggagtttatactagaaatcattcttataggagaaactagaaaagcaccagagacggtagcaatttttagaagcgggactaacctcagagaagagaggcgagaggaagtttgtctgacaggcattaggacccagggggcaagggtcaggatagataggatagatgggcgagtctcgcttgggcgacatgcttttgagagttctgctcatggccgcagggtcaaccaacttgttgtcgggaccccagagctgcatggctttcctctctgtcgaccctcggctcagcccagaagtactggaaaagcagaagctggttctagggaaaacaatggtcccaactccgaagagtcgggggttgttatagagccctttcccagaaaacctgacacccgtgtctttagtccggtggccacgctagtcgcttttaactggccaacaggtgcccggtatttagcccccaaattctaaggaaagataggacagaatagcaagctaaaggggtccgatggtactcactgcttggcaataggtgattgtctcaccgctcagcaataggcgatggtcttactgcttggtgattggcgaaggtcccatctgggtcgccaaaatgtgtctggaattggtgggttcttggtctcactgacgtcaagaatgaagccgcggaccctcgccgtgactgttacagttcttaaaggcggcatgtccggagtttgttccttctgatgttcagatgtgttcggagtttcttccttctggtgggttcatggtctcgctggctcgggagtgaagctgcagacctttgcggtgagtgttacagctcttaaaggcagtgtggacccaaagagtgagcagtagcaagatttattgcaaagagcgaaagaacaaagcttccacagtgtggaaggggacccgagcaggttgccactgctggctcaggcagcctgcttttattctcttataagtccccacctacatcctgctgattagtagagccaagtggtctgttttgacagggcactgattggtgcacctacaatccctgagctagacacaaaggttctccacatccccaccagattagctagatacagagtgtccacacaaaggttctccaaggccccaccagagtagctagatgcagagtgtcgattggtgcatttgcaaactctgagctagacacggtgctgattggtgtgtttacaaaccttgagctagatacagagtgccgattggtgtatttacaatccctgagctagacatgaaggttctccaaggcccaccagagtagctagatacagagtgtcgattggtgcattcacagaccctgagctagacacagggtgctgactggtgtatttacaatccctgagcaagacataaaggttctccacatctccaccagactcaggagcccagctggcttcacccaatggatcccgcacctgggctgcaggtggagctgcctgccagtcccacacggtgcgccggcactcctcagcccttgggtggtcgatgggactgggcgccgtggagcagggggccgcgctaatctgggaggctcgggccgcacaggagcccacggagggggtgggaggctcaggcatggcgggctgctggtcccgagccctgccccgcgggagggcggctaaggcccggcgagaaatcagcacagcaccggtgggctggcactgctgggggacccagtacaccctccgcaaccactggcccgggtgctaagcccctcactgcccggggccggcagggccggccggctgctccaagtgtggggcctgccaagcccatgcccaccgggaactccagctggctcgcaagcgccgcgcgcagcctcggttcccgctggggcctctccctccacacttccctgcaagctgagggagccggctctggccttggccagcccagaaaggggctcccacagtgcagcggtgggctgaagggctcctcaagtgccgccagagtgggagcccaggcagaggaggcgccaagagcgagcgagggctgtgaggactgccggcacgctgtcacctctcaataggtttcagactgagattaataattgttccataacaacctgtatttagtaaagatgatcaaaaggtgcttttgtgccatttttttctttctctagtttgagtaaaagtttcagcaagtgagcagcaaaatttagataaactaatgaataatttttacaatggaatgcccataagcacctcaaagtcagcacatccaaaatggatttttttttgtcttttttttgagacagagtctaactcagttgctcaggctggagtgcagtggcgcgatctcggctcactgcaacctccacctcaagcaattctggtgcctcagcctcctgagtagctgggactactggcatgagccgccatgcctggttaattgtgtgtgtgtgtgtgtgtgtgtgtgtgtgtgtattttcagtagagatggggtttcatcatgtt

SEQ ID NO: 98080 - DNA, 25662 bp, Homo sapiens
  misc_feature (1)...(25662): n = A,T,C or G
ataataataataataataataataatagtaataataataataaaaatatataaaaaataaaaataaaaaaagaataccaaattgggtgggagatattgttgccatcttttgaataatatgatctacctcaagccctaagaataccgaatgtaggccgggtgcggtggcgcacgcctgtaatcccagtacttgggaaggccaaggcaggcaggtcacttgaggccaagagttcgagaccagcctggccaacatggagaaaccccatctctactaaaaatacaaaaattagccaggcttatcacgaggtcaggagttcaagaccagcctggccaacatagtaaaaccctgtctctactaaaaatacaaaaattagccaggcatggtggtgcatgcctgtagtcccagctacttgggaggctgaggcaggagaattgcttgaacccaggaggcagaggttgtggtgagctgagattgcaccactgcactccagcctgggtaacagagcgagactctgtctcaaaaaaaaaaaaaaaaaaattagccaggcttggtggctggtgcctgtgatcccagctactcgggaggctaaggcacaagaatcatttgaacccggaagggggaggttgctgtgagctgagatggtgccactacactccagcctgggtaacagagtgagactgtctccaaaagacaaaaaaaaattaagaatacctaaagtttaatctacagggttttaaaagtcagaagcaagtcgacttctaaaaactggggcaggcacagtggttcatgcctataattccagcactttgggaagccgacatgggaggattgcttgagcccaggagttcaagaccagcctgggtaacatggtgagaccctgtctctgcaaaaacaaataaaaacccagaaagacaaacaaacagcaacaacaaaaacgagctgggcatggtggcaagcacctgtagtcccagctactcaggaggctaaagctgaaggatcacttgagccagggcagtccaggatgcagtgagcagtggtgatgatgccactgcactccagcctgggtgacagagtgacatcctgtcccaaaataaaaaataaataaaaactgaaaaattcattatttctggcacgtcttgagtttaacaggctgaaactcatagttgctactactcttcatcttttttttttttttgagacagggtcttgctctgttgcccaggctggagtgcagtggcatgatcatggctcactgcaaactctgcctcctgggctcaagcgattctccaacctcagcctcccgagtagctgggaccacaggcgcccagctaatttctttcttttttttttttttttttttgtatagacaggatctcatcatgttgcctgggctggtcttgaactcctgggttcaagtgatcttcccatcttggcctcccaaaggtctgggattacaggcgtaagccactgcacccagtcagtattagctaatattatttgatcctttaagacatcataacaggctgggcacggtggctcacgcccgtaatcctagcactttgggaggccaagacgggtggatcacttgaggtcaggagtttgagaccagcctgaccaacatggtgaaaccccatctctactaaaaatacaaaaaattagctgggcatggttgctcatgcctgtaatcccatctacttgggaggctgcggcaggggaatcgcttgaacccaggagatggagttgcagtgagctgagatggtgccatggcactccagcctggatgacagagcaagactccgtctcaaaaaaaataaatgaataaagacaccataacacaaaatgtcacctgacatttaaaggataggtaaagtggttggcgtctaaggccagactgcctgtaactgcagcctgacatggcgattcttgggcaactgatttacctggggaggtgctcttagaaactacctgtaagagctggtcacagtggctcacgcctgtaatcccagcaatttggggggccaaggcgggtggatcacttgaggtcaggagtttgagaccagcctggccaacatgttgaaaacccctgtctactaaatatacaaaaattagccgggtgtggtggtggtggtgtgtgcctgtagtctcagctacttgggatgtaaggcaggagaatctcttgaacctgggaggcagaggttgcagtgagctgggaacacgccactgcacttcagcctgggcaacagagtgagacttcatctcaaaaaaaaaaaaaaaaaacaaacaaaaaaacaagaaacaaaaaaaaatccaggcccagtagctcactcctgtaatctcagcactttgggaggctgaggcaggcggatcacgaggtcaagagatcgagaccatcctggctaacatggtgaaactctgtccctactaaaaatacaaaaaattagccgggtatggtggcgggcgcctgtattcccagctactcgggaggctgaggcaggagaatggcatgaacctgggaggcggagcttgcagtgagccgagatcacaccactgcactccagcctgggtgacagagcgagactccatctaaaaaaaaaaaaaaaaaaaaaaaaaaaaaaaacttgcatgagtgtggtatatttgttataactgatgaaccaatattgatatattattaaccaaagtctatagtttgcatttgggttcactttttgttgtttttgtcatgagccaccacacctggccagggttcgctctttgtgttgcacattctatgggttttgacaaatggataatgacatatatccaccattctagcaccatacagaatagattcctggtcctagaaatcctgtggtccacccgtccatctctccctctccacccaccacccacgtgcaacctttgatctctttgctgtctccttagttttgccttttccacaatgtcaaatacctggaatcatagagtatataatatgatacagtatatgaaagaagccctttccacatgggcttctttcccttagcaatatgtatttaaagttcctccacgtatgttgttgcttgatagctcatttctttttatcactaaatgatgtcccattgtatggatgtaccacaaggttatccattcactcgttgaaggacatctttattgctcccaagttttggtaattatgaataatgctgctatacacaattatgtacaggttttgtgtagacatgttttcagttcatgtgtaaatcgtattcctttttaacttttgtatttatgcacacatttatatagttgtaaaactaagcttatatatttttttcttttctttattctccctgggagcatagattcaagttgccatgaatatacactcccacgtatacttttttaaaagtgatattttacataattttctgcaatttgctttttaagataacaataatcttttgttataaaagcagtatatgtgcttttagaaagttagctcatgtgggtaagtaaaagaaaataaagacacatgccaggcatggtggctcacgtctgtaatcccagcactttgggaggctgaggcaggaggatcacttgaggtcaggagttccagaccagcctggccaacatggtgaaaccctctctctactaaaaatacaaaaatacaaaaaaaaaaaaattagttgggcagagtggcaggcgcctgtaatcccagctatgcaggaggctgaggcagaagaatcacttgaactgggaggcagaggttgcagtgagccgagatggcaccactgnnnnnnnnnnnnnnnnnnnnnnnnnnnnnnnnnnnnnnnnnnnnnnnnnnnnnnnnnnnnnnnnnnnnnnnnnnnnnnnnnnnnnnnnnnnnnnnnnnnnnnnnnnnnnnnnnnnnnnnnnnnnnnnnnnnnnnnnnnnnnnnnnnnnnnnnnnnnnnnnnnnnnnnnnnnnnnnnnnnnnnnnnnnnnnnnnnnnnnnnnnnnnnnnnnnnnnnnnnnnnnnnnnnnnnnnnnnnnnnnnnnnnnnnnnnnnnnnnnnnnnnnnnnnnnnnnagtgcagtggtgggatctcggctcactgcaagctccgcctcccgggttcacgccattctcctgcctcagcctcccaagtagctgggactacaggcgcccgccactacgcccggctaattttttgtatctttagtagagacggggtttcaccgttttagccgggatggtctcgatctcctgacctcgtgatccgcccgcctcgtcctcccaaagtgctgggattacaggcgtgagccaccgcgcccggccggatctagggatctttagatgttcctgagatccttaaaaagggacctgtgaagttaaaacaatttgtcatactactgttaagacattgtccttttaactcgagtgtagaatggagttctcctgaggtgtaatacataatgtgatactgcaatagattgaataaagcagatataagaatctgtctcctacgaagccagacatgaaatacatttgcagaaatgtaaaaccattgtcctcataattttttgttttggaaaaattatttttttagagacagggtcttgctctgttgcccaggctggagtgcagtggtgcaatcacagctcactgaagactcgaactcccaggctcaagccatcctcccatctcagcctctcaagtagctggaaccacaggtacacgcaggctgggcttatttattttttgagacagagttttgctcttgttgcccaggctggagtgcacacattacaggtgtgagccactgtgcctggctcaagtttttttttttaataaaaatgttacttatataaacatgacatgtcattttaaaatattctagcaactttttttttttgagacagtcttgctctgtcgcccaggctggagtgcagtggtgtgatgtcacttactgcaacctctgcctcccgtccaaattctcctgcctcagcctcccgagtagctgggattatagatacctgccaccatgtccagctaatttttttttgtatttttagtggagatggggtttcaccatgttcgccaggctggtttcaaaatcctgacctcagctgatcagcccacttcggcctcccaaagggctgggattacaggttgagccatggcacccagccttttttcaccttttttggacacagggtctgtcatccaggatggtgtgcagtggtgaaatcacaggtcaccacagcctggacctcctaggctcaagtgagcctcctggccccacctcccaaaatgtgggggtttcaggtggaagccagcacacacagcccatttttcattttccattggcaaaaatccaagtttgataacctacctataagaagatgggtactctgtacatttccagaacaaataaagtggtctaacacttgggagtgtttggaagaatctgccaaaattaaaatgcacaaatctggcagggtgtggtggcttatgcctataatcccaataccttgaggtctaggcaggaggatagctagagcccaggagttgaaccagcccaggcaataggaactggggccatatgtgataaacgtgcccatgaacagccactgcactggcctgggaaacaagagcacggcctcataattattggggaggagttgagaattgagcacagcggggagaaatgggagtttgttgtctgagtagtcagcagttattctcttctctcatccatgtacagtttagcactgacttcttcagggacgagtgagaaaatgccaccacttcacaatggtagagggtgggtgaaaaagttattagccaggcaccaagaaccaatctgaagccaagaacagcaatgcaaagccaacaaactagctctcttgtagacaccactcccttccaatcccattctctactaaggaaaacccccaggtgagctggcatggtcaaactacaccttcaggtaggtaagaattttttttaaaaaccaaaaattaaaaaaagagacacaaaatgtagtcagctatttaattaggttcttaagacatttagaacaccaatttgtgaggataaattccattcgtcagagcaaacacagatcgcaggtagccctggagctgaggaatagctttgatttttggtaaaatttgtgagtccacagctttctgatcaatcttgcgctgctccgtaatctcatatttctaaataaagagaaaatcaaacattttaaaacaggcacataccaaattacttgtaggtcaactaaggagtcctgtctcacaagtactaatccccaagaatatttagaaaacattaaagacaattttgacaatcctttccttggaatgctgtgaaacacaacccattttttaatgtaataaaartagctcttaagcttttgtatactttaggacacatcaaggataagtaagggcacattcccaatacgatggtagcagttaattcccacacaattccaccaaactttaggattctaagttgagctcccagactgccaaaagaactactcaatttagaagaatctggaatactaagtatctcccagcattcctcattatttaacctttcatttttcttctttttgtgcaacctgtttcttttcactcccaggtagaagggccagtgctaacacaggagatgacaagtagaaacttacctctttttctgtgtcgaagatctcaccttcctggtgtctgggcttccgcagcttcttcttcttgaagtaagcatcagtaagatgttttgggatttttacattgctgatatcgattttggttgaagtggcaatgacaaatttctggtgtgttcttcgtagaggaactcgattgaggaccagaggtcctaagggggaaaaattaatttagcaaggaaaagggggaagaatcatcatcctgcaatttaggtgaccattacttgttatgttgctacacaaagaagaccacttgtctaacccacttgcacacaaggcaatgaaatgggcctcagacacttgtggcawtaagtgtctaccatgtaggcagtagcaaacaaacgtgtatactgcaagcatttaaaaatggaagtttcacagaacatcacaatccaaggattttcttaccagtcacaagtaataagccactagccagctgcttcaggaaaaccaccctctgtaagttaaaaagaaaataattagttttctgcaattaaaaactgacttctgaattcataaaatcacaggcatctaaatttgggtaaaggaaatttctacatgtatatgtatacagctcggcagttctggaagcaaccacagcaagctactaaggtagtactccagacataaacacgtttttgagtaaatgaacatgtgtaacataatcaacagcaggaaatggctaataaatcaccatggattacacttcttatttgcaacaactaagttgtatcttgcagatcatttccccttgccccaaacataggtaaataaaggaaaagtacacctagcgtgcaaacgcattgccaccaggcaccccaggcagctgcagtgaagcgccccaagcacaggtactctcaccttgcccctgtggcgtccagtgaggatgatcagaatggtcccgggggtaatgctggctcgcagttttctcacgtgctgactgaagggttttttgccgtggctcaacagctttcgaggcacatcttcagtaggataatatctaggctgtggagagtccatagatccaacttatttaaataagccattcagattactagaagcaagctatgtcagccaaacttttgctacagcctttttattttaaagtataatactgtatttatatgattccattttcatttctgctaagtagacttggaaaaggtcaattatgcttctgcatcctgtgtgcaaaaaaggagacaccatttaatgaatgagatgtgtgctcaagcaaagaaagcatcaagcaagtcacctttgcaatcttgagcaaaaactaaacctcagagattacacgtgtgacatgccacattttgcagattagggatacatggcttgttttccaattcaagtaaagtgtgtccatatcctagccacttcatctgatcctcacagcaacaagtcttactcccacttcatccacaaaggaaaacaaattgcataaagccagacactaggactggcagatcatttattgcagaagttagacaccatgcaagggccattaaagacatgactacaaataactcacaataacctatttccaactataccatatcattagtgcagtctcactttcaccacaaacatgatcacctaatgggaaaacgagttcacaaaacaactgtcatcttccctctcatgcagtaatcttcaactgtgaaactgtatggtgttaacttatttgggaatgttcccataatgaaaattacagagcaaatcctgagattacattgggtcttgtgtgtggtaaagggggccaagaaacactgctctagtgggaaatgttctatagaacaggctatgtattatttcatttaatctccataaaaactctttgaggtaaaccctcattcccatcttatctttttttgagatgaagcctccctctgtcgcccaggctggagtgcagtagtgcaatctctgcctcccgggttcaagcgattcttctgcctcagcctccagagcagctgggactacaggcacgcaaccagctaatttgtatatttttactagagatgtggtttcaccatgttggccaggctggtcttgaactcctgacctcaggtgatctgctcgcctcagcctcccaaagtgctgggattacaggcattagccaccacactcagcctcattcccatattatatgcwaaggaacaaagcacagacgagtaatttaaattacttaagattaacagtaaatgttgaagccaagttacaaacccagagccctttattttctatcagaaattctccggtatgcagaaacttacagtatctaagtattcaaaaacatcttcacagtattcaagcataaacagaaaatccaatttacagtccccacatcttaccattttgcgaagtttaaccacccgggtaccgccgttcttgtcaccaccaactggttttgtaacagttgcgagaaccttctccttctttttcttttcaacctacaaggacacaaatgyatcaacagtaagagaatgccaattaaggttaagacataatggtccgtggtcctcttcccttaccttggatttagcggctgagtacttcctcttgtacatggcctttctggaatacatggcagatcgggaatacctgccaattcctctgacaaggacagggttgcggctgcaatggggcttccccttcttgggctttttagctttgaggttaccctttttcaccttgccaccagcatcaaccttcttggcttcgggtttcttctctttagtatctggcttctcaactttttcacccgccatctaaaaatatttttttgtagataaaaaaaggcatttcaccagtcatctctctaacaagacaataatgaacctgtacatgaatgggctgggctccccagactacaatccctcccccggtaagatacaggccttcctctcaaactctacccattctactccaaccttcactatgactcatttggggtttgtctccccaatacactataaactttttttttgagaatttgaaactacctcacacctattaggttttttgccaaatactgagcggtcagaagtccgtacaaccattattttttattactgttttgcgaattagaaaacttagatgcagaatgtgtccacaggttagaagcaccaagaccagaacttgaaatcccttactttcagtacctttcgtcttaacccttaagaccagtgtctcttttcaagaaactcgatttaggaattgcggacacaaacggaatcagcccaaattgagccagagaaaaagatcgcaaagaccaagaggcgacttccggtcggggacgctgggagacgcgaaaccttttggcttcagtgcggaaccccaacgtggctgcgacaggctcagtgtcatcctctggaacccaggaccaggaacacagtgcacgcgccgtctccccgcttcctctaacacccaccagtctgctacgggtccccgaaagggcctcgttcccccagcccaagagagtggcgaagaaccggagggagccactacrgcattctacctcaccctctttgtgccctgccgcaaacccaaacaacaaaaatgaagcgtctggaaggcctctcagttagccttggacatgtccgacccctgtaggtgtcgactggatgccctccaggttcggatggcgaaggattgggagtcctgaactcaagtcttgcagacaggcccgcrattcttaccttgcaagatgggaaagagaattaaggtcccggcttccggtctataagcaatcatgggaagtgcgagtctcacttccttccggatctggggcatcatggggaatgtagtatttccccgttaagaaaaaagtagtaaatcctaggccgggtgcggtggctcacgcctgtaatcccagccctttgggaggccgaggcaggaggatcctctgaggttggcagttcgagaccagcctggccaacatggtgaaatcccgtctctactaaaaatacaaaaggtagccgggcgtgggtggtgcgtgtctgtaatgacagccagtcgaggcgcggaggcaggagaatcacttgaatctggaggtggagattgcagtgagccaagatcgcgacactgcgctctaggcaacagagcaagattctcaaaaaagaaaaaaaaaaaaaaaagggccggacacggtggctcacgcctgtaatcccagcactccaaagatcgtgccactgcgtgccaccgcactccagcctgggaaatagagccagactcagtctcaaaacaataacaacaacaaaaaaaagaaaaaaagaaaaaaaattagccgagtgtggttgttagtgcctgtagtcccagctattcgggaggctaaggcgggaggatcacttgagtcttggaggtctgggctgcagtgcagtgaactctaatcttgtcacttgagattaggtcagtggtcccctcttcccttaccttggatttagcggctgactacttcctcttgtacatggcctttctcattcccgtcctccggcctggcctacagaatgagactctgtcttaaaaaaagtaaaaaaaaattaaagtgaggataacaatagtaacttacttcataaggatgttgggaacattaaataatatatacaacagtactgagaagcatatttgattatttgatggatggtaaatgctacataagtgttagctctttttttttttttttttttttttttttttttttttttgagatggagtctcgctctgtcacccaggctggagtgtggtggcacgatcttggctcacggcaacctctgcctcctgggttcaagtgattctcctgcctcagcctcccaagtagcagggattacaggcgcacaccaccatgcccagctaattttttgtatttttagtagagacagrgtttcaccatgatggccaagctggttttgaactcctgacctcaagtaatccacccgcctcagcctcccaaagtgctaggattacaggcgtgagccaccgcacctggcgaactgttagctcttgttattgtcaccatcaccactacaatcatctgatcatcaacatcctagttgttgtcaagtattctgctaaagtttatgcatgggagataataggcaatattgcatacaatgtgccttgctttatttcatttaattctcccaacaacctgtgaatgatactattatgaggaaactgagtctcaaggacattaagtaacttgctcacagcatagatctgattccaaagattgcactcttaaccattaggctgcaagattaaagagatgattaatgaagatgcatgagagttttgctcatgttagaattaaaaataagaatatttattatcttttacaaaatacacaacacagtatatgtgatagttctttactgcttcaaagcccttaagccaacatgtacacatttgtaataccttctagcttgcgttttccattttcctccattcgtttctttctggttgctagagcttttcaccttgattttttcagatcgaaaccacctgcttcatggctgtgtctctgggaatcatttagcctttttctggttctgattcactgaggatacaaatacaatgatcagatgaacactgcccttttttttgagaatgggaatgtcagcagctttatttgtttagcttcctcagcaaagcacctcttagaaacttcaactgcagaaaatgtaccacaatgaatgaatgagatgcacagttgcttacgtgggcccctcaaaattgctggcaatctcagataatttcacctagtgaacgccccaaaatatgtgttgaatgacctgtcattaaaataaaaacgtagatgaaccccctcttgtgttttgttgcggtattgcaaaatttacaattcattagttgggcaaaataccatgttagttataaagtaaatgtttttattaagtttagttttgccatatataaaattctctgaaatttgtgcagcactttaatcacaaagcagacatttttgcagacacttaatcttttttttttttttctgagatggagtcttgctctgtcgcccaggctggagtgcagtgccgtgatcttggctcactgcaacctctgcctcctgggttcaagccattctcctgcctcagcctcttgagtagctgggattacaggtgcccgctaccacacctggctaatttttttttttgaaacagagtcttgctcttttgcccaggctggagcgcggtggcatgatctcggctcactgcaaccttcgcctcccgggttcacgccattctcctgcctcagcctcccgagtagctgggactacaggcgcccgccaccatgcctgactaattttttgtatttttagtagaggtggggtttcactgtgttagccaggatggtctcgatctcctgacctcgtgatctgcccgcctcgacctcccaaagtgctgggattacaggcctgagccaccttgcccggccaattttttgtgtttttattggagacaggatttcaccatgttggccaggctggttttgaactcctgacctcaggtgatctgctcacctcggcctcccaaagtgctgggattacaggcgtgagccacctcgcccagcctaatttttttttttttttggagacagagtctcgctctgtcgcccaggctggaatgcaaggtgagatcatggctcactgcagccttgacctcctgggttcaagcaatcctcccacctcagccccctgagtagctgggagtacagtgcacaccaccatacctggctaatttttttacattttttgtagagacagggtctcacaatgttgcctcagctgtattttttgtttgtttgttaggcagtaaatcttttaaagcctggccaacatggtgaaaccccatctctgctaaaaatacaaaaattagccaggcatggtggtgcatgcctgtaattccagctacttgggaggctgaggcacgagaatcacttgaacccgggaggcagaggttgcagtgagccgagattgtgccactgcactccagcctgggccacacagtgagactctgtctcaaataaataaataaataaataaataaataaataaataaatagaaaaatatctttatatgtgttatgtatgtgtgtgagcctgtgtatgggatgagtttgtgtgtttgtatatgtataaagtgtggaaagacatacaccaaaccattaacactgctggggattgggatatggagtacgtatgcatcaaggaacagagaaaattactgtttgttatttagtttgttgcaaggaacttgtattgcttttgtaattgagaaagaaattcaaataaagtaatggctattatctgaattaatctctaaatgaatatatctttttaaaattaagatggagttggccgggtgcggtggctcacgcctgtaatcccagcactttgggaagccaaggcaggtggatcacgaagtcaggagatcgagaccatcctggctaacacggygaaaccccgtctctactaaaaaatacaaaaaaattagccgggcatggtggcgggtgcctgtagtcccagctactcgggaggctgaggcaggagaatggtgtgaacccggaaggcagagtttgcagtgagccgagattgtgccactgcactccagcctgggcgacagagtgaagactccatcttaaaaagtaaataaataataataataaaataattcagattgaggtttttttgttttgttttgttttgttttgtttttgctatgttgcccaggctgccagtctggtctcaaactcctgtctcaagagatcctcctgttagctaccatgcccggccatataaatgaatatgccaggcactactccaggcatataaagatgggaagaccggccggacatggtagctcatgcctgtaatcctagcactttgggaggcggaggcaggatgattgtttgagcccaggggttttagaccaatctgggtaacatggcaaaaccctgtctgtattaaaaaaaaaaaaaaaggaagacaatgactttgtcttaaaaggagatcataatctaaagaaagacacagaacaacaatgacagaacccacaatgatgttgaaatgtgttaggtgctgatagaagcatgaagaggcagccccaggagcataggaaaggagtctctcttttattctcaaaaagtgaaagaatgttttctggaggagctgcttaagttggagtttaaccttgcatgactgttttccaggtggagaagggtttgaagagtattccaggcagtaggaactaaattttggaagacagggatgcaagaaacagctagaagcctttagaaactgctagattatgtgagggtgttggcacaggccatatctagaacggactgatgtgctaagggaaggagttcaacttaatgctagagggtttgaacctccttcatacaacaggggaggggagtgacgtgattagatttgtatttttaaaagattattcattctagctgcagagtgtgcagaatataggaaacactaggaaggtagtagttcctgcactcaaagagctaatagtttactttggaaaagagacaaatgatagccagcttttatcaagtgctgactttgccagacactgttctgagtatttcacaaacctatcctatggtaggattttgattcctactttgcagagaaggaaacagacacagaggagtcaaatgacttgcttatagacacccaggcagctagatcaagaacttaattggcagccaggcgccgtggctcacgcctgtaattccagcactttgggaggccgagtcgggtggatcacgaggtcaggagatcaagaccatcctggctaatgcggtgaaaccctgtctctactaaaaaaatacaaaaaattagccgggcgtggtggcaggtacctgtagtcccagctacttgggaggctgaggcaagagaatggcgtgaacccaggaggcggtgcttgcagtgagtcgagatcacgccactgcactccagcctgggagacagagtgagactgtctaaaaaaaaaaacaaaacaaaaaaaacccacaaaacttaattggatgcttcctatatgatacggctcttagatttatagtgtagcatgttaggttctaaggataggtgtcttggtgaccatctgacctgcactagagaatcgggtgaggcttgtattccagaggaagtggctcctagcctgagatcagaggcatagagttgatgtggaggacagtcaggaagaaccctctggggaaagaaagcagattgttaaaaggctctacgctgggaaagaatatggcatattgaggggagctgaaagtcattcagcatggctgggtcatagagaatgaagcgagtagtggggagacggggtggtgaagtgattggggaccagagttaaaaaaactctggtgcattggctcacgcctgtaaatccaaggccttgggaggtcaaagtgggaggactgcttgaggccaggagttcaaggccagcctgggcaacatagcaagaccttgggtctaaaaaaatttttttaaacttttttttgggccgggcatggtggctcacgcctgtaatcccagcactttgggaggctgaggtgggtggatcacttgaggtcaggagttggagaccagcctggccaacatggcgaaaccctgtctctactaaagatacaaaaaaaattagctgggcatggttgtgcgtgcctgtaatcccagctacttgggaggctcaggcaggagaattgcttgaatctgggaggtggagtttgcagtgagccgggattgcgccactgcactccagcctgggtaacagaatgagactccaactcaaacaaaacaaaaaacttttttttttttgtagggacaggggtcttactctgttgcccaggctgttcttgaactctttgggctcaagaaatcctcccacctaggagtcccaaaacactgggattacagaggtgagccaccacatccagggggataaaccttttttttttttttttggacttcattctaaaatcaaggagaagccattggtgaattcaatgtagggagtgactagttttgcagttttttttttttttttttttgagatggagtctcgctccgacgcccaggtgggagtgcagtggcgcaatcttggctcactgcaagcaccacttcctgggttcaagcaattctcttgcctcagcctcctgagtagctgggactacaggtgcctgccactgcacccagctaaattttgtattttttttttttttttttttttttgagacagagtctcgctctgttgcccaggctggagtgcagtggtgtgatcttggctcactgcaagctccacctcctgggttcacgccattctcctgcctcagcctcccgagcagctgggactacaggtgcccaccaccacgcccagctaatcttttgtatttttagtagagatggggtttcactgtgttagccaggatggtctcgatctcctgacctcgtgatccgcccgcctcagcctcccaaagtgctgggattacaggcgtgagccaccgcgcccagccctaaattttgtatttttagtagagattgtgtttgaccatgttggccaggctggtctcaaactcctgacctcaggtgatccacccaccttggcctcccaaagtgctgggattacaggtgtaagccaccgcacttggccacagttaattgtatttttagtagagaygagggttcaccatgttggccagactggcctcaaactcctgacctcaggtgatccacctgccttggcctcccaaagtgctgggattacaggcatgagctaccgcgccccgagtgacccgcctagttttgtagtttagattactctggctactatgtggagattggattaggaagtttaggcctgcaggcctgagatcagttaaaatgtagcttgtcatctagctggccaggatttagggagagggacaactgcttgttaaatggctcttatgtgaattaaattggcatatattaaaggtgatctttgtaaggagcacatgatgctgaagcagttagcacacagtatgagactcacttgtatatgaatgaaatgggcaagcattaaaaaaatgaggattttggagctatacagatatgggttaaacttatggctctgccattcactagatctgtagcctttatttatttatttttgagaaagagtctcaccctgtcacccaggctggagcgcagtggtgcagtctgggctcactgcaacctctgcctgtccggttcaagcaattctcccacctcagcctccggagtagctgggactacaggtgtgcgccaccaagcccgactaatctttgtatttttagttgagacggggtctcaccatgttggccaggctggtcttgaactcctgacctcaagtgatctgctctccttggcctcccaaagtgctgggattacaggcgtgagccaccacgctcagctagatctgtagccttcaatgagtcatatgcgcatcaatcaagtaaaagctctactcttctcaatctggtctgagctaccattattcccagaccagaatactatagtattccgtattttgactggcttctctgtttctggccttgctctcttgctcgagcttcacagagtgtccaaagtaatacttccgtaccacccggcccggcttttttttttttttttttttttttttttaagagacatggtcgcaccatgttgcccaggctggtcttgaactcctaggctcaagcaatcctcctgcctcagcctcccaaagttctgggatgaaggcgtgagccaccatacctggcctgagtgcagtggcgcgatctcggctttcagcagcctcgaccttccaggctcaagcaatcctctcacctcagcctcccgagtagctgggactacaggcgcgcgccaccacgcccggstaatttttgtattttttgtagagatgggatttcactattttgcccgggctggttcccaactcctggactcaagcgattcgcccgcctcagcctcccaaagggaagtgctgggatttcaggcgtgtgccaccgctcccaccccaaagtagtatttattgtaattattattattattttgagacggagtctcgctctattgccaggctggagtgcagtggcgcgatctcggctcaatgcaacctctgcctcccgggttcaagcgattctcctgcttcagactcccaagcagctgggactacaggcgccccccaccacgccaggctaattcttgaatttttagtggagacggggtttcaccatgttggccaggatggtctcgatctcttgacctcgtgatccgcccacctcggcctcccaaagtgctgggattacaggcgtgagccaccgcgcccagcctattattatttttttaggcagtgtcttgccctgtcgctcagggtgtagtgcagtggcgtgatcacgactcactgcagccccgacttctcgggcttaagttatcttcccgccgcagcctccacgcccggttagttttttgcattttttgtagagatgaggtcttgcttttttgcccaggctggcctcgaactccttggcttaagcgaacctcttgccgcagcctcccaaagtgttgggattacgggcgtgaaccaccgcgcccagcctactatctttatcttacagaaagaaaagaatggaggaaaccgaggctcggagacagtaggtaatttccccaaggttccacagctaatgagtggagcggcgatttgtggaacgaaatgaatgaaatcgatgtggcagcgggcccggacgggtcggtggcgtagacgcggagcgcgcagctcacacctggcggccgcggtttccaggaggaagcaaggatgctttggacactgtgcgtggcgcctccgcggagcccccgcgctgccattcccggccgtcgctcggtcctccgctgacgggaagcaggaagtggcggcgggcgtcgcgagcggtgacatcacgggggcgacggcggcgaagggcgggggcggaggaggagcgagccgggccggggggcagctgcacagtctccgggatccccaggcctggaggggggtctgtgcgcggccggctggctctgccccgcgtccggtcccgagcgggcctccctcgggccagcccgatgtgaccgagcccagcggagcctgagcaaggagcgggtccgtcgcggagccggagggcgggaggaacatgacatcgcggaggtgaggagccccgaggggcccggcgcgggcctcggcccggccaccgccgcgttcggttagccccgtccggaagggggcgccccggccgggcttcgggctcccgccccgggtcggggttgggggccggttccctcctcgtcccctcgccctccaggggccgggggccggccccaccgcgcccccacccctcgggtccccattcatttcctgcctccccgagttccggctgcggcagccccggggatgcccgtcaggcccggggcaggtagagccgccgagggaaccacgggtgccagcggccaggctcagcgccgcattcctgacccattgcctcatgagaattgcctcatggtgattccgaaataaccctgctcacttggggaggctccttgggacacgagaggggagttgcgcggggccgggcccccagtggtctagtcgttctggctcactgtgccactttcgtgcatttggggacttcacgcaggacccctgacccttttatatgcctctttgtgtcttcttttcctcctacccctcacgtgccagaaatggaaaaactgactgtatctgcagccactagaagtatttccttcctctgcgatcttcgctttgggagatggaaaggaagggagccgcatctcgttatttaatccttcactgcaaccttaacagtcaggtcactttactggtacccgttttatggatgaggaaaccgaggcccagaagcaacatgctagtaaatgacaagatttgaaacttaggaggattagtgagttaatgagatcctttgaaaggtcagggtaatactactactaatagctaacatttgcttagttctgaccacagccctatcagatggctactattatccccattgtaaagatgagtaaaccgagtttcagaggttaagtaaattgcctaacctcacagctagtaggtggtggagacagaatccctacttttaatcactatgttgcttctattattttgtaactattgctaaccatttgtaagccttaattttgttgtcaaacagtagtgtgacctgttgttttcagatagtgatcctgctattttgtatagtcactctatataccactcacacttaagacccattgtctattcttttccatgattgttcaattatggtcactgtctcagacatttaaaaaacgattcaagctattgaggctatttgaatgagattttcttttctttttttctttttttttttggagacggaggctcactctgttgcccaggctggagtgcagtggcgcaatctcggctcaccacaatctccgcctcctaggttcaagcgattctcctgcctcagcctcccaagtaactaggactacaggcgcaccactatgcccggctaatttttgtatttttagtagagacagggtttcactatgttggccaggctggtctcaaactcctgacctcgtgatccgcccgccttggcctcccaaagtgctggaattacaggcgtgagccaccgtacccagcctgaatgagatttttcaaaatattaggaatgtctcctccaaacacacctggcatgttattcatacatggatctggaatttaaaaaggggagaaaaagaaaactgagaactcgtaggaagtgagtgacttggacaggtcggttggcaagtgcttacagatctgggtaatatataactgcatttcaacagaacagtgtatagcctcaaatgttctaattctttagggagcttttaaataaacagttgtctattctttaatctgtcaaatagtcattgagccttttgttcctggtgtctgctcttccagacaagtaaggatctgctgctttaggagacatcagacggggctgggggttgggaaaaggtctgggtagtaatagaccctacattgtccagtttgttcatttagaagcatagaagtgtgggcatagtcaaagtagcaagtggtaaagatgacagtttgaaatggagtaattccttctcccctccagccctggtattatgcaccacccaaaaagccgggttatgaacataatacacataattttgaatgattcattattttttggattataagcctgttttatttgttaaccagccttaatgaggtataaatgacatgcaattaattgcatatatttaaatgtacaatttgatcagttttgacatacatatacacttgggaaaccaccaccatagtcaagataatgaacacatctatcacccctggtaattttgccttatgttctttataatccttcctttgttcttaggcagccactattctgctttctgtcactatgtattagtttgcatttcctagaattttatttttaaaaattttaaaattgtttgaatagagatggggtctcactgtgttgcccagggcagtctcaaactcctgggttcaagtgatcctctcaccttggcctcctgaagtgttgggattataggcatgagacaccctgcccagccctagaattttattattattgttattattgtgtttttttgagatagggtctcactttgttgcccaggctggagtgcagtggtgcaatcactgcagccttgttttcctaggctcaatccatcccccctcctcagctttccggttactggggctacaggtgtgcaccaccacacccggctaatttttgtatttttttatagagacagggttttgccatgttggccaggctggtctcaaactcccgggctcaagcgatcttcctgcctcggcctcccaaagtgctgggattacaggcatgagctattgcgtcccgccttcaaattactttaacctagtattaattcattcaacaggaagttaatgagccaggcaggataaagcagtaagataggaaaatattgctattttcatggctgagagagagcagacaaacacatgactaaatagggcaatttcaggtagtaataaattctaggagggaaaaaatcccacagaaatgtgaggatgggagaatgcagttagttttgataggtggtttagagaaggtgatcgtgtgagctgacacctgaatgacaattagtagtctgaattttgttttgcttaattatcaaaataactcctcttgggttcggcttttatatgcatccagtaattaaaatgtaagtatattcaatgtactgatatctctcagcatcataggtaggaaaactaaggcattcagcaattaagtgactcctcccttgatcatgtagcagtgatagtactggatttagattttgaggttgcttctctgcccttttctgcctttgtgaaaccaacaaagctgcctgtattttccaactcttccttcagcatgtggtacctcctttacatctgtttttgttgctctgaaatccatacgcgacgatgagctgagaggggcagaaaattgagcttgttctgagactggaggcttttggtttatctcttgcaggtcaagtacattttgtcctgggctctccctggtggccacgtttgtttatctcctgcgggagtaaataaacttgccttgctgaaaaataacagttctgtgtctttgcagtggaaactgggatgtctttattaacgttaggtcctgatgtaaggccaagtttttggttagagttgctcaagtgcagaggccactgctaagatgacttacccctcgtgtccatggtcaatgtggagactgttatgagtggcacatgatgctggaaaagcagagccaactcatgtttgtaattgtcctagcaggccgtggtgtactttgttaggcagccacagaacaatagagaaactcagcttattccccttccctctgggaaacacagacagtacttgccatccaacgccaatgtttttaaggaagaaagaggcaaaaagtgatgttggcaaggtctctgggagttgtggaccccaaccaaggattggagaccctgaaatggattcagatgccctaaaatgcagcccagttcattactatgaattttggaggactttgtgccttgagcaaatgtgtatatgtgacgctctttgacaacactgaaataggaaaaatactatccatgttcgcgaggagcactgaatttagagagggagacagacttttatgccagcatcaaatgaatttgataaagctagtaccaaaatgaaatttgaaattttttttttttgaaatagagtcttactcagtcacccaggctggagtgcagtgatacaatattggctcactgcaacctccacctcttgggttcaaacaattcttgtgcctcagtctcctgagtagctgggattacaggtgcgtgccaccatgtctggctaatttttatatttttagtagggatggggtttcaccatgttggccaggccggtcttgaactcctggcctcaagtgatctgcccaccttggccttccaaagtgctgggattataggcatgagctaccacacaagcctgaaatttgaaatgtattggtatagaatatactgtttagaatgtatgtgtatatatgtatatttgtatactcatataaacacaaatacacattgtatgtgtttctgtaatatgtatatctgtctacacatacatgtatatacacacatacaatgtcttttttttttttttttttttttgagacagggtcttaccctgttgcccaggctggagactgcagtggcataatcttggctcactgcagcctcgacctcctgggctcaagtgatcctcccatctcagcctcctgagtagctgggactgactacaggcacgtggcatcaaacttgtccaatttttctatttttttgtagagttagggtcttgctctgttgcccaggctggtctcaaattcctgggctcaagctgtctgcctgcctcggccttccaaagtactaggattacagatgtgaaccactgtacctggcctttacaatgtctattttaaagataatggttcaagtttttatcatcccactggcctactctaatgaaacatctatccattcattgaagaattatttatggtgggataactctgtgccaggtaccgtgctaggcattgagtattccaggttttaggaaacagcacatgcaaaagtgctgaagtgggagaagatctcggagtgattgaaggctaggagagagcaagtgtgggagctgtgaggctgggaaggtgggaggtaggtgggagcagaccacatagggattcttaatgtctttagtgtcatgtggaccatggagaggagtgtagattgtatttttagagcaatgcaaaatcatagaaggatgtgatcgggggagtggcatgagctgatctatttaaaaatatttctctggctgctgtgaaggaaggattgtaggaggcaggagtagattcagggagatgagacaagtgatgagagaggctttgaacttgggtaaaagtagtttgtggaaagtcttttttggaggtagtttttgtttattgccttgtcatcaaagcagagatgctgaccaatgaaactccatgagaaaatagtgatttataaagacatatctatgcactgccattaaaaagctgcttggaaaaaaaggataaaaagctgctttaacaacttttttttttgagatggggtcttactctgtcacccaggctcacgacctcagctcactgcaacctctgcctcccaggctcaagcattctcccacctcagcctcccgagtggctgggactgcaggc

SEQ ID NO: 98081 - DNA, 23976 bp, Homo sapiens
cagtgatctcgccttacactttgaaaaccaaggtaggagacagatgagatggaaggtagggccgtttccagaacaagagtagtcgctaatatgggaactagtataaacaactcctacctgacctgggcgacgtatgctgggccctgcgctaagccttttacaagtattacatcactgaatctaaatgaccataacagggaggacttcagaaaaaggaaataacccgcaccaggcatgcacagcaagtcagcagtggggtcatgattaagcctgcgccaaagtgtagagggtgcccctgggaatccaggccaggcagatgagtggcccaggtcgcgatggtgaccgacaggaaggccgcagctgggacccacggcgaggctcgaccgtgctgggggtcgggctcgcgtgtacacacttaccggggtgcaggtgagcgcgcaatgcgcgtgcacagaccaatgccccgagaggacagtgagcgcgtgcgcgaggcagatggtggcaagcacgagcagcgcagcttcggggatctgcacccaactgctgccccagccccagcagccagcggctgcggcacccaaccaggccgggtaaagcagcccggcgaatggcagcaccgtgaggcgccgcaacagcgccaaccgccggtacggccacacggcagccaccagctcgtcaccgttcgctatgagcgccggcccggcggcaaggagcgcgcgcggctgcggcccgggcttgggctgcccgtcaggccggaccccgcaaggccgggccccgcagggcaccgcgttgcccaccgccgccgctgccgccatctttcctagcgccgcgctcacttccgggcagaggaacgcctcacttccgaagttttacttccggtaagccctgagcgccgccatggcagcctggactaggaagagccagggcaacagaacaggctggccccggcagggactacttcgggtgccgccatgacaggctgtggccggaagaagaggctgggcgtcgccatgacagagagggactggaagacctaacggtgcctgcctccgctgccacgccggactgagaccggaaaagacaaggccggcaaggcgggcttgggcgccaccatgacaacctgaaccaaaaaaagcgagccctcctccttgactacaccagcaccacctgtcaccaggggcgaagcctggaccctgcggaggcggggtcgggagcttcggagttcaggaggcggggcccggtgcggggggcggggcttgtgaggggcggggtcggggaccgccccggaacacaaccacaccggacaagagccttaatgtgatagataagaattacaaatactagccgggcgcggtggctcacgcctgtaatcccaacactttgggaggcgaggcgggtggatcacctgagatcaggagttcaagacccaacatggtgaaaccacgtctctactaaaaatacaaaaattagccgggcgtggtggcacatgcctgtaatcccagctactcgggaggatgaggcaggagaattgcttgagcccgggagacggaggttgcagtgagccaagattgctccactgcacttcagcctggccaacagagcaagactgtctcaaaaaaaaaaaaaagaaaaatgaattacaaaaaccactttaggccgggcgcggtggctcacgcctgtaatcccagcactttgggaggccgaggtcaggagatcgagaccatcctggctaacgcggtgaaaccccgtctccactaaaaatacaaaaaaaaaaaaaaaattctccgggcgtggtggcgggcgcctgtagtcccagctactccggagcctgaggcagaatggcgcgaactggagaggcagagcttgcagtgagcggagattgtgccactgccctccagcctgggcgacagagcgagactctgtctccaaaaaaaaaaaaaaaaaaaaaaagaaattaccactttaacataaaaaatgaaaaactggtgtttacttgaaattatatacttctaggccgggcgcggtggctcacccctgtaattccagcactttgggaggccgaggcgggcggatcacgagttcaggagatcgagaccgtcctggctaacacagtgaaaccccgtctctactaaaaatacaaaaaattagccgggcgtggttgcaggcgcctgtagtcccagctactcgggaggctgaggcaggagaatggcctgaacctgggaggcggagcttgcagtgagccgagatcgcgccactgcactccagcctgggcgacagagcgagactctgtctgaaaaaaaaaaaaaaaagaaattatatagttctatattattaactgtactgttgcataaatgctatttgaacaaaaccacaataggactacttaacagtaccaattagtaggattaaacagtatgtgtgacaaacagtaactattttatgtttctttttgtcctctgatacagcaaatttatttaaacttaaaatttattggatatttaaattttgtagcttatattgttgcatattctttttttaatttttcgagatgaagtctcactctgtcgcccaggctggagtgcagtggcgcgatgtccgctcactgcaaactccactttccgagttcaatcgattctcccatttcagcctcccaagtaactgggattacaggcgcatgccaccgctccggctaatttttgtacttttttttttagacggagtctcactctgttgcccaggctggagtgcggtggtgcgatctcagctcactgcaacctacgcctcctgggttccagcggttctcctgcctcagcctcccgggtagctgggactacaggcgcgtgccaccatgcctggctaattttttgtattttcagtagagatggggtttcactatgttggccaggttggtctcgaactcctgaccttgtgatccgcccactttggtctcccaaagtgctaggattacaggtgtgagccagcgctcccagtctaatgttttgtgtttttagtagagacgggtttcgccatgttggccagtctggtctcaaactcatggcctctaatgatctggccgcctcagtctcccaaagtgctaggattacaggtgtgagccacggtgcccagtcctagtcttgttttgttttcttgggacggagtctcactcttgcccaagctggagtgcagtgttgcaatctaggctcactgcaacctctgcctcttgggttcaaatgattctcctgcctcagcctccttagtagctggaattacaggcatgaaccaccatgcctgctaatttttgtatttttaggagagacagggtttcaccatgttggccaggctggtctggaactcctgtcctggcctcaagagatctgcctgcctcgacttcccaaagtgctacaggtgtgacccgctgcggccacccactgcatattctggtttttttttttttttttttttgagacggagtctcactctgttgtcaggctggaggctggagtgcagtggcgtgatctcagctcactgcaacctctgccctcggagttcaagcgattctcctgcctcagcctcccgagtagctgggattacaggcgcctgccactgcacccagctaattttttgtatttttagtagagacggggtttcaccttcttggccaggctgagtcttgaactcctgacctcgtaatccacccgcctcggactcccaaagtgctgggattacaggcgtgagccaccgggcccggctctggtttttttttttttttttttttttttttttttttttttttttttgagatggagtcatgctctgtcgcccaggcgcaatgctgtgatctcggctcactgcaacctcctcctcctgggttcaagcagttctcctgcctcagccttcttagtagctaggattacaggcatgcgccaccacacctggctaatttttgtaattttagtagagacggtgtttcaccatgttgggcaggctggtctcctactcctgacctcatgatccgcctgcctgggcctcccagagtgctgggattacaggctgagccaccgtgcccggctgcatattattaagatacatgacttcgtaaaaggagaaaggaaatgtaataggacttaataatcacatagtatcaaataagataatcttcagtaaaaataggaatgacatgtttctgtcccatgatacagttcgatatacttactttttcagttttttctccaatattaattctttcccatacaaggtccaagcttctgctcttggagtctgggactggacccctttctggtagcaatacctttatagaatgtttactccaggccgggcacggtggctcatgcctgtaatcccagcactttgggaggccaaggcgggcagatcacgagttcaggagatcgagaccatcctggctaacacggtgaaaccccgtctctactaaaaatacaaaaaaaaaaaaaaaaaaaaaaaattggccgggcatggtggcacatgcctgtagttccagctactcggactcgggaggctgaggcaagagaatctcttgaacctgggaggcagaggttgcaatgagctgagatcgtgccactgcactccagcctgggcgacagagccagactccgtctcaaaaaaaagaaaaaaaaagtggtttactccagtttttccctgcatttaataattttgttccctttaaggcatgtttttattttcttggctgaaaaggagtagcctgagaagaagtaacgtgtaggaagccttggccatgggaccaatagcctcatcttaaattcctgatctctggaggacatcagggcctcctacctgttccattgtgacctgggagtctctccagctccaaggtggagggatggcttcactgaacacggagtctggaatcccgtgcacactcatgtgaccggtgttccggaaaaagaagcaggaggcggctgggcgcggtggctcacgcctgtaatcccagcactttgagaggccgaggccggcggatcacgagatcaggagttcgagaccagcctggccaacatggtgaaaccccatttctactaaaaatacaaaaattagccgggagtggtggtgggcgcctgtaatcgcagctacccgggaggctgaggcaggagaatcgcttgaaaccggaaagcggaggttgcagttagctgagatcgtgccattgcattccagcctgggcaacaagagcgaaactccgtctcaaaaaaaaaaaaaaaagcagcaggaaggacccactgagtacaggaagccgacagggcctgctccggaaaaccaggagctgtaaggtcagccgaaaggacgaagagacctgaagtcagtcaagtaagttttattaacctgctgggctgctcccccacagttagaggaggcagccccgcttacagactacagcagggctttatagggcgaggaactgggctggggtgtgagaactgagtcgggggtgcaggtgtcctgaccgcatcctggagatgtttttgccagctttgttatgcaaggtgggcaggtgttgtgaccgcatcctggaactgtctgccggttcagctgaagtcttttgaacaaacagttactggaagggtcagtggggaggaggtctacttctagcccggggggagttgtgtggcggtcacaaaggactgtattgtaagactgatgggggaaggaggggaacagtctggttgggttgaccctaacgggagcaagttctgcttccatgcaagtccaggtccaaggtcccagcgaggggctgtgggtagcacctgtcagtcacaccccacacagcgagcggattatttgaggattccgatcacctctcctgtcgctcaagccccaggggcgggacctggggcaccagccagtcagaggcgctgtgcggcaaactgtccaatcaggtgcgccgggaggaggggcaacttccaaagcccgaagcggtctcatttcccgccggccccccattcgggtccgggttttagttcctcggggagcccctggtgccccggatacggctgattytgtcgtgtgggacctgttctggctgctccagccccaggaaggacccaggacacccggaagccggaaatggtgagcgtgcggagccgggcgtccggagacctgaggaggagctggtcggaaccggcagtggctggacctgggcctccccgcggcgactgtgggggtctgggacccgagtcccccaggcgcagctcgacccttggtcccctcggtcgccgggtggagctggaccagccgccgggaccccgggtgtcctgtcccggccccggagccctctcagggcagctccgcgcccgcagccccgcgtctccccagatcgtgcgggggcctcaggagggtcttagggggaatcccgcctcgggtgtggggttcgtgcgggaggagccgtggcctgtggggtccccagttcctcctcccttaggcggtccccgtttccttcggagtcttccaaaggtgtgggaagctgggtttcaaacccacgaccccgtcccccagcttcgctsctcccagggctgcagtaaatccctaaatttccccgcattccccaaccctaagttctccctccagtacatccacttcacattattattattatcattatttctattatttttgagacggagtctcactctgtcgcccaggctggagtgcagtggcactgtctgggctcactgcagcctccgtcttccgggttcaagtgattctcctgcctcagcctcctgagtagctggaattacaggtgcccgccaccacgtccggctaacttgtattttcagtagagacaggttcaccatgttggccgtgctgaagtcctgatctcaggtatctgcctgcctcggtctcccaaagtgctgggattacaggcttgagccactgcgcctggcaagacccagtgttttaactgtcatcttttccaaggagccctagatggcacttcttaaaaagttcattttccgtttgtgaacatttcacatgcgagcaaagcagaaaataaccccctgacactccgatgttaaaaaaaaaaaatcactgtgcctgccctctttttacsttccctaggcgcggccaccttatcagacagtctttgggtggaggcttctcttgggaacttcacagggtattgggtcctcagcccaccctcctatctttctggtcctgggtttcaggaccgtccagggacttcttccagctgccctcggaagaacgggtgaaaagtctgtcctggcgtggttaatctttcctggttgtttgatgagcctcctagggaggagttcttgtcttttgaaaagaagtttccttaggaaattccagagggattccctgctggcccttgggggtggggtggggccagaaacagtagaaagaaacttctcccttctgaggcagctcagggtggcatgcagtggcacagtcatggcttactacggcctcaacctctggggcccaagcaatcctcctgcctcagtcttccaagaagctgggaccacaggcatgcgccacgcccggctagtttttattttttgtagagacaaggtctcactatgttgcccagtctgctctggaagtcaaaagcgattctcctgcccaggtggctcacgcctgtaattccagcactttgggaggctggggcgggaagatctcttgagcccagaagtttgagaccatcctgggcaaagtggcgagaccccatttctacaacaaatacaaaaattagccgggtatggtggcgcatgcctgtagtctcagctactcaggagactgaggtgggagagccacctgaacccggggaggttgagactgccgttagctgtgattgcgccactgcactgaacgacagagtgagaccctgtctttaaaaaaaaaaaaggaaatcttccattatggctgcagaatatgaatacattcccacaaaaaaaaggcatggtaggtcgggcgcgatggctcacgcctgtaatcccaacactttgggaggcagaggcaggcagatcacgaggtcaggagatcgagaccatcctggctaacacggggaaaccccgtctctactaaaaatacaaaaaaattagccaggcgtggtggcgagcgcctgtagtcccagatattctggaggctgaggcaggagaatggcgtgaatccgggaggcggagcttgcagtgagctggagatcgcgccactgcactccagcctgcgcgacagagcgagactccatctcaaaaaatacataataaaaaaaggcatggtagataagcagaaattagtgatttacaaagattcaccagcacatcagctcctctcctttgcaggttggggaatttgtgatggtggataactctgttctgttttgtgttatctggatttgacagattaacgctgaatcctttgggataagtttggcaacatctagaagtagtcagatatgatcttttgtttactgaatagtttattatggaaaaaatactgaatgacatctgaaagtgatagatactcatctcttttcctaaggatactaatctgtactcctaggtctctctcatgatctcatgtaatcccagttatttcccagagttgctgcccgtaatattaataccatcaccttaggtgttaggattttttttttttttttgagacagagtcttgctctgtcgcccaggctggagtgcagtggcgcgatctcggctcactgcaagctccgcctcccgggttcacgccattctcctgcctctgcctcccgagtagctgggactacaggtgcccgccattacgcccggctaattttttgtatttttagtagagacggggtttcaccgtgttagccaggatggtctcgatctcctgacctcgtgatccgcccgcctcggcctcccaaagtgctgggattacaggcgtgagcccccgtgcccggcagatatttttcaacgtatgctttttacatcataatcattttattcacgagacattttcagacttcaagaaaaatttcagtaggctttgttcttttctaaaaattgacttcaacggcttgtaacagcaattcaagatgaactgagggcaggaacactggcaaacacctgtaattctaggtacttgagaggctgaggcgggagaatcgatttagcccaggagttcaagtccagcctgggcaatatagtgagacccccatcttaaaaaatgtgtgtgtgwatatatatatatatataaattatatgtatgattatatatatatttataagttgtatgattatatatatttataaattttatgtatgattatatatatatttataaatttatttattttatttttttactttcgagacaaagtcttgccctgttgcccaggctggagtgcaatggtacaatcttggctcactacaacctccgctaaagtgattctcctgcctcagccctcccccacgcccggtagctgaacccggtagctgaatcctgagtagctgggattacaggtgccctccaccacacctagctaattttttttagctttagtagagacagggtttcgccatgttggccaggctggtctcgaactcctgacctcatggtcctcctgcgtcggcctcccatagtgttgggattacaggcgtgaaccatcacattcagccctatatgcattttagaacgggctttttttttggcggggggggtctctgttgcccaggctggagtgcggtggcacgatctcagctcattgcaacctcygcctcccaggttcaaacgattttcctgcctcagcctcccaagtacctgggattacaggcacctgycaccacgcccagccaattttttgtatttttagtagacacggggtttcaacatgttggctaggccagtctgaaactcctgagctcaggcaatcctcccacttcgacctcccaaagtgttgggattataggcatgagccactgtgactggctggtatttttatttctgaaaaaagaaaacaaaacaaaaaaaaccagacatgggattttgatagggattgtattgaatttgcagatcattttgggtagtagtaccttccaaataatgtaaagtcttttttttttctttgacacagagtcttgctctatcacccagactggaatgcagtggcacggtcttgactcactgcaacctccacttcctggtttcaagccattctcctgcctcagccttctgagtagctgggactacaagcgcatgccaccacgcctggctaatttttttttttgtattcttagtagagatgggattttaccatgttggccaggctggtctcaaactcctgacctcaggtgatttgcctgccttggcctcccaaagtggtgggattacagatatgagccaatgtgctggcttttttttttttttttttttgaattggagtcttgctctgtcgccgaggctggggttcagtggcatgatctcggctcactgcaacctccaccttctgggttcaagcagttcttctgtctcagtctccggagtagctgggattacaggcacgtgccaccacacctggctaatttttgtattttcagtagagacagggtttcatcatgttagccaggctggtcttgaactcctgaccttgtaatccacccacctcggcctcccaaagtgctagggttgcaggcatgagccaccgcacctggccaaataatgtaaagtcttcgaacacatgaacacaagatatttttcaatttgtctttaatttcattcagcaacattttgttgtttttagtgtacaagtagtctttcgacttcttggttttgtaatttctaagcgttcaattctttttttttttttttttttttttgagacagagtctcactctgtcgcccagtctgggctatttggtgtcctgggttttatatttgttgaggctttttaaattattattattattattattattttgagatggagtcttgctttgttgcccaggatggagtgcagtggtgcgatctcagctcactgcaacctctgtctcctgagttcaagcgattctcctgcctcagcctcccaagtagttgggattacaggtgcctgccaccgcgcccgactaatttttgtatttttagtagagacggggtttcaccatcttggccaggctggtcttgaactcctaaccttttgatccacctgcctttgcctcccaaagtgctgggattacagatgtgagtcaccgcgcctggcctattcaattctttttggtgctattgtttgtggtattgttttcttaatttctttttcacattattcagttttggtgcatataaatgtagctgacttttttggtcttgagacagtctacctctgttgcccagactggagtacaatggtgtgatctcagctcactgcaacctctgcctcctgggttcaagtgattctcctgccttagcctctcgagtagctgggactacrggtgtgggctaccacacctggctgattgtgtatttttagtagagatggggtttcaccatgctggtcaggctggtcttgaacttctcacctcaagtgatctactcgcctcgacctcccgaagtgctgggattacaggcgtgagccaccgcacccagccccattgtttttcatatttgaaccatccttgcattttgcggataaatctctcttgatgatgtcatataatcctttaaatatgctgtcaggtatgatttgctagcatttatttgaggattttttgcattgatattcataaagggcatttgtagttttgttttttgtagtgtctgtctttggtgtcagcataattttgacctcatagagggagtttggaaatgtcccctcttcagttttggaagagtttgaggaggattgatagcaattcttttttaaatttttggtggatttcagcagtgaaactatttggtgtcctgggttttgtattcgttgaggtttttaaaattattattattattattttgagatggagtctcgttttgtcgcccaggatggagtgcagtggcgccatctcrgctcactgcaacctctgcctcccaggttcatgccattgtcctgcctcaacctccccagtagctgggactacaggtgcctgcctccatgccagcctacttttttgcgtttttagtagagacggggtttcaccgtgttagccaggatggtctcaatttcctgaccttgtgatccaccctcctctgcctcccaaagtgctgaggttacaggcatgagccaccgcgcccagccaatttattatttttcttaatttattttatttttttgagatggagtttcactcttgttgcccaggctggagtgtaatggcatgatctcggctcactgcaacctccgcctcccgggttcatgggattctcctgcctctgcctcccaagtagctgggattaccggcgtccaccaccatgcccaggtaattttttgtatttttagtagagacggagtttcaccatgttggctagcctgtctcgaactcctgacttaaggggatccacccaccttggcctcccaaagtgctgggattacaggcatgagccaccgtgcctggctattttttttttattactatgccaatctcctgctactacagctctgttcagattttttgttttttcatgactcagtcttggtatattgtgtatgtgtagacatttgtccacgtaatcagttatataatttactgaagtattctaaaggacttctgaaattaagcctgagttgtacagttttttgtcctctgctgtatgtatgtattctgctgctgttgctgtgagtgtaaggggtgaggtgaggggaatcattctattgacctatgacttagcctcatttaaagataataggccgggcacagtggcttatgcgtgtagtcccagcactttcagaggcgaaggtgggcagatcgctttagcccaggagtttgagaggagcctgggcaacacagggagagcctatctctacaaaaaatacaaaaattagctgggtgtggtggtgcccacctgtagtagggaacaaggtgggatgatcacttgagcctgggaggttaagactgcaggggccatgattgtaccactgcactctagtctggacaacagagtgagatcctatctcaaaaaatattatatcaatctttatttatttatttatttggagacaaagtgtcactctgtcacccaggctggagtgcagtaacacaatcctagctcactgcaaccttgaattcctgggctcaagcaatcctcctgccttaacttcccaagtagctaggaccacagacacctgctaacataccctgctaatgtttttaaaaaatttttctagaggtggctataacttttaatttttttgttttttgaggtggagtcttgctctgttgcccaggcccaccatgccaggctaatttttctatttttaatagagaccagttttcactatgtaggccaggctggtctttaactcctgacctcaagtggtccaccctactactctacatgcctgctctgttattaaccaagttttcatatgaatactggcccattgaagactcttctttttccttgatctatttgtttatctctctgctaatagtatgctgtcctgaatgtgatggtttggaaatctttggtgttaggtaagccatccacctgctattcagaaggctttgacaattattagatgttaattcctgcacaccaggtggtgggaggtttggaaaagtagcttttgtttacctaaaatgtctgttttggggatttttttttttttttgagacrgcgtctcgctctgttgcccaggctggagtgcagtggcatgatctcagctgactgtaatctccgcttcctgggttcaagtgattcttctgtctcagcctcccaaatagctgggactacaggcatgcgccatcacgcctggctaattttttgtatttttagtagagatggggtttcaccatgttggccaggctggtctcaaactcctgtcctcaagtgatccacctgcctcggcctcccaaagtgctgggattacaggtgtgagtcaccacacccagctgtattgggtatttatgaaattttrtaaggatatcatttggaagaagggacatcttattgagttttttctaggaacacatgttatctttccacttactccatactgctttgacattacctgacagaaattttaaaattcttccattaggacaattaaatattgatcatgaatcttatttactacttgattaaatttggtctagagtaaactgcttgcaagcttcaggatattctctcttggtataaccacatgggatgagctcagttccccaggggacaagttgtgacaacacgtgtgacatattgtctcccaggaaagctcattaaagactctgtgcccagagtgtttttctggggctagtgccctaggcaccacttctagtttggaacaaaagagtaggctttcagaaggaaaacagttcagtcagtaccatcctgtttgtcaataccataaaccgtttagccacagtaagccactttgtcacttaagttgatgggatccctctcgtagtctaagttgaccccgatagtagcaaaggtcgaacttggtaaacaggcctttctaaggatacccagactcaggactgctgaaatgagcrctgtctgcacaccaggtggtgggagtttgttgtgacaggtactagagattcactctgcaaagagcatttggggcaacgcagcagcacaactgactccctggacccaccacagagagggtggtcctcctctgtggctggctctctgagtaggtcagttctcacactggaactgctgcgagggaggaagtgcrtgtagatagagaggaggaggccratgactcaatcatggagtgagtgtttggagagcccrgcgtcatgggatcactcatgtattgagtagagatccccagtgctgagtctcacccctcctcctccacacctgtgggatgtttcaggactcagtggcctttgaggatgtggctgtgaacttcacscaggaggagtgggctttgctgagtccttcccagaagaatctctacagagatgtgacgctggaaaccttcaggaacctggcctcggtcggtaagaaggacatttccttccttagtcaattagaagacaagtgtgytttggtcaccagtgtggttgcacagtttggaatgtggaaagagaatacgttggtgaataaatggggcatcgtgggccaggtacagtggcttacccttgtaatcctagtgctttgggaagccacggtgggaagattgcttgcgtccaggagtttgagaccagcctgggcaacatgatgagaccctgtctctttwaaaaaaaaaaaaaaaagtggggggtgggcaattgtggcagctcacgcctataatcccagcactttgggataatgttgagataatgttgagaaatgcagaagtattgctgggtgtgatggctcctgcctgtaatcccagcactttgggaggctgaggcaggtggatcacctgaggtcaagagtttgagaccagcctggtcaacatggcgaaacctcatctctactaaaaatacaaaattagctgggtgtggtagtgcatacctgtaatcccagctactcgggaggctgaggcaggagaatcactagaactcaggaggcggaggctgcagtgagcagagattgcatcactgcactccagcctgggtggcagagtgagactttgtctccaaaaaaaaaaaaaatcaggcattgtggcagtgtttaatgaacttagaacctagtgatttttctgtaattttaaataattcataataatttctctgggtctacrttttaggaatccaatggaaagaccaggacattgagaatctgtaccaaaacctggggattaagctaaggtaatctccactcacaagaggaagcagtgtctcttgagggaatcttagtaggtcaggaaaatttttwaaaaaatacaagacaaataagtacaatgttaggtttttaactgattattagaagattgctaccaaaaatctatccttcaatgtaatgtagatgttgagtgtctggacagggtactaagaatctgtgacatggatgtcactgtttggataactgctatggggagctgggtagcagaatcatcaatacacttcctttctaataattctgacccaggagaaaacctccacttttcctgattttggtagcagcataagtcttaagacatgtcaattagtagaaaagcattaataaaccaagcattgataatgcgtttgtcatttttcatagaagtctggtggagagactctgtggacgtaaagaagggaatgaacacagagaaactttcagccagattcctgattgtcacctgaacaagaaaagtcaaactggagtgaaaccatgcaaatgcagcgtgtgtgggaaagtcttcctccrtcattcattcctggacaggcacmtgagagctcatgctggacrcaaacgatctgagtgtggtggggaatggagagagacgccccgtaaacagaaacaacatgggaaagcctccatttccyccagtagtggtgcacggcgcacagtaacaccaactcgaaagagaccttatgaatgcaaggtgtgcgggaaagcctttaattctcccaatttatttcaaatccatcaaagaactcacactggaaagaggtcctataaatgtagggaaatagtgagagccttcacagtttccagtttctttcgaaaacatggaaaaatgcatactggagaaaaacgctatgaatgtaaatactgtggaaaacctatcgattatcccagtttatttyaaattcatgttagaactcacactggagaaaaaccttacaaatgtaaacaatgtggtaaagccttcatttccgcaggttaccttcggacacatgaaatcagatctcacgcgctggagaaatcccaccaatgtcaggaatgtgggaaaaaactcagttgttccagttcccttyacagacatgaaagaactcatagtggaggaaaactctacgaatgtcaaaaatgtgccaaagtctttagatgtcccacgtcccttcaagcacatgaaagagctcacactggagaaagaccttatgaatgtaataaatgtggtaaaaccttcaattatcccagttgttttcgaagacataaaaaaactcatagtggagaaaagccatatgaatgtacaaggtgtggtaaagcctttgggtggtgcagttccctccgaagacatgaaatgactcacactggagaaaaaccctttgattgtaaacagtgtggtaaagtctttactttttcaaattaccttagacttcatgaaagaactcatttggccgggcgtagccagtgctttggcaggaggcagggggatcacctgagcccaggagtttgagaccagcctgggcaacataagaaggccccatatcggctgggtacggtggctcacgcttgtaatcccagcactttgggaggctgaggcgggtggatcacctgaggtcaggagttcaagactagcctggccaacatggtgaaaccccgtctctactaaaaatacaaaaaaattaactgggcatggtggtgggcacctgtaatctcagctactcgggaggccgaggcaggagaatcgcttgaacctgggaggtggaggttgcagtgagccgagatcacgccattgcactccagcctgggcgacaaaagtgagactccatcacacacacacacaaaaaagccccatatcacgtggtggctcatgcctgtaaaaccagcactttgggaagccgaggtgggtggatcacgaggtccagagatggagactatcttggccaacatggtgaaaccccgtctctactaaaaatacaaaaattagccaggcgtggtggtgtgtgcctgtagtcccagctactcgggaggctgaggcaggagaattgcttgaaccagggacttggaggttgcagtgagccgagatcgcgccgctgcactccagcctggtgacagagcgagacttcgtctcaaaacaaacaaaaaaaagaaggccccatatctccaaagaaaaaaaaaattaactgggtgaggtggtgcatccctgtagttctagctgctcagaaagctgaggtgggaggaacccttgagcctgggaggttgaggctgcagtgagctgagatcgtgccactacactccagcctggatgacggtgacactctgtctcagaaaaaaagggaaagaaataattctcatttatacaggagagaaatcctatgaatgtaaggaatatgggaatacattcagtttccaaagatatgaaaagactaactggaaaaaaatccaaagacctcagatattccagttctattcagagccataaaaggactcatactggagaaaaattgtagaaatgtacagaatatggggaaactctcattgctctcatctccattcaaagacacgtgtcagtgcacactggagatggatggtatgaatcgaagaatacacactggatggaaacgttagtagtttggaaaatacaggaaacttcaattttaacaataattaaaattcacatgggctgtgcacagtggctctcccctgtaatcccagcattttgggaggctggggtgggtagattgcttgaggccaggtattcaagaccagcctggcaacctggagaaatcccatgtatacaaaaaatagaaaagttagccagggatgatggtgttcgcctgtagtcccagctactcaggaagctgaggtgggaggattgcttgagtttgggaggtcgaggttgcagtgagtggagattgcgccactggactccagcctgggcaacagtgagaccctgtctaaaaaaattaatcatgtgagaacatccactcgaaagaaatcctataaacgtaagtaattttgaaagcctgatgcaaattaattattatataatgctcaaaaacttaatcatgaatgagttattacacaaagttataaatatatagcatttatcagtggctcattcttttttctttcttttttttttttttttttgagatggagttttgccctgtcgcccaggctggagtgcagtggcacaatctcggctcactgcaacctccgcctcctgggtgtgagcaattttcctgcctcagcctcctgagtaactgggattataagcacatgccaccacgcctggctaatttttttgtatttttagtagagacggggcttcaccatgtggttcaggctggtctcagactcctgaccttgtgatccgccctccttggcctcccaaagtgctgagattacaggtgtgagccaccgcgcctggccttttttttttttcccgagacacagtctcactctgttgcccaggctagagtgcagtggcgcgatcttgactcactgtaacctctgacttctgggttcaagcaattctcctgcttcagtctccgaagcatctgggattacaggcgcacgccaccatgcccagctaaatttttggtatttttgtagaaacagggtttttccacattggccaggctggtcttgaactcctgacctcaaggaatccatcctcttcagcctcgcaaagtgctgagattataggcatgagacaccttgcccggcccctgtgactcattcttaaaaaggatctttggattatgggtttccacttttgcaaggaaatgtgagaatgatactctttaagcagtggtacctgaggtttaataggaagtgtttttatcctaagttagttaataaaatttttttctatccattttagttttcatttttttctatccattttaaagtgttggatctgtgggtgaagtgaaatttatttctaatatgtaagcaggtttaatttttatgtagtgtttaattgttctgtgatgaatgggccattacaaaatgagtctatttttgtttgttttcttttgtttttgagactgagtcttgctctgtcgccaggctgaagtgtagtggcgcgatcttggctcactgcaacctccacctcccgggttcaagtaatccccctgccttagcctcctacaggcgcgtgccgacatgcctggctaattttttgtattttagtagagacggggtttcattgtactggccaggatggtcttgatttcctgaccttgtgatccaccccaccttggcctcccaaagtgctgagattacaggagtgagccactgcgaccggcccatgagtctttattaatagagatttcttactggtgttatgtggcagattctgcatattcctcacccatcatatgtattccactttcctttattatggggaaaactactctttttggcatgatacaatgttgactccattttctttgctaataaggacttggtatcaatttatcagtatgtaaagtttaccatagagtattgtctcatgtgaatcattcccattttttgctctttactctttgtcgttatttctgagtattatttggatggttcattttgacttaaggatagccctgtgatatgacaatatttttatctaatctgatggagaaagcatttagtctcctgatcaagtatgatgttagctgcaggtttttaataaatgccttaattcagtttgaagaagttcccttctgttcattatttattgagtgtttcatcaagttgtattgaacttttttgcatctattgggatgatccccttttttttttttggaaacaaagtttcacacttcttgcccaggctggagtgcagtggcacaatcttggctcactgcaacctccgcctcccaggttcaagtgattctcctgcctcagcctcccaagtagctgggattacaggtgccctccaccacgactggctaattttttgtatttttagtacaggtcaggtttcaccatgttggccaggctggtctcgaactcctgacctcaggtgatctgcccgcctcagcctcccaaagatcctgtggtgtttagtcagttttgcattgctgtaaagcaatgcctgacactgggtaatttgtaaagtagagatttcattggctcacgattctgcaggttatagaggaagcatggtatcacatctgctgggtttctggtgaggcctcagagctcttactcttggcagaaggtgaagtgggagtaggtatgtcacaaggcaagagtaggagcaagggagagagagggggaggtctcagactctcttgagtgagcattcactcatccctaagggatggtgctaggccattcatgacggatcagccccaatggtatgatacttcccactaggcccaacagccaacactggggatcacatttctttttttttttttttttttttttttttttgagatggaggtttgctctgtcgccgatgctggagtacaatggcgcgatcttggctcactgcaacctccacctcctgggttcaagtgagtctcctgtctcagcctcccaagtagctgggattacaggcacaccactacgcccagctaatttttgtatttttagtagagataggttttcaccatgttggtcagcctggtctcgatctcctgacctcgtgatccgcccgccttggccttccaaagtgttgggattacaggtgtgagccactgtgcccagcctggggaccacatttcaacaagagatttggagaggacacatctaagtcatataattccacccctatccctccaaatctcatattctcatattgcagaatacaataatcccttctcaatagtcacccagagtcttaactcattccagcattaactcaaaagtcaaaagtctcacatgagactcatgaaatgaaatgtccatattgtgggggtgggggggcgggacggagtaaaactgccgggcctttgtatgcaatcagttaagttgttattagcttaaaatagacttcgagagctaagattctttatgtaaccctcatggtagcccagaagagaaaacctatagcagatacgcaaaagagaaaggaatcaaagcagaaaatcattaactctcaaagagagacagaaagaggaagaaaggaacaaaggatctataaaacagtgagaaaacagttaaaatgggaatagtaagtcttaacctatcaacaattactttattttttattttattttattttattattttttgagacagagtctcactctgttgcctaggttggagtgcagtggctggcgcgatctcagctcactgcaacctccgcctccttggttcacgccattctcctgcctcagcctcctgagtagctgggattacaggtgcctaccaccacactgagctaatttttgtatttttagtagagacggggtttcaccttgttggccaggctgatctcgaactcctgacctcaggtgatctgcctgcttctgcctcccaaaatgctgggattacaagcgtgagccaccatgcctggcctctatttatttagagacaagttctcgctctgtcgcccaggctggagtgcagtggcatgatctcacctcactgcaacctctgcctcccaggttcaagcgattctcctgtctcagcctcctgagtagccggggttacaagcacatgccaccacacctggctaatttttgtatttttagtagagacagggttttaccatgttggccaggctggtcttgtgacctcaagtgatctgcctgcctcaacctcccaaagtgctgagattacaggtgtgagccaccatgcttggccaacaattactttaaatgtaaatggattaaatttccaatcaaaatatatagagtggctgaatagatttttaaaacacatgaaaaacactactgaactataagctacctacaagagactcccttcattattattattactattctttgacacagagtcttgctgtgtcgcccaggctggagtacactggcacgatcttggctaactgtaacctctgcttcctgggttcaagtgattcttctgcctcagcctcctgagtagctggaactacaggcatgcaccaccacgcccagctaatttttgtatttttagtagagacagtgtttcaccatgttggctaggctggtctcgaactcctgacctcatgatctgcctgcctcagcatcccaaagtgctaggattacaggtgtgagccacgactcccttcatttttattttttattttttgagacagagtcttgctctgtcgctcaggctggagtgcaatggtgcgatcttggctcactgcaaactctgcctcctgggttcaagggattctcctgccttaggctccagagtagctgggattacaggcgtgctccatcacacccggctaattttttgtatttttagtagaaacggggtttcaccatgttggccaggctggtttctaactcctgaccttgtgatccacccgcctcggcctccgaaagtgctgggatcataggcgtgagccactgcgctcggccacgactcccttcatttttaaggatatactggtcgggcgcagtggcttacactttgggaagccaagacaggcagatcacttgaccccaggaggtcgaggctgcagtgagctgtgattgtgccactgcgctcgagcctgggcaatggagaccctgcctcaaaaaaaaaaaaattgtatatgcaaacaatgtaatattccttagccttataaaaggacatccttttacatgctacaacatggatgaactttgaggacattatgcagaaataagccactcgcgaaaagacaaatactgtgtgatcctacacagatgatccatggaaaattgtcaaattcataaaatcagaaagtgaatgttagctgctagcaggtaaggaggagagggggaagtgaggagctgttattcagtgggtacagagtttcagttttgcaagatgaaaactttctggagattggttgcaaccccaggttagtatagttggtattac

SEQ ID NO: 98082 - DNA, 26173 bp, Homo sapiens
ctctgtctaaaaaaaaaaaaaaaaaaaaagagagagatggaataacagccagccagactgaagaagagcgagcacagggccaaggagataccatgttgaaagatcctttctggacttgggccaaggtagacaattccgggacacagggacagaaacactgaattgataacaacaaatgttttggagacctcagagtgtaaagaaaggtttactccttgtatcatcccctccccgtggactgcttcaattctatcggggacaggccagtccctggaggctgcaaggagccacaaacctttcccagctcacactctgcacccctcagtctctgctgctaaagaatcagactcaggtagatggggtgtccacagtctgtcctcattacccagtcataccgggtagcatggcccgagagagcccttatctctccccaccttaaaaccctcagcatcacacagcaggaaccagtccacagggcttaccaaggatacgcagtgaaaacagaataatgtctgttacaaaccccctaaacctgagatggctgaagagccagattcctgcaccccatctgactcccccaggcagtgggagatgacccaaagcccccattccctgggcagagtggtgtgcctggggaggcctggcagtggtgctgtgccatgccagaccttgtcctgccagtcagtcagtcctgttggttgggttgagccaggagcacccacaagtcatcaggggctgtggatttgttgcttgccgcgtaccgctgaagttcaaggtagctaaagggtggagtccatcagtgggtggccgttctcgggaagcatgatgcgagtgctggcacctccctgggcagaggatgtatagtggacagactcgcgggtggactggcggaggcacgcgcagcagagaaggcggcggaaggtgcggcgcatctcagcatctcggcaagagtacacagcagcattgaccagtgagttggcctcggccaacagtaggaagtacttttctacagccaggacattgcaggactcacagcctaaaccatccaggagcagtaccacctggcctggtgtccagcagaccacgaacgcccctgtgggacagaggcggaagtgagcagggcaagctgtcagaggcccggcacctacagctctcagtttggggttggagtggtctccagagctcgagcaatagtggtgaagtttgcagtgcaagagctgcttgtttccctgattctgcagtgtgacaggaaggcctgctaagatgggacatctatgctaattggtacacagtggccaaggcactggacattttgtgtgtgtgtgtgtgtgtgtgtgtgtgtgtgtgtgtgtgtgtgagatggagtctcgctctgtcgccaggctagagtgcagtggtacaatcttggcttgctgcaacctctgcctcccaggttcaagcaattcccccacctcagcctcccaagtagctgggactacaggtgtgtgccaccatgcccggctatatttttttttttttgtattttagtagagatggggtttcaccatgttggccaggatggtctcgatctcctgacctcgtgatccgcccgcctcagcctcccgaagtgttgggattacaggcatgagccactgcgcctggcctgtgtgtttttttttgagacagggtctccttctgtcacctaggctggagtgcagtggcacgatcacacctcactgaagcggcacgatcacacctcactgcagcatttgacaggctgaggcaggacaatcacttgaggccaggagtttaagaccagcctaggcaatatagtgagacctcgtttctacaaaaaataaaaaattagccaggtatggtggcacatgcctgtagtcccagctactcaggaaactgaggcgggaggatcacctgagcccggaaggttgaggctgcagtgagctatgatggagccattgtaatccagcctaggcaagagtaagatcctgtatcttaaaaacaaaaataaattttgaaatttaaaaatatgggccgggcgtggtggctcatgcttgtaatcccagcactttgggaggccaaggcgggtggatcacgaggtcaagacatcgagaccatcctggccaacatagtgaaacctggtctctactaaaaatagaaaaattagccaggcatagtggcacgcacctgtagtcccagctactcaggaggctgaggcaggagaaccacttgaacctgggaggcagaagttgcagtgagccgagattgcgccactgcactccagcctgggtgacagagcgagactctgtctcaaaaaaaaaaaaaaaaaattaaaaatacatatagattaaaaaacaatttaaaggctttttgttaaaacaggcttagcactgctaaaaactccttttttttttttttttctgagacagagttctggagtttcgctcttgttgcccaggctggagtgcaatggtgtgatctcggctcaccacaacctccgcctcctgggttcaagcaattctcctgcctcaggctcccgagtagctgggattacaggcacacaccaccatacctggctaattttgcatttttagtagagatggggtttctccatgttggtcaggctggtcgtgaactcccaacctcagctgatctgcccgcctcggcctcccaaagtgctgggattacaggcgtgagccactgtgcccggctagcactgctaaaaactcttaaggggttcccatgaaactcaaaataagactcctgtccgtgccccttaaggccttgctgatctctcctcctcacaagcccactttcctctttagaggctctggcctcgtactgccttgaggtttttactttccgtttcctctgcctggaaggctctctgttcctatcctcagcattcaggcctctgctcacatacattatcacctccttggaggacattccccacctaaatcatcccccatcaccctctatcaggtagcttgttttgttcattgcttcgcagtgtcttgtgggagatagggggaagcagggtccctgttgccccctgggggccccacttacccaggatgatgacaacagtcttgaccaggctgagcgtggtctctcggtagcgggggtggcagctgacatgctctgccatgcgctgcactcgccgccgcacgtagaagaaaatgcgggtgtacacagccaccatgagcaggaagacaagcaggctcgacagagcccagacggccaaataggagcggctgagcaggggtgccatgcgtgagcagcggtccagggcacagaggcagtgccaggagtgggcaggcagcagccccaggcccagggcagccacccacacgcccacaatgagcatgaccacgcggccacggggcaggcggctgtgcagctgcacggccatcacactgcggtgccgctccacggcgatggccagcagtgtggccaccgacgcagtgaggcttgtgtccagcaagccctgccgcaggaaccagccctcaagtgaaagtcgggctgtgcggggaccagtgtggaacatgaggaagaggtaggccacgcccgcgaagaggtcagccgcggccagattgccgagcaggtagtagatgggctggtggaagcggcggttggaggcgatggctgctatgaccagcagattggtcagcagcaccagcacgctgacggtcagccccagtgccaccacgaccacatccttgggccgccagtgggagctgagctctttgccactgttgttatagaagaagccgatggtctcgttgtagtagcactggcccatgatgaccatctggggacacaagagatcagtgcatgtggcacttcttggaaggacacagggaggggcggcagctgcagaggagggtcagcgcaggaaggacaagggtctcaaattcagatacctcgaagcaaagtggcagtggtgaggactacggtggcctggaaaaagcaagctccatggggctggggtggaggtggaggagcagctgtttcttacctactaataagacctgtgtgcaagacatcacccaagtcaataggtttttgaaccagaagtgaaacaaaacccatctatggtcgaatcccagcccacctgccgccaatgtgtgacccggtttgggttgtggggagaggagggttagggaaagacaaaggggtgtgagctgcgggaagagatgagggaggatcactttggtgccggagtcagtgtagggagcagagacccgggagcgtgtgcacacaagggtgaggtcacttgctagaaccctgcgagggggcggtgccgaggcgtggaggtgatcggagtggacagagaggcggccccagaagttagtcggcgggatttgggcgcgagtgcttcccaagcgggcggggcaataggctgttccgggtgggacggaggacactggcggtctccgggacaaagacagcggttggggaagggatggatggccgggcctccaggcgtctccagactggggaaggggtagggggttaagggatcagagggcggcgtcctggccccgcaggcacgtgccgcgcccttcccccgggcccaggcccgcacccgcccgcctcccgtccgtgcaggcctcacctgggcctccagtcacgccgcagacaaggcgggctcgcgggggttcggggcgggctcgaggcccatggcccggcgactgcggcgggagcggtagagcgtccgggtgcgccctgtgcgggttgctgagagggcgcgggaggcggggtctccccggcgccccgcccccaccacctgggggagccctgccccgccccgccacctgggggagccccgcctccacggccgcgtcgggggcggtgtcgcccggaaccgcagcccccctgtttcctccccgcctcgcggcccctcagtcgcccctatttccggcgcgggacccccaccccggtacctgcacacctcatgcgcccgcagtttcgagcctgcggggctgagtcactcggcgacccgaaaattcccgccgtgaccccgcgctgcccgggcggagctccaggtggtcttgggtccgcgcccccgctccggacccccaaccctcccagccccaccccgctctcttcttcgtgtccaatcggccgccgagttacaagccactccctgatccgacttggctcccaccgcccggacccccgcccagcttcggctttgccagctcgcagtatcagcgagccgcggcctcctgtgcgaggcccacctctgcggccccagctgatcatcgggcgcacgctagggttttgcaatcccgcccccgtacccctcaccctgggacagcgctgccccctgcaaagcccggccctgccctgccctgccctgtggcttcctccctcggcctccctgcggcggccccgggctcccacggtccggagcacacagccccattgtcccggttatcggtactttgttatactgtatttgattatgcaggaccggatcggggacgcagagctccgggagggccgggctggcgtgactcagccgggtgctgcgacccagctccaactgcctttacgtaggtgctgcagggtgtttgatgatgcaagaaggaggccttgaggccgggcgcagtggctcacgcctgtaatccctgcattttgggaggccgatgcgggacgatcacgagatcaggagatcgagaccatcctggccaacatgctgaaaccccgtctctactaaaaatacaaaaaaattagccgggcatggtggcaggcgcctgtagtcccagctactcgggaggctgaggcaggagaatcgcttgaacccgggaggtggaggttgcagtgagcggagatcgtgccactgcactccaacctggagacagagcaaaactccgtctcaaaaaaaaaaaaaaaaaaaaaaaaaaaagaggccttgattcccctaatctgtaaaatgggggcaaggagtgctacccatgctggcctctcccctagcagagatgcacccaagggcatataggacacagtttattagaggccatcagacctcaggcaccaccagcatgtggagtctgagctgcccacctcctccaggaaggtcacttcgagtccgtgaaggaggcaggcaggtgtgggggagtgaccacaaccaaagtagcaaaagcacccctgtcccaggtgtcagagactagggtggaccccaaggatctcataacctgcactgaccctgagtattgaccctgagtgacctctgagcccgagtggccctgatgcttggcagtgacctgtgtctagtggggggactctgggacattatccccaaaagggttttaggcctcccctaggtcatgtattaaatagtttttccttataggaaccctctggacctctcccagcattgaactcctggcggggtgtttggccactaggtggtgggaggtagggatatatgggtccgtsttcacaatctgggcctcttccttatttaaggtgccagggtggtcagagatggtcctcggcttcctcaggctggacgtccgggcagcaggtggccctgggcacagcctcgctgtccaatttcgagagtagccgggctgtctcctgggtaatctcaaaatgcttgggcagcggggtgcggcgcagggggctgccctcaggggaggcagctgcagggctgggcccccgcccccgcaaactccctytgggcactgatgtgatgggggtctcctcgcacagcttggaagccaccagggccagactggacagctggtgggttacaggcctcacaccgccccggggawacttcactggctggcggctgaagtggccacgagactgtgtccccaggagtgagtcctctgggccttggctggacactgtgtacggggtgggtggtcagtgcagagcacctccaagttctctgtatatccccccaggagtcatcttttagcaagccaccctggggccagggcacccccagaactcctgagcctctctctaacatactcaccttcccctcccccatctttggtgtcttcagcyacgtcctctctctggtcactctgtggagttggaatctgcagggagaaacccaagaatgagaccccaacactaaaatcccagttctttgagattcctggagagccaagggcttgttcctggacatgcaaaaggaatagccagtgcaaaggccctgaggtaggagcatgcctggtatgttaggacgcagccccaccctgtaatgaatgagggaaaggtggtaggaagtgagaccaaagaggagtgggcccaggtggctctgccagccacccctgactttgcacctactctgcactgggtgtggactaccattgaactcctcctatgcacagggcatggaccaccactgactgtgcacctgtcatcctttgcagttttggtgtttggggatagacgatgcccttataagtgtactgcttggccaggcatggtggtgcatgcctgtaatcccagcactttgggaggctgaggttggtggattatctgaggtcaggagttcgggaccagcctggccaacatggtgaaactccgtctctactagaaatacaaaatttagccgggcgtggtggtgcatgcctgtaatcccagctactagggaggctgaggcaggagaatcgcttggacctgggaggtggagattgcagtgagctcagatcatgcccctgcactccagtctgggtgacagaatgagactccgtctcaaaaataataataagtgtactgcttgcccttccagcatagagcagtgtcattcattgagtctggaccgtgggctccatgagggtgggaaaatccttgtttagcaaatggccagcccagggagtggctcagccctctccacattaggaccaggtggtgcctctgaactactatcctgggctgctctctgcaaccttaccaactttactgttccatccttagctaaatggttggcagtgtctacacatcagacactgtcccgagcactttatgaggcattccagctctcagagacccacagttcaccagcagccgcttcccagctctgggctgctgcaggagagatccttgctctcaggaatggcagatgcagcaagataccagcagcacaggccttgggcatggactgttctagcaatccggagcagcgggtgctgctatcttcctggttcacagctgagctctggatccagactggtgacctttgttaaagattctacgccaggcggccgggtgcagtggctccagcctgtaatcccagcactttgggaggccgaggcgggtggatcacaaggtcaggagatcgagaccatcctggctaacacggtgaaaccccgtctctactaaaaatacaaaaaaattagccgggtgtggtggcgggtgcctgtagtcccagctacttgggaggctgaggcaggagaatgacgtgaacctgggaggcagagcttgcagtgagccaagatsgcaccactgcactctagcctgggtgacagagcgagactccatctcaaaaaaaaaaaaaagattctaggccgggtgcagtggctcatgcctgtaatcccagcactttgggaggctgaggagggcggatcgcctgaggtcaggagtttgagaccagcctgaccaacatggagaaacccctactctactaaaaatacaaaaaaaattagctgggtgtggtggtgcatgcctgtaatcccaactactctggaggctgaggcaggagaatcgcttgaatccaggaggtggaggttacggtgaacagagatcacgccatcgcactccaacctgggcaacaagaatgaaactcygtctaaaaaaataaaggattccaactgcggccgggtgtggtggctcacgcctataatcccagcactttgggaggctgaggtgggtgggttacttgaggtagggggttggagaccagcctggctaacatggcgaaaccttgtctctgaggcattagaattgcttgaacccgggaggcggaggttgtggtgagccgagatcgcaccactgcactccagttgggcaacacagtgagattctgtctccaaaaaaaaataaaagattccaactgcttacagtccccttttagggccattaactgctcagagccttcattgtttaatctgtaaatgattttcattaacactgtctacctctcaggactgtggagaggacaacaggaagcctctatagtgtcccctgcacagcaggtgcacattcagtggtggtctgtgcctgtgaatagcagatgcaaggtcaggatagctggcagagccacctgggcccactcctctttggtatcacttcataccaccttcctgtcattcattacaggatggggctgcgtcctaacacaccaggcacgatcctacctcagggcctttgcactggctgttccctttgcctggaacacccttcacctgatctccatgtkgccagctcactccttcatgtccttccagtctttgctcaagtccgtctgctctctaagacgtgcccccaccatcctacttagtgatacaaactccacctcccaccgtgctgctccctggtgtcatgtgtcttactccactttttttttttttttttgaaacaaagtcttgctctattgtccaggctggagtgcagtggcatgctctcggctcactaaaacctctgcttcctgggctcaagcgattctcctgcctcagcctcctgagtagctgggattacaggtacacaccaccacacctggctaatttttgtatttttagtagagacaggtttctccttattggttggaytagtctcgaactcctgacctcaggtgatttgcctgccccagcatcccaaagtgctgggattacaggcgtgtgccaccgcgcccagccattactctaccttttcatgatccattacccttatcatcatcacctcatcacattccagataactgactttgtgtcatgtatatggttgttctttccccactaaaacacaggcactgagagggcagggtctttggatatttagctcctggatgtatctgcaatgcctacgacaatgcttggcccaaaatacatgttcaataaatattctgttggaggaatgaatgatcacccatgttagtacctctgcagggctgtccccttttgttacatcatcactgcccactgctcattcctcactattccttccagaatgaacataagttaaatgaggaagggaggaagagaatgaaggaaattttaaaaaggaaggaaggtgaaagagaaggtaagagaattgaacagagataaggccctctccatagctgtgggcccagtgggttcttacctcggtaggtgtggccgtgggatgctgctccagggtactgtggtgctgggggtctgggccggggtctgaggctaggactgggggctgggagtctgggtcaaggtgcgggggtggcggttgggagctggttgtgaggggcccaggggctgggctggagtcttggggcgggggctcagtggcctgggggagctcatccatcccaaagatctgctcgtagtgcacgatgaggaactccacaagctgggcctgatgcccagagtccagcaggcaggtgacagggatggcgctggctgcccgcgggccgtccggcggccgcagcagtgtcggcccaaacacaatgcccaggttgttggcagacatcttgttttccataaatcgtgcagccaccctggggatggtgtgaagagaaaggtcagggtacaggatgcaagctcattggtctgagggtaagggtgggacacgcaggccagcctagaggtgacttgcccatgtcacaggtgtaagtcgtctgagaccagcagccacatatccagaactggaggtcaggggtcagtacccaaagttatgaatcatggattaaggttcagagttcagaaaacacaggtcaaaggtcagaggtcagtgtcaggggtcagccagggaagttagtagtcgcatgtccagggaaaagggtcgcgtttcaaggctcagggacccatgcacacctgaacagatgggccaccaggtgccgcagggtgttgtagttagagtcaggcagctgtaccaagagggtcttcagcgagcggataacctcagggctggggctgggggtcccagggtcgtccccagggtctgcatgcaaggtcttagccagagagatgaaggcgtygtagaggtggaaggggatcacgggctcggtgagctgggggtggaacggagggcgcaacacgagtgtgggtgggctgtggagggctcctgcccgcgtccccctcagtgtcctgagcaccaacctcctgaagaaatcgcttgaggacactcgagacgtcatgaggcgagttccccgacagctccaccaacgctcggccattctcgaaagcctggcacagccgctccacacggacccgggacccgctgacccggtaaatgccctgcagggtgagggtgaaaaacagacrcctggttcgtgataggccatcgattcggtcaggtcacttctggggatgatgaagggtcagggcagcacctgcacatccagggcacggtgttctatctcagccgtgcacttcgtgaccacaaagggtacctcctccrggaagtccctgggtagctgcaggaagtcaaccccaaaaaggggtgtccgggctgggagccgcctgtgtccacagaggatcaggagagtctccaggcagcgcttgtggcaggtcagaaagcactgtggggaaggtcacagggacagggaggtcattagggaccagtaggggaagagaaggttacaaggatcctcaaggaatgggggctcatgggagacatcaggttagrgtgggtcccaggggcagaaagkctgtaggaatctcaggtcagggagatgatcaagggtcagcaaaggtcatttggtcattaaccsaggccacacctcctcacactccgtcccgctgaccatgaaggcttcgcactcgcggcacttggctgggccccgcagtcgccgcagctggtgggtctgagccgcgctggacagtgtccacttcccgaaggggctgcccagcccattctccagcccgtctcccaggtctgcagggagacagggtcaggagtgcctggtgccctgccctgtcccatcctgacctaccctgcttcagcctcaccagggtctcgctcctcaaagtcatctgaggactcagtgcctgtggacgaagccttcaccagctgcctcgtgccagcgcctggggtcagaggaatcatgggagattcctgggctatgggaggcactcctggtttttagggcttccagaaccacccactaattcccaaggggtcagaggtcaggagggggattggacaggtcagtggttaagggttggagaattgggtcagcaacctgaggggggtggttcataagctggatcaagaggttgaggaaataggccgggcgcagtggctcacacctgtaatcccagcactttgggaagctgaggcaggaggatcacatgaggcaaggagtttgacaccagcctggccaacatggcaaaaccttgtctctactaaaaatacaaacattaaccaggcatggtggcaggcacctgtagtcccagctactcgggaggctgaggcacgagaatcgcttgaacctgggaggcggaggttgcagtgagccaagatcgtaccactgcgctccagcctgggcaacagagcaagactctgtctcaaaaaaaaaaaaaagaaagaaagaaaagaaaagaaaaggccgggcgtggtggcacacacctgtaatccctgcactttgggagaccgaggcaggtggatcacctgaggtcaggagttcgagatcagcctggccaacatggtgaaaccccgtctctactaaaaaatacaaaaatcagccggcgtggtagtgcacacctgtaatcccagctactccagaggctgagacaggagaatcgcttgaatctgggaggtggaggttgcagtgagccgagatcacgccactgcactccaggctgggcgacagaatgagactgtctcaaataaacaaacaaataaataaataaataatttttaaaaaggtaaaaaaagaggttgaggaaataggtcaggggtgtggggtaggtcagaggtcaaagatagttaaagattgagggtcagagcttggccaggggctggaggatggtcacaggtggagtgtgggtcaggaccaggtcctatccctacctggrctggaagtgggtgagtccagggaccgagactcgctgccgccacccacgctgtccacatcgctgcccggagtggggcctggagtccctaggtggcacaggtcaataaggatggtcccctgctcacaaaccccactcctgcagcccacctatgtgttggtggaacgaactcctggcaccactcccacctggccctcattgcactcaccttgccagcgccagcctgtgcccggatcctcccaagggcctggctcagctgaattctcatccagccttggaggaagaggcccagagagcttctttctgatgtccagaggggagctgagaagacagaartttgaaggtttgaatcccaggaaactggcctggggtgatggcacccaggcatcatgtctaggtaccaactccaagcacttgggtctgcaaaccctgacacccagggcattgtggcccctgaaatacagtagccccacattcctgcccctgcccctaggactgggacaacccattcaccctcctatggcccccgagagcctggagtactaaattccactaaggctttgcgttctctaacctcgagtaaccagcctgcggtgccaacagcctggcatcgcgattccggggctcgttcccgactccctgctccagtgacccacctgttcaaggagggaaggaactcctggaaggagaaggcgggcggcgggggcggcggggcctcgggccgcagcgcccgtacaaactcctggtagcgctggcccggctcaaagggcgcacagcactcggccagggcggcgaaggcgcgggggccacgctctgcctgcgccccccgcagcccgaagagactcagcgtcacctgccgggtggagacagcaggttggggaggggcggagcctgggagcctgggggcagggccagagctggggcggggcttgagagacgcgaacgtggtcagggtttgggacgcacctgggcggcttaggaactagggcagtcggccaggggacccaggcatggtcagagcaggggctggtcatccaggggacaggacctcatggggcggagccgagacagtgggtctgggggcgggaactggctgtcgagggaaatggcctagtcctggtgtctccagggtggcttaggggcgaggagtggggcactcagtcggggccccaacggggtgaggggaggatggccttggggatgggcctcacccgcctcagcacttcatccccctgaaacaccagcttgcgcacgtgcgacacgattcgctgcttggcgatctccaggtcctgctgccgcgcgttggcctcgcggacacaggcctggtacagcgcctcggcctcctgcgcctggggaaacggsaggccaggagcggggtggggcgcgtgtgggcgagagtggagggcagggggcgccacagcgctacaggggctcggggccgggtgcccaccttggcctgggcctcctctcgcgagcgccgccgccgctcctgctgcttgctaggtcccggcgaggcctggggggccgagtcctcaggggacccctgggagcgtgcccgcaggtcctcgctgcgttgcacatactgcagctgggcgcgccgcagtgcctgcaccgcctcattctgggggatgatgagaaggtcagcgtcccggcctctctctcaccctacccttccaccaattccaagcctcaccatccgcttctgctccttcatccactgctccttgaactccttccgccacttctcaatctcagtccgtttggcggcgaggggctggcaagggttggggatggggatggagacgctgccttagggccaacccagaagcagccacccagtccttccattcctgcgccatgtgctttgccacctctggactctatttttttttttttcgagacggagttttgctcttgttgcccaggttggagtgcaagtgggcaatcatggctcactgcagcattgaacttgaactcttgagttcaagcaatcctccagcctcagcctctcagtagctaggactacaggcatgtgcactaggcctagttaatttaaaaaacaatttcttctttttttttttttttttggttggccaggtgtagtggctcatgcctttaatcccagcacttgggaggccaaagtgggcagatcacctgaggccaggagttcaagaccagcctgaccaacatggtgaaaccccgtctctacaaaaatacaaaaattataaagatgtgatggcacactcctatagtcccacctactcgggaggctgaggcaggagaatcacttgaacccgggaggcagaggttgcagtgagctgagatcatgccactgcactccagcctggatgataaagtgagactctgtctcaaaaaaaaaaawaaataaataaattttttttggtagataaagacagggatctcactatgttgcccaggttagtctcgaactcctggcctcaagcaatcctccaccctcagcctcctagtagctagcactgcagacatgtgcaccaggcccagctaattaaaaaactttttttttttttttgtagagacagggggtctcactatgttgcccaggttggtctcaaactcctgggctcaagcaatcctccctccttggcccccagaagtgctgggattacaggcatgagccaccgtgccaggctggacccttttctgagtcagtattctcctcctggggtcttctccagacctgctctccccgacccctgagtccagaagtctcatgtagtcaccccatcctttctgcttggaagcagagacaccaaggctttcctcctgagaacactcagcacctcgttcccctccccacaaacaaaaacgaagtttttggctgggcgtggtggctcacgcctgtaatcccaccactttgggaagctgaggtaggtggattacctgaggtcaggagttggagaccagcctggccaacatggtgaaaccccatctgtactaaaaatacaaaaattagccgggcgtggtggcaggcgcctgtaatcccagctactcaggaggctgaggcaagtgaattgcttgaacccaagaagcggaggttgcagtgagctgagatcgcaccattgcaccccagcctgggcaaaagagcaagatattctgtctcaagaaaaaaagtaaagtgaagttttgcaattgcacaggaagcccagcttgaatctttgctgggtaaccttgggcaagttcccaagcatccccgggcctcagcttcctcatcaatgaaatggcgacgttggtagtggtgccttcctcccagcttgctgggaaaygaggggatcaggcctgaaggacagcasgatagcagggtgacctctgtaacattccaccctgcccccctcacctggtagtagtctcttttctgctgggccactgtctccatggccagggttcccaggctgagatcgtgctccagaaacagggtgtagatgtactgcagaggcatgtggctctggggaagacagagtggtgtaggaggatactgaagatctgtgggggacaaaggtggggttctagggggcttgggctctccgggggggtctggtcatgactacctgctgttgaatggacaccttgccagcttcagcgatcttcatggtgctcttagcaaactccagctctgggggaagagagagccgggctctgggtctagctggggtctggggactgcctggtaactggggctgggcggaagaggtcctcaccatagctggctctcttttcagtccaggcaagcagttccttggcatagcggctccaggtcttggcatattccagggctgcgtccacacccccctttgtccgaatgagccgcaagtccagttcctcccctggggaagatggatggacctctgacctttgcaccctagtctgctatggatgtcttccctaagcccccagaccagmccagtggcacctgtcctacagcctcacagctccccaaacactactttgggatcacttgtcctggttgcaattttacagattcactgttttttgttttttattttttattattttattatttatttatttatttttgagactgtgtttcgctcttgttgcccaggctagagtgcaatggcgcgattttggctcaccaaaacctctgcctcccgggttcaagcgattctcctgcctcagcctcctgagtagctgggattacaggcatgcgccaccatgcccggctaattttttgtatttttagtagagacgaggtttctctatgttggtcaggctggtctcgaactcccaatctcaggtgatctgcccgcctcggcctcccaaagtgctgggattacaggcatgagccaccgtgcccggcctgtgtttgatgggtttttttatttttatttttgaggcggagtctcgctctgtcgctcaggctggagtgcaatggccctattttgcctcactgcaagctccgcctcctgggttcccgccattctcctgcctcagcctcccgagtatctgggactacaggcactcgccactgcgcccggctaaatttttttgtatttttagtagagatggggtttcaccatgttagccaggatggtctcgatctcctgacctcgtggtccacccgcctcagcctccaaagtgctgggattacaggcgtgagccactgcgtccggccttgtgtttgatttttttggacatggtcttgctctgtcatccaggctggagtgcagtggcacaatcgtatctcactgcagcctcaaagtcctgggcttaatcagtcctccagcctcagcttccaaagtagctgggactacaggcacacaccaccacacccagctaattaaaaaaatattttttcttttggtagggatggtgtcttactgttgcccagcatggtcacgaattcctggcttcaagtgatcctcctacctcagcctccaccctgcctggggtctccctgagggctgggactgagatctgttgtgtgtactgccatattcccaaaacctaaacgatgccttgcatggaacaggggatcagtggtgatttgttgaaggaaagactcctgtctgtccccactgtcctggcctccagacccccctacctgtgaggggtacaggaccctctggggaggggccgctccaacagctggcttcgttggtctgtgcgggagggagacagtattcagaagcaaacagggcaggggcctggccttcctaaggccccctctgcttgaggtcttcctccctgttcccctactccccactcacaacartggctgtaggggtcttgtcaggttctgggtcttctgagagtagagggtctccagccagcatctcaagggtcctgggggataaaggtgtgtcaggatgccaccttacacccagtctgtcctgccaaggggtgctggggaccttagggttgtttgtggcaaacatcacctctgtggcatctcttgtgtctgggaggtctgaagaatggtgttttgggggaatcaggtgagttttttttaaataggacttgaaaaagcatctgaagggccccagataactttgaggttcatagagtgggattatagggatcgcaaatattttaaggggttacaaggatatgtaggggttctaggaccactttggggatttccagtctatttagggggacacttttaggataccgaggcattttggagggtcccatcctagacttctctggttattaggtatgtaggtccagatgttacaggttccaaatgggactgcaaggcacctaaatggttargggcttggggcatcttggcaggatttgggggtgatccaggctcagactcacacgttccccagtgagatttcgaggttgtccaggctccggaagatgtcactgtacctcttcctgccctcaggacctggggggagtcctaggggaggggagtgtaatacatgggctaaccactgcctccctccacccacggcacctcaaccagtctcatttggagggggtggaagagaaagggaagagtgagagagagaaagagagggctggggggggcttggttggggccaactcgaggcaggcagatggactcacacaccaccagagaccagagacagctgctcggggaacagagacacccactccctgggtctgcctgcacccagaagcaaaccaacaaaacagatgccccagatgcaaccaggctgtcccgagaagaaagccggtctgacaatggaaccacgggctagacagatggaaatacacaagggacagccaggcagagcctggggcagaaacacacatggagagactgaagccgtgagggacataaagaccgaatgacactccacatacacaacacagacacaaagacggcyggaaacaccaagtcggaccccgccacatttctactgctgcccccctgccccctctcctaaggggcctagaccagcactgccgactccccagggctacagaggggccctgtggggatcctaccgcgttgccctctccctcagcagtcgtggcaccctgcccccatcacaaaaatcagaagcagaagcagtcacttccccttcctgggccccctcccccaggcgtctggggtgagggatcaaaagggggagggggagtgaagggctggsgtcctgaacccatccgggcacagggctccccacaatggaggatccctgggtccttcccattcaggaactcctctcctggctctcaggacggagcgggacaagtgtgtgccctcaatgtaggaagcaggggatggtcgggggaggcccctcccggatccccgaccccctacccggctctgctgcgtccatatctgggcccggggatcgctctgcagggaccgggatggggatggggtcgcgcgccggcggggccgagccccgatttcctgccgccgcagccgccgccgccgcctcggttccgcgtcgccctgcccagcggaggccacgcccccgcatcagaccacgcccccgtagcccggaagccttgatagtgcccttctctacctgagccgcttgaaactgggtcgggccagggccccctgagcgaccactcgaggctgcagtgcccctgacctgggcatcctaagacttcatctgggccataggttccctctcagatctttgtgctaccccaaatcccacggagccccagccccctcctccctgaatggttgcagagtccacctgtcccggggggcctctcccaggagctcccacaacccgcgaccctggtgatccccttgcccaggttgtctctcggagccctgaaaccacctgggcctcgctggagccatggcgccccctggtggaggcctgatattctgtccgattccaaccaaaattctaatactcgggctggagaacccctggcctgggggacgccccttccgtgaccctcaaagctggatcaggctcaaggccccaattacagcacaccagggagcagcccttttaggtagggagtggaggtttgtccaaaagcaccagctctggggttgccacaagccgcctgttataaaaatgctcccacccccagcacagtggaattttggggctggaaatagactttaaagtatgtttataactttgtgtccaaaggctttggctgttaaggaggcaaggattctctgactggctccgtgctgcctactctgcagttcttgagttgtgatgagtgagtccattgaaaggaataacactatcaacctaagagccaagccaggtttccaggtcacatcctggctgatgctcagccagagctccctgactgtgacatgagatggtagagcagcgcaggcccccaaagagcatgacagagtcagtacttgtttgtttttcttttgagttggagtctcgctctgttgcccaggctggagtgcagtggcgttatctcggctcactgcaagctccacctcctgggttcacgccattctcctgcctcagcctcccgagtaactgggactacaggcactcgccaccatgcctggctaattttttgtatttttagtagagatggggtttcactgtgttagccaggatggtctcgatctcctgaccttgtgatgggcccgccttggcctcccaaagtgctgggattacaggcttgagccaccggacagagtcaatacttgtaatgatgcagatcatattcctcaagtctcagacaccacccgagagaaaggcatgctgttatgtattatgggaaagaaaaaaatatcacacatcctaaggcttctctcagcacctgagttgttaaaatgtgaaagagacctcagaaatatgggggtgcttgttaaactagaaaatatgcactgaattctctgggcagggacaagtccatgttcaagtgctgaaagtgccagagggtttcaccaacatcacacgcctgtggggagggtgctgggaccttcctcagtgaccctctgtccccgagcccccagcaaacaccgtgtggcacagacgaggtggaggcagggctttttaaaatctcagatgctgctttatttaccaaaggtgctggcttggggctggttctgctggccaagccagcggatggctgtgggggtcccagctcagtcttccaagggcgagactgtacagccttgctgtggggggttgggggcagggttccctcccggggccctgttggggttcccgcccagcggcagccagggtgggcagtgggtaccagcactgccatctcaggaaggcactttcagcttcggggtccccaggaagaactgcaggacgcggtcggccaggagcgccaggcagaagtccaggagcaggacctgggcaatgaccagcttgaactgtcggggcagggagggatggtgagctggagacctgcagcccagctcagggtcactgccataggagggacccatcaagctgagccccagggtcacctccacagggccactgacctccacagggatgtccacgaggccaaactggctgttgaagtcgggcgaggagccgaggagcaggccaatgatggccaggagtgaaactgccagactccacaccaggggcttgttctcgggcaggctctccatgaagggcgggccctgtggggatgagggacagatggcttcatggggtggggctgggtgggcagacagtgaatgtttgggcagggcccaggccttactttgtaattgatggcgaaggtggccatctgcatggccatggccatgatgtagacggtgctgttgaccaggcttggctcaaactccttgtacaagtccacgaactgctcctgcctgcaaggacacatgggagtcagggccccctctcctgctccggctcacacacactgtgtggcttcctgctgccctggcacagagctagggctctgcctggcctagtgcccctccctggacaccctggacaacccccagcctctcctgctgaagtctgtggagtcatcctcctgctattctcagctgcagggacatcacctcctccaaggcagcacttacttctcggggctccgggcctgggcctcacggtacaggtagacaaggctcaggaagtgcacaaagaactggagcatgacggtgaggatggtgtacaggttgaagatgttgggcaggggccgttctcgggagagggtcttgaggggctgcagcagcaaggcgggtgggggagtcaggatctggctcacttggggccaccctgcccacacagcaggcagtaacatcccctgcctcccgggagaccttgtgtacagccaccaccaaatcctgggggattccatgggtcagcaccagtccctggatccctgcctgcctctcacccctgagcccagggctgcctccctggccccggctccgccatccaggctccccatggcagccacaggggcctgagaatcatgaagcagatcctgccctccctggagcccacgggacaggcacagtcccgcccagccaatctcccaccccctccagccaccggggactccctgcgtcagcccatgcctgtttggggcctttgtgtccagttcctggccgctggcccccctggttctttacgccttggcctgagtgtcggtgtcgcacaggcctccccagctgtccaccagcctgtcctgtgtagcctatgacccacttagttgtttttttaccctcttgatgattgttccttgcttgtggggctctgtggggcccacccctgggacccctacctgtggacaggtgtggacgccaagctgtaccacctggaggggtctgggagcctcagtccacacctgccctgccagcatttcctgagccatcccagctacagcccccatctctggggccctgggtcctgtaacttggggatgacaattcccgtgcctatatcagcctggccctggcaggcccatgcatccctggccttccagcacctctggggcccaccttggaacgggagatgaagaggaagcagccggccagcagcagcccctgtagggtggcctggaagtcactgaacttgactccctccaggtagaggacgctctggctgtaggccaggatgagggcattgagcgccaggatcttgaacatctgtagcgtggtcaccagcgtgcagcggccctgcttgatcacgtggcagactgcagggtggtggggaggcaggtgtgggtgtgggtaggggtgccaaggggggaatgaagggagggggagcgggggcaggcaactcactgcactggatggatgagagcttggaggtgaagggtgctgcgatgctggcatcccccagtttcacaatgggcgtactctcgtcctcgaggtctcgcagcacctggctcaggcggtcctgcagggtagacagcaggctgtcagccctggccaggatggggtgcagcacctcccctcttgggactcaccctctgggaggttggctgctcctcggagggagggagccccgaccgctgcttggctgtcctggaggtggctctgatgccactgttgctcagggttgggctgtcccggggccgccgtcgccgctcgacaacccgctcaggggcattggccaagagcgccacacctggggggcaggagggtgtcagacccggaggagcaggctccacggaggggaagattgctggcttcagagccactggtcctgaagtcccccagctggctcccgtgaggacagttcccagacttccccatttcacctgacaccctaaggagacctcagagagtgcccgtgttgctttctacaaactactttaagaaaacaaaccaccaacaataaacccccacaacaaatgcaatgaaaaaacacacaacacgagataggtcaaaactaaactgattttggccgagcgcagtggctcacacctgttatctcagcactttggaaggctgaggtgggcggatcacctgaggtcaggagtttgagaccagcctggctgatacggcgaaaccccgtctctactaaaaatacaaaaattagccaggggtggtggcatgtgcctgtaattccagctactcgggaggctgaggcaggagaatcgcttgaacccgggaggcggaggttgcagtgagatgagatcacaccaccgcactccagcctgggcgacagagcgagacagtctcaaaataaaacaaaacaaaacaacctaaactgatttcaaaagaaatagccaaggagcatgattctaggaggcaaacaacactcaataaatgctttagtagataaaagcagataaatattggaaaagcaaaaaaaccaacgtaagattgatctttaaaattcaatttaacacctgagttcttgcaaaaaaaaaaaaagaaaaaagaaaaaaaggccaggtgaggtggctcacacctgtaatcccagcactttgggaggccaacacaggcgcatcatctgaagtcaggagttggagaccagcctggccaacatggtgaaaccccatctctactaaaaatacaaaaattagatgggcatggtggctggcgcctgtaatcctagctacttgggaggctgaagaaggagaattgcttgaacccgggaagtagaggttgcagtgagctgagaccgtgctattgcactccagcctgggcaacaagagagaaactgtctcaaaaaaaaaaaaaaaaaaaaaaggcagggttcggtgggatgcagtggttcacacctgtaatcctagcactttgggaggccaaggcgggtggatcacttgaggtcaggaattggagaccatcctggccaacatggtgaaaccccatctctactaaaaatacaaaaattagccaggcatggtggcacgtgcctgtaatcccagctatttgggaggctgaggcaggagaatcgcttgaacccgggagatggaggttgcagtgagcccagatcgtgccattgtactccagcctgggtgacagagcaaggctccgtcaaaaaaaaaaaagacagggtcttgcactgtcacttaggttagagtggatcacaccactgccttgaactcccagactcaagtgatcctcccgcctcagcctcccaaagcactgggattccaggcaggagccacagtgctcagccatctgtgtgcttttgacagagatctggggctatgaaccatcttcatggcttcagctctgggttttctgagtcactctcccaacttgttgcctctctcctggcctctggcctccgccctgctctgttcctgggatattcgcatcccttcctgccctcaaagcccctgaccttgccaccccctcccatcctcacaggaattagtgcccccgtggctgtcaccaagggccaggtctgtctttctagctcagtgacatgtcctcaacacctcgtccacaaacgaaataccctagcccacagcactcacccacgtcagcatgcttcagggcgcccacgtcgttggtgccatccccacacatgagggtcacgtagcccagctccttcaggctg

SEQ ID NO: 98083 - DNA, 18228 bp, Homo sapiens
tcagagagctaattgtataccaggcactgtgctaagagcttcagaagccttgtctgttgtaatcctcacaacaatcttatgaggttatatatttctccttctccttctcctcctcctcctcctcctcctcttcttcttcttcttcctctcacccccattttacaagtaagaaaactgggcacagagaggttaagtcatgcagctagcaaatggcagagctgggctagaacacaggcgatctagttctaggagtctcacatttaaccagaacacgctttttccttccctgagccttggaaggccctcgtggtggggttggggggcagcctgccaccctcacttttgggagcccctctgtttgtctgcatctgagcactgccactctctatttgattctctgggacttcacctctttctttgaaagtatgtgtgtgtttgtgtgtatgtgtgtgtggggggtgtttgtataagagagaaactgcagctgaccagtgatgacagaagcctctggacatcaaagtgggcagagccctggatggatgggctggaggcaggcctgggtcccattaggctaattcctctcaaggttggaagaggccagggcgggaacttctgagaacatggagaacaagtcctttcatacgacctccctttgagcaggccttggggtgggaccggggtcgggtgggtggagggtggggagtgtgtggagaggtgaggccacagtcaggctggrcaaacagattgggcagcggctgtgagcacagagcgcccattgtgtacccagagctctgctttcaataatcttctcggaagaatgtttcattgagcgccagagaaaggagccattgaaatgccagggctgggccctatgaagggttaaagacaaggaggccatgggtacctgggctcttgcctatcctggctcaaagacctgatatagggatcctgatcactaagacaagggcactcagtgagaccacccagaggtctggaagcgagggtcagagggggagatgtatgtctgccccagaaaggctaaagtaggtgccccagtatcaaggaggaaaacccctgtcttcccagcaccattttgcccaagtaatatccaagaagatgttagataccttctcagataccccttcagcctgccttctgtggagagcaacccatcgggcagacgtgtctctgcgtggacttcctgcgtggacctcctgcgtggacccataccacgggtcctgcaatccattctccacaatgcagccgtatggcttccttaaacacctgtggcctttccattaatcagtaattaattataatgaatgatgctgaagcagagagtgtgggagttacggtaagagccagtggtcactaaactaggtgaccaagggaacatgtagagttttctcttccaaatagaaagacctgctcattagagggatatggcctggctgtcagagagggcaccagagtgggattctctgcttccacactgagtcccgcgtgtctttgccagctactgaagcttgtggggcttgaagtgtgggtaacaccatgctggcctcagtgggctgcacagaggaggcagaaggtggatgagaggggcctgccactggggagggagagcactcttgttgggcagctgagaatgacctccggcaccaccatggaacccgctgaagatgttgctgcctcactgagcctgtgtctgcagagaggatgttctgcaactgaagctgaccttgcactatgaaccgttcatattaaccattttggatggaaaccttaaaaaacagatgatgcctttctggctttcttaaaaagagatcctcaactcttaaaaagagatctaaactcacttctgtgcggaacggtgatttggcgatgtttctgggtctgttcaggtgaatatagttcttggctcctgcaccgataaaccccaaactcccaggcttttggaattcatcagtttgaatttttgtttattcttttgtttctccttaatttttcactgtgaaacatgtaagcatattttactataaaataggcaagtgtctcactttcttatatattccatctgagctgcttctaatattctcggactgggaaaggaaatgattggccttataagaattgtgaatgaagtaagagtcagtagacttaagagttaggaaggcctgaggagctctcctctgagttaagtgattgaactctgtgatattttgagtgttcagaggccttctatgttttcttttggtctttgatttgatccagcctagacaaattgacccctagagagaggacgacagcatgcataatttatgcataaggtctttgccaagggcaataaatcagaaggaaataatattggtacttagataattttagttcaaagatggccaaacatacacatatacctagccactaacatgcacacacacacacacacacacatacacacgaatagcaatgacagacaaagccacaaaaccaactaacccagtttttcacttttatatctccgctccctaaaaagttgtctgggaacaaatgattaaaatcttaacattttcaaatgggaaagagctttcacagtcctttcattttgcttccctctttttagttcaggaatctcttctattatctcctggatagacaggcactttaacccccttcttgcatggatccagtaatgggaagctcagtactttctgaagtctgatttcatcaatggaaatctgtgacaggaagtaacaaaactacaccctgccacatctgaaatgcattttgtatgcagatattaggctttctgtagtgttgtaatgtggatgtcgtttgggggttaagggaggagatcacatctgtgagaatggggggacagatctttcctgtgtggggtggacattcctcttgtcaattgtcttggaaacagctgagttctgagacagaaactgaaaaggctagtttagcttgctggagagggaatgtctgtgtctctaagtcttaattcttgggcctgaacttgagacatgttggagttttgagagtctgtgtaggttggggtagggctgatggacattgtcccagggaagacggcaggtaagcaccttgtcttgtagagaacacaaagggaagataagtgagccaatcttgaaagctatatgaccacgattcacattacactttgtgtttattccctccttgtcatccttgagcctttggaaatgtctggtttaaatgttgcagcctggcctagctgtgtaatggcatcactggaattgctgagggtcagtgtttatttccttagaatgatagagggaggatagtgctctctgaggcctctgtggattttggtgattatggagactcttaagaaaaaagtgagtattggggaacaagagttgggccctaagtccacccactcccctccacatggtgattcaccaatcactgtcatccttttattaagcaggtggccggatttcttacaaaagcaatcccttaaattggtccgaaatctgttttcctgtaactttcacccacaggacttagtccttcctctcaaaagcacagagaacaatcatcgtaaccattcacattcaccaagtgcttactgtgtgctgggcactttactgagcattgtagtagatcttatatatactattatcccattttacagatgaagaaattgaggctaagggaggtgaaataacttgtgcaaggccagaccccaaatgagtggcaggatttgaactcaaatagtctgatagcagagcccactgtcttgaattctgaaatactacttgtctcagtgacagccccacagaggtctgccgcctgtgacctttcctccctgggccttttttgatccaggtggaacccccaccccatccccttgctgcttctctttgtgcttggagtagaagggaggcagccctgcccagttccttttgccctggggcaatagaaagaatgcaaaaccctagtccacctgacctctggtgacttgttccacttcgaccccccaggacagacagccttgtggaagcctctggaagcaccattttagcagccttcccctcaggaggctgtatttttcctgtctgtcctcaacatgtcttctgccagaacaacaagctcagttttcccttctgataaatctggtcaccctaaatatggggctttgagcaaatgggagcggctggccccacgcagccctcatttcaaaatgcagattcacacgggctgctattttggaggtctggtttctttccccacacgcagtggttttaagtaagagggaagggatcatgacagaatcttggcaggggaaagatgctaggagagaagatgcacctgggcagtctttgcttcccaaagtccccaaacactggcccttcaagaagctggttggggggtggggggagcaggaaagagggtccatggtaacataacactgggaaatacagcctaaccagcccctcctgcagatcagcagtgtgcatgttaaacatttgaaatcctagaagtaaagaagcctaactggttttgtttagcccagtttttccatttaaaaatgtagcctagtaaaattttgcaaaacaatgatgcagagcagagcttgcaaaccggcaccgatggtctgatatattcctgggagaggtctgatttggcctacaaagtgcttaaattttgctttcaattagtcactaacatttcacaattggaatagttctcctaatagataaagagggtattcctcttgaaaaatcagaagatctggaaacactggtccgtattcttgcctgactgtagtcagctggaagccaggctgtggtttttaacttgctgcagcccctgtgtctccttagggcaagacaactatctcttgctctactcatttatgatgctcatcgggttccagagtcccccaagcttgccttctctggtgtggaggtttccttgggtaggctggcctaggtgaccattggggcccattcatccattcactcatgcaacatatactgattgagcttatactgtgtgctgcaccctgtggatacgagatggataaaacagcccctgccctctggattccagcgctggcattctaagattctagttgggaactgcagaacgaggaggagggaggggttgaggagaggggagctggcaaggctacaaccaagcttcctgacttgcagccgcgggggcttgccaaagtgcttgccattctccatcgctttctctaccggctcaccgaagggagccgccactccaacagccacggtgagccttagagacatagccactgacttgttctgtgacttagacgcgttgaggctcatctccgggcctcagtttctccatctgtagaatgacccggttggactaggaaatgatgggctttccttccagggctggcactcagagaggctaagactccatgatcgaggaatgtctgacccagccattctggagctgttccatcgaattccaagcagccccactccctcctttccccatcccggtcaggggcgggcgctggagccagcaggccgagagggccggggcttcccgcccgggaggtggagccgctgctctgcgtcccgcccctccacctggggctcggcccggcccggcagatgttacaactttttcgaattctctcccgccgtgtcccctcgacccgcccaacttgtgcctccctccccttcccctctggggtcctgcccacctccctgcagggagctgggctgttttaaggactccgggtggggcgagaggccgggaaagcagaggagagagaaattaggaggcgggagaaatccagggcaagaaggaagaggggagtcagaggatggtagagagcactttttggaagctgccacgccgcgtctcaggctggccgggctgagcyggggaagagggagcaaaggcggcgcagggcctgcgcttaggcagcgggaggcagctcggcgcgggcctgacctccccagagcgccccgctgcggccgagcagatccggcccagccgtccggcagccagtcccggaccagacactggaccgtccccggggggcgctgaactccctcgcagcatccgagccggcgggccggtggtgcgccctgggcgcgcgaggtggtgaggccccaggagcccggcgcgccgggacgcgcgggccggcttggcgatgcacaccctcactggcttctccctggtcagcctgctcagcttcggctacctgtcctgggactgggccaagccgagcttcgtggccgacgggcccggggaggctggcgagcagccctcggccgctccgccccagcctccccacatcatcttcatcctcacggacgaccaaggctaccacgacgtgggctaccatggttcagatatcgagacccctacgctggacaggctggcggccaagggggtcaagttggagaattattacatccagcccatctgcacgccttcgcggagccagctcctcactggcaggtaggcgtggctcaaggccccggggctgggcatctaaaccccaaatcaacccagttgatagatttctcctgccagtaccaccccatgctgggatctgggaaatctcctgttggctgtgtaatcattagtaagtccctcgccctctctaggcctcaattacccttcctttacactgaatgggcttcatcatctttgaggtcttcttgctttgatgttccaggacactcacattccacacaacgtggagacatctggtcatccctttgttagaggaacatggcagcctctgacatttactgctgcttctatttatggaccccgagaccctgagcaagtcatttaatttctctaagcctcagttttcttgtccataaaatggagcaaagaacagttttcatcttgaaaaggagtggcaaagttggaatgagttgtgtgtaacctgcttggctgtcaatatatggcagcctctatgtctcctgagggattcaggtccccatactgcttgatgaatacattgggagaagaccaaggaattgataggtggaagagaaagacacataggataccatgacctgtgtagccttagggtggttacttcatttctctgagcctctgttttttcatctgcaaaatcctcccaagttggctgggagccccaagtagacatgctgcttcctccacaaggaaatgtccacaggcgaggcagcaggattacaggattaaaagagcagggaaacaggaggtgggggtatggaaggcaaactctggccacttaggagaaaatcctttggcagtgctgaagctaattctccttggatggggtccaaggcatgctttctcccaagttccacccaagagccactaatgtgatctcaggaaccagaagccttagtctccctgtttcttagtctcactatttcttggatgggagaaattgaggcaaggactcagggagggcctagtttggtgccygtgcccaacttcagggtctgtgggagataggattgagaggccaggtgtttggcgggggtccyggagctgggcatcaaatggcgtcctttgttccttcgatctggcacccagcgtttagatccaggaatcagaaggagaacagaagaaagaaggaggggtgtggggtgtgtatgggttggggtggtggtgcaggttagtggtgtagtggtgaagaccaatgttgacctgcagaagagggtggaggagtctgcattcccaagagttatacacaacttagcgtttctgtcctaagaggtgacttttggtttaagtagcggaatgagcagacagcaggagggcagtgctccagtcccctgatctgcgaagctaactgaaggtggccggccagtgcctgycctcccccaccctgcagctggctccatctcattgatgcttacagccctcgttagtgtttgttaacacatccagttgtgttttgtgacactrgagagaggcaaagtttctcttgtgactcacttgcaggtgggctttggtgactcttagctggcccatccgctttacaagccagcgctccacagcaccccacctctatgaagaccggcccagttgggactcagggccctagggtgcttctcatatcaaatccaataatttattagcttgattgaggcctggagaggccgttatcaccaaaagattttgagcatgacttgagtggacccaggttcaaagcttagctccactgcttgtcagctctctgaacttgggtcattgctgcactttcgggggacttggttttatcatctgtagaatgggggtggtaatagacttccctgtaggtttttaaaatgagagttaaatgagataatgtatgtgtatggcacatagtgttaaaaatggcagtagtagctaattagagctaacaacaataacagctttaagataaggaaaccaaaacagaaactcactcctgtgctctggttaaagatgtcaggtattcagggcttggcttaatttggatgcctggaggtgagaaaaaggtgtgggattttaacatacttgtgaagttccaggcttcttatttactctgggactttcaagacttgagtaaaggcaagacaccataagcagatcacatgggagccttgaccacagaagggggaagatgggatatgaatggataaatgaggaattcaggatttgcctaaccatttactcctgcctcagggtgatagcctggatcaaggggtcatatgagctcacaggcaggcacttgggagctggtcttaaaaaactgggaaactagacgagtcttagagatttcccatttcaaccaactcctatacgggagcaaactgaggcccccatgtgggaagagatacggcagcccggtttgctgaaaaagagtccctgcttagactctgcttggatttatgttcaagtcctggctctgttcctgaccaccgagcgacctcagttaaggcccttccccttcccttaaaaagaccttaggtcctttttaagatgaggtgagtaaactagagaatgaattgggtcccttctggctctaaaaccctcttaagtgtcattcattcattcatttcataaataattgagtgctctttgaacatcacttgggtgctaggaatagaaggttgaataaaggacagtctcatcacatgtcactgggcgcaagagcatgtgcagacgagtataatcccacggccaagtaagaaaacgatggtgtgtactaaatgctaggggaacccagaagcaaaagtgactaattctttgggagagttatgaaagactttatagcatggataacatttggactgagctttgaagagtgagtaagagtttgcctgggaaagcagggcttgctctaggccccagtgcaagttaatagcttagagcttagggattccgaagtctggagccagactgcttgggttataaatcccactccaactactagccgtgtgagtcaccgggcaactaatttaatttaccaagcctcagttcccttatttggaaaatgggaacaataatatgtacctctgaatttgtggtgaggattaagtaagataattcacataagaggattagtgtaatgccaagctcacagtgagtgctcggtattagctattattattgtcattattaccctgggttcaacttttatctctccaacttcctagctgtgtgatcttgggtgagtggcttagccattctgagcttcaatctcctcatctgtaaaacgacaatatgatctacttccagtgattttgaggattcgatgagataatgcatttgaggtgcttagcacagtagatagtacctggtggttactgttactatttttgctggtagtgctgggaccacagcccacctcacagtggtactggggactggatggccagagcaatggtctgtagcttacctgtgccttctgtgccttcccctcctccccaccaggtaccagatccacacaggactccagcattccatcatccgcccacagcagcccaactgcctgcccctggaccaggtgacactgccacagaagctgcaggaggcaggttattccacccatatggtgggcaagtggcacctgggcttctaccggaaggagtgtctgcccacccgtcggggcttcgacaccttcctgggctcgctcacgggcaatgtggactattacacctatgacaactgtgatggcccaggcgtgtgcggcttcgacctgcacgagggtgagaatgtggcctgggggctcagcggccagtactccactatgctttacgcccagcgcgccagccatatcctggccagccacagccctcagcgtcccctcttcctctatgtggccttccaggcagtacacacacccctgcagtcccctcgtgagtacctgtaccgctaccgcaccatgggcaatgtggcccggcggaagtacgcggccatggtgacctgcatggatgaggctgtgcgcaacatcacctgggccctcaagcgctacggtttctacaacaacagtgtcatcatcttctccagtgacaatggtggccagactttctcggggggcagcaactggccgctccgaggacgcaagggcacttattgggaaggtggcgtgcggggcctaggctttgtccacagtcccctgctcaagcgaaagcaacggacaagccgggcactgatgcacatcactgactggtacccgaccctggtgggtctggcaggtggtaccacctcagcagccgatgggctagatggctacgacgtgtggccggccatcagcgagggccgggcctcaccacgcacggagatcctgcacaacattgacccactctacaaccatgcccagcatggctccctggagggcggctttggcatctggaacaccgccgtgcaggctgccatccgcgtgggtgagtggaagctgctgacaggagaccccggctatggcgattggatcccaccgcagacactggccaccttcccgggtagctggtggaacctggaacgaatggccagtgtccgccaggccgtgtggctcttcaacatcagtgctgacccttatgaacgggaggacctggctggccagcggcctgatgtggtccgcaccctgctggctcgcctggccgaatataaccgcacagccatcccggtacgctacccagctgagaacccccgggctcatcctgactttaatgggggtgcttgggggccctgggccagtgatgaggaagaggaggaagaggaagggagggctcgaagcttctcccggggtcgtcgcaagaaaaaatgcaagatttgcaagcttcgatcctttttccgtaaactcaacaccaggctaatgtcccaacggatctgatggtggggagggagaaaactgtcctttagaggatcttccccactccggcttggccctgctgtttctcagggagaagcctgtcacatctccatctacagggagttggagggtgtagagtcccttggttgaacagggtagggagcctggataggagtgggtgggaataaaccagactgggatgcctgtgtctcagtcctgcctcctcacggacttgctctgtgacctcaggtgacccacatgagcttttagcctcagtttcctcatctgtaaaatgagctctaatgactttgtgactctttggtgtggccctggagcctggggccacggtggagttcctggccggccttgccacttgacaactcctttaaggcttcccccttaacacgggatccctgtggtggtgtttgggagttgcctggaggcaactccaagcctggcccccagctgaagcatggcaatctggctgctctctacagggacccccaagcgctgtgggtggagggcaggggtcgggggggttgaccttcttgggtcttcacatggcctaggccagtcctccggtcagactggtgtcaggcaccgtggtgcaaaattcctcttctggcccctccagtacccagagaaactggctgggccattaactgctgcagcaccaagggtggtagaaagagctgtgaagagcccccaaaccagtaccaggacacctgggttctcctgtgacctggggcacagttcttgccctctaggccttgatttccccacctgcaagtggggatgccagccctggctctgcctccttcatgaggctctggaagactggccaaggttgtggaggagcttgtgaacttgattaaagtgtcgtaacatggaagtgagggatgcagtgctgtctgactatgagcatgtgtgggtgtgtgcatgtgtgtcctgggggcaggtatgagctcacggtcggccgagtgaacaggagaggaggtggacagcctggctaggcggtgggggaatgggagtcctgccacagacccactatgtgacctcaggcacatccctgaccctctctgggcctcaacatcccactatgttcagtgatgatctaagagcacttcccatttggccattctgggctagtgtgcatgtgtgtgtgttggggtggggggcaggctgagtggtagcgaggaggccacgggtgttgcagagcccgcctgccgcctagcgcgcctccatccgcacactgcgttctgcatatctcccttcaggttccagtcggcgcagtgtgtgtaggcgaaagccctgctgtgaatttttaaaatagttatttttgtcactggcaaaggaggcctgttaggactcatcagcttgtggatgagcaggatgggtggggtggggtgggtgcggtatgtgtgggggttcaggtattggttacagagttccatccccactgcagatgtggctgagtccaggagtgagggtctggcctgaggctgttgggtggaggtgaccattcatgctctaagccccttcctcctggccctattctttttaccccttatcacctcccccaactagcatctttccctgcctctatgatgttgattcccagctgtgtcatggggcaggagccaggataggcagaggcctctggattccagtgacctccagcatttcagtctgctcaggagggaggctctgaagaagtaagtcacctgttagggcggtggcccaggcctgacacaccctgggagatgagctgtccgtagttcgcccactcctcagggtactctagctctgctgggtgcttgtcccagctgtgtgggtggggcctttccagggtggcatggagccaaggcttccctgccactccgggcttgcacgagttgtatggaggcctctcctgtgcctgctgagtcagccctgcccgaggcytaccctccagctccagcccccacttctctcccggggcccctgccctttggcaccgcaagtgcaggaccgtgaatggccctttctgctgtcccctaatcaccgaggcttactgcctgtgaccaacctaaaccaagaaagactagctggggatggggctggcacctgttcctggtgccctgagaaggagacttgaccccaggtcttggtccagtctcaaatccagcccagagcttgcctagctgagtcctacccaacccagcgctcagcaaacagcccggtggccccacgcaagcttgagcctgcaacctggtctagaggagctggcggctggcctaggcctgagattggtggagggtcttgggtgccccagagcactcaagcactacgataacaggctcagcctgtggtgacttctgctcttcccagcaatcagcatggctcctgccagccccctcccatctcctgtggcccaagtttcctccagccggggcacctgggtctggactctgtgccaggccgccaactggcactgccaggcaggtgctcgtaccatttgagcacctgtgcttgtggggagggaagggagggcagatcagaggcagctccggtccctcgggccacagatctggggaagtggagcccagagatgcctggtgagaccccctgtttcttccttggctgcaccagatggcagctgatctgccagctgtaggggccagagccagggggcagcctgtccaagctgggccctgccagtagagtcctgggctctggtaacccattccccaagggccaagtgatagccccacacctggatggagggccagtgctctgggctccatctttctcaggaggaagtggaggttctactggggagacttcctgcaagctcttccaggactcgaactcaggtcctctaactgcaaggagtgctatgcagccatcggcccagtagccattgtcctctgtcccatggctctctgcttcactctcccctgcaagagtgcctcctgtgtgggagacctcagggacagttctgctccctgatccctgacttcccccacttcttcatgtaggcctagccttacttactgcaatgaatgaacccaatctccctccacccagaccctcagcaggaccatttctctcttggcccactttccaccaattctgccccccatgctcactgcccttagtgggacaggccctgtggggaccctttggatggcacactttctgtggtgcctgcccaggccctgcaggaccctggggcacttgggcatatgtgtgtgggctgtggaaggtgggatttcagtcagctgtcacaatgccactggggctacaatcacccatgcaggaacccagccctggtcacttttcatcccttctgtctctgtggagcactgcctgtgttcacgtgccaatccctattctggcatgtcaggactgggttcagcaacctccagggctcccacccctggcgaccagcccatagcatggaggcctgctctcgaataccacacgcgtgttgcagatgggggcacacgtgctgcctctcgtgtctgctttggccctggggagtggggagtttggcaggaacagtccccctcctgcaatcatcggctcattctctcagcgccacagaggcacggctggctcctcagtgcccgccaccaccgggcacagctgctagcctcgcgggctcaggggaggtggtgaattagcagtcatgccttctcagcagagtggctattaccctcaggaaggtggggggtgcctgtccgaggcagtgcccacaccgctgagctaggctctggaaggctcagaggggtgygtgtgtgtgctcatgtgtaagactttcagaggggacttcttcctcttctccctcctcttcttctctcttccgcctctccagccatctctctgctatctggatcctgcagccctcaacttgcccatcccccaggaccgcatgcacagtgcaggccagcaggggagggagagaagagtgacagaaagagagggagctggaaaccagaaaggaagtaaaaaagatgagaaagacggagaactgagaaggaaggatgcaaaagagggaacaggaaaaatgagggagaggggaaggcaagaggagagaagaaaggagagtggaaaggagagatggaagtagggaagaaagagatgacaggagcggggctgtgctggccctgctcccagcagccacagaggctgcccccgtggtccacatcacatacagggagagaggtggccatcttcctgcctccattccttcacaccttcctctgagggacctgatgccagggtcttccccatgtgctctgctcacttctgagcatgctccatttcatcagtgggaatcgggagaggaaacaggggtcaggccagcacccagccacgcaggactgtcccagttcagaacattagatttccattaatacagcctcataatctcacagcatagttgcttttttgttttactgtgaatttttaaaacagcatcatcattcctttggcacccgatgagctggagagccttgtggttcctctccttctagctctagttctttgttctacagaaattgctgcaaactaggcttagacaaggtgatttccaaaccatgagctaaactccagtgcagactaagggaacagtgccctgaagtgctgggactcaagatgatggtgtgtgcttccgtgattcagggagtggtgtgtgaggggagaggacttttgagtttcttgattataatttcccatttattgagcatttatagtgtcagccactgtgcttgtctcatttaatctacagaacagcctggaggtagggaatattattgacccaattatgcagatgaagacacagaggcacggagaagttaggatattcatccaaaatcacatagcccgtaagtcgtggagtcaccctaactactaagcaacactgcctctcctgtccctgtgcaatggcaggtggccttggtggtcactaagggctcttccagcactttcttgtgtggaagccatcccctcctgggggacaggctagagggtctgggacaggagggtggcagtgcagccctcccccacctccccacataggcctgtagcttggccaccgtgttctgtgccctgcctgctgcccactggctgtgcggcccccaggcataggcctctccactctgcctctgaattgcaacgttggcggcagaagcgggaagcatattgtgcgcagaaacaaaactgagtggttttcccttttcccaaaggtggtaatggtgcaattagtggctaagccattacccccctcctcccttgctcacttcccctcttcccctctgccaccctccctctcccaccctccctctcctctcctgggaacagcggctgaatgggtgagctcaccctttattctcccccacagcccactcccaggaagaagggcagaatgggagggttatccagatgtctccagggggcccctgcaagtagggtagtgagtcagggacttcgtggggttggagaataccaacaagcagataacatgtcctgcaagtgagaggactagcaaggcaatgtggagggtcagagcgggtgggctagaatccctgagggtctggatgcctggatccttttatccaacccatgctcgctgggggcaggtgctggcatgaagcctctgcccatcaagctgcgaaatgggccaaggcaccctttttcctcagtggagaggggaaggggtatgcagggtctgagatgccaagcccaagctagagtgatggggtggtcacgggccagctttaaaccttcattttcctcctctagagcctagaaagaggcctcctatttacatagttcccaaaggccttcacagcccttagcccactccatctccacagccttcccctgcagggcatcttcattcccctgttgtgtagaaaaggagctggaggctcagagagggtgagtgacttgcccgtgatcactcagctaataaatgtccaaaggccgggcatggtgcctcacacctgtaatcctagcactttgggaggctgaggcaggtggattgcctgagctcaggagtttgagaccagcctgggtaacatggtgaaaccttgtctgtactaaaacacaaaaaattagccagacgtggtggtgtgcgcctgtagtcccagctacttgggaggctgaggcaggagaatcacttgaacccaggagacggaggcttcagtgagccgagcttgcaccactgtactccagcctgggtgacagagtaagactctgtctccaaaataaataaataaataaataaataatataaataataaatgtccaggaatcagagctcaaactcagatccttagtcttaaactccagtcccttttcttcctaactccaagaccttggagtaagatcttgtggctgtaggtatggctgatgccctgaagagttgaagttggcagggaaggtgcccagaaaattttggattgaagatttcatggcaagtctctggccagtggcctagcccgggtaagccatgctatgctcacctccccacagccccctctcgcctttttttttttttttttttttaccttgactggaagcacaagcagaaactgggacatgagcaccaggagaccagatttccatggtcccgttgggggcatggggttggggagaggttgcagaggagggctctggaggggagcaactgtcacagctgtgagaggtgggggtgagcaggcagtcagggctgttccctccagaatcctggggtgtcctctgcacttctgcgccaagctggagtgctagtgtgatggacaaggtggtaagagagctgaaagagcacgagcataacaagaaagacagaggcagaagcaaaaaaaaaaaaaaaaaaaaacagagggcaacagagagacagttacagagac

SEQ ID NO: 98084 - DNA, 59933 bp, Homo sapiens
aataaaaaaaatatatatatgtattaccttcttttggtaccacgatatagcatctctctcatttgaggccatctgtgtctccagccagagaatgggatttcactgaaaatgaaggaaaaccaatcggtgagtccagctgctgaaggttactctcccagtttgggtaggacgcgaaaaccgcttctctcagcctctccatgagctgctctttctccagctgtttgccagggaaaacacaacaaacaaacaaaaaaaaactggcgcagcggcgaccggagaagcctctgcaatatatcgggcgagcgtgttcgtgggtgcgggggaggggcaggggccgccgctggagtcgcccggcacccgcctccttcgctcgcccgcgtccggctctcacctagtgcccgttgccccgcgggccggcgcccgggacctccgtcctcagtgcccggggtcccaccgtgaggccgggggcgaggcggcgggccaggcaggccgcatcttcccctccaggcggagacgccggagaggccgttaccatggagaccgcggaggccgccccagcttcggaggcagccggccgcccagcgccctgagggcggcaaatcgatcgccggtcagaggccgcctacagggtcacggactgaccagaaaataagcagagaatgaactggaaaatgagggggattaaaagtgaaggcctccagtcgccacggcgacagcaaaaggctttgtgcccagctggaaaagacaggtgcaaaggccccggaccccgagagcccgggagcccgggaggaggaggcggcagcggcgctcgtcttctgcgggccgcgccgggatgcagtgactcagccgtctgagatctgggctagagccgctcagccgaccaccgggcagcagccttcggcttccgctttccggctttcgccgccgaggtggctccgcccctggcccggggccttcccgcccagccttggtccaggctccgggtccgagggcctggggagtcgcgcggcatatcgatggccaagagcagctccctcagatcacccttcaggcctcagcttaaaagtcacttcctcacaaacgactctcccatccagcggtctaaaggaggtcggtcctgatactctagtagctcacgtctttgtggcactcattttcgtgtttcatggcttaatctctgttccccagtgggctgtgggctccatgaggtcagagactggggcctggcacaagcctggcacttaggttcccaatgtttgttgagcgaacgaatcaatgtttgcgtgaatttacgctgccctgggaggaagggccaggctgcggcttagtgactcccttcctctcccgcccctcagcagctctgggtctggagctttctagtgctcaaaggtgtagggggaaaagaggaacaagtattgggcagtcacagctttttccaaattagggtaaagttaggtggcggcaggaacaggttaattagggccgatagaggtcaggagaaaggaaagaaaggttgaaccctcaagtgaatatttaaggatacgttaaaaggatttttaggctgcttttttttttttttttttttggccattaatggaacactgtccccttacagccattctccccaccttatttgaagccgtgttcttgctagcccacagcgtgtagcatctgggtcagagaaagctaatgacagatgatagcttcacttaagaaagcctaagaggcgctgtactcaatgttttgcagacattatttcttcttatctattgagtgggcaccaggtggaagttatcccatttcacggatgaggaaaatcgactaagctaaaataactcccacaggactaagttttacaaattacttcacccagcctgggcgcagtggctcacgcctgcaatctgggcgctttgggaggcctgaggcggaaatgtagcttgagcacaggagtttgagaccagccttagcaacatggccagaccccgtctcttaaaaaaaaaaaattagccgggggtggtggcgcgcacctgtagtcccagctacttcgaagactgaggcaggaggatcgtctgagtccacgagttcgaggctgtagtgagctatgattgcaccactgcacttcggcctaggcaacagagacctgtctcaaataaagtaaaaattattttacccttatttttatattgcacacattggcagtggtttccttctgcttttgctccttgacagcttttcctttccttagtgctaaacattacaattctgttgagcttcaagacaaatggccaacttgaaaaaagagataaatgacaagtgaaaaacgtcgaattttgcacacgtaaatatttaacctcaattacattaatagcaaaagtactttacttcactgtttggcacacagattttcagggagtgtctggaggaactgaatcaggtaagaagtattagagaatagtggtaagtagtaaaccatttttcaggtgccctgttggaaactattcagtgcttcctgcggctaccagcgaacaaggtctgaatccttgctcccaaccaataatctgtgatcttaagcaatttattcaactaacaagcctgttttctcacctgtattatggagatagtcaccttcttaaggatgtgaggattaaatgagaaaccctcatataaactgcctggcccatggcagttactcaaaaaatgtgaagtccctttcttttcctttcctagacagaaccaaaggctatcagtgcttaggacaggtacctcaattaaagataacttcacacaaaaactgatgaggaaagaaatccattttgttgtgtcacattaatacatcaatgacataaaagtctatacgccatcttcattaatactcaatgcactttcaagaaaatccacatcaccagaataaaaatttaagactgtcctcttttaagtagatacacaccaatttaagcaattaagaggcattaactacaacaaatgtcaagtgtattttttcttcttcccccaaactaattgcatctcaatatggatggaattttccccagacatctttaggaaagaagtcataagattttctaaaaattttttttgaagtagtaggggatacagtaggtgagggattcgtcctctaaaaacaggttccaggtatttagaactcacatatgctatgcattttgtgatgaaacaccagtaaaggacaaatcagactttttttattaaaaaaatactttacaggaaaaaaaaaaactatgcattccattgtcctattttacaaagaaatagcttaacaatttaacacacttagacagctacaaaaaagcactgtgttaaaaggattattcacacaaatttagatttaagactattcattaaaaacctttttaaaacactcgttaatgtcaataaacaaactaaggccacacaacgcaaatagtccgccaggcaaatatacatttcatctatatgcaaagacctcttagataaataaaagccacaggaaaaaaagtcttagctgccaatcaaaatggagtttactcacagaaaacactattacatgaaaatttacaacatgtgatagtagtacataagtatttctttagagagaattgaaaagtgctatattttaagagacagtggtctcaactacatgcacaagtggatcctaaaaaatgtatgaagaaaatggaaggccataatatttatggagagatacttgcttttaaagcaacaaactttcaagacaaggataggtcccttacgtgctaaagaaaaacatttgtactgtgcatttcctctacttgcatggccaataaatacagctacgacctgtttgaaaaacaaaacagatgtgaacctctggcatgtgctagctagtgaaaggttcttttttaaaaacctgtagcaatgataaaacagattagaaagatacaaaattatcctaaaggcataaatgcaaataaattttttatggcaaatacagatgaaaatataatgggctaatttattaatgattaagaatatattcactaagcgttttcatggatttgggagtcttgttcctatattagctttcattctagacaattaatatttatatagggaaaggcaataagcaagttttttccagtcattaagtgtgacttttatgcctagtaagactgatgcaagacatcttttcctaaagtttagtaaacaactttaataagctcctttttccccctacaagagcttgtaatattagtcaactggtattccaactgtctcttaaggggaaagggcacttttcaaaagtctttcactaaaaaataataaaagtaccagttaaacaaattctaagtactgaataagcaaattaaaggtacaattaaacctaggaaccaatttttagagttaaaactttggaggagagaacatactatataggtttttattattattgctttatgaatttgggttaccactttgaatcatcatcctactcctagcatatcttggtatagagaattacttctggggcaagaggaagacttttatgctttttaatgaataccatgaaattattctactttactaagttaggaatattcatttattgggtcctttccataagcacatttaaaaaccatccctctgctccacaaaatattaaaacttatagccacattgtgcaagtaatctcaagagctggcacaacggataatataccaaaaaggaagatcagcttaaatttcagttacaacttcactgccatcactactttaacaaatcagaagacgccagattgctccatgcctcactccaccaaaccaaataatttaatgatttagaaaaattgcaatcatttgtatcactaaactaggatacagctttgaaagcagtaaaaaacgcaaaacttctgcttttatactcatcagtctttaaagcatgctattaaaatctaatactcacataggacattcagttttcagatcacgttactagctaaatgtttctcttcattctattgcaattctaacatacaatgaatttattagtacatgattttaaacatttttattgtactcttttaatgtgtttatattggaggtgagggtagaatgttttataaaaggaaaatggggatttgcttttgattgtaggtctttgcagatccgctggttcctgagtgataatacacagtgctggctgtcaggagacagtctccttgtttattagcaatgaccagcttggatgacagatggcatctgctggatggcaagtgggagatggggaaatcggatcttggaagacaagaaaaaattaaaaaaaaaaaatttttgctttaacagccttctcttcatgattatttttaaaagcaaatgttgcctgagaagaattttactttgcacagcctggtaaagctcttctggacagaaaaataaaaacaagaaataacccaaacccacacactttgtgattaaacccctccccaacaaaataacaaaaaacaccctcaaaggcaggtcccgttaaaaactagtctggataaactggaatttaccctagaatttatacccaagatttaaaaacacccctgcaataatcacattacctttcataccattctaattaccttatttacaaagataactaaagccaacatcacttccaattcataaatggtttacattgaaatgtatccctatttgtcttcatcctttgtaacagagaatacatacatatacatatatataaggaataatacagattctaactaatcactgcagtatttgctgatggttacttttctatcggtttacacagtgacctctatactttgctaatatgcatttaactacacaacaatattgcacaaagtaatatttatataagatttaacctatttcagaatattttagagaaaattcatatttgatatttcaaaagatgcagctaagttttcatggtgacagacataataaagcagcatcttgtatttttttttttttttgcctatgttaatgtaaatatttcaaatcttaccatccaggaaaaaaaaaaaatctccaaattgcactgtaaccagggagatataagaatctggtcttaggtgtggggagtactcttccattaataaacaaaaggcctactgtattattaactaagagaaagtataatgtgaatcatgttaacattctaaaataacagaaagttaggaccatactagcaatgtgaactgtgcctgtttgaaaagaaaatttaaatactcaggcactaagcattagcctacctgaaactctaggatgaagtctagtgctgtattctttcttagaaaatagcaacacagagtaatagtaaataaacccaggtattcaccagttaaaactgtgaattgaagtgtctcagtagtagatatttatcatgaagaggttgatgccaagtgacaagaatagtttatcataagattgatgctcaaaatatggcagcctcatcagaaagactattattattctctaagtttaatagttgtgatcagtttaggaagcaaaattatccccacaaaatgtgaggatgccaggaagcagaacaatagagtatcatgtcaacattatctcttttacccaaaatatcttcaacagttagcatatattctagaagagattaatgagccatggataatgaatgaccaaggactattcatctttagattttttttttaattgaaatatccactgggctttaaataacagatacaaaaaaaagacagtttggatcagaaagtgctgtgctttctcttttgttaagaaaccagagagccactgaaatttccttggaaactacttgttatttgtggttagaactaaataacttacttgcccatgtaccagatgcagaaattctttcctgcaacctatgccattttcactgtagaaattgaacctgtgccataaagacacaagtactaaaccataaatcttatttatccataaaaacagcaaatatggcaagagacaaggcaagataaaattaagggaagtgaataatttaccaaacaagaatctgttattccagagaattctcattttgatttgaagaagagattgaattgttacctcacaccttaaaacagaaagtagcagcagacccactattacatactgtactaacgggataagatacaactcttaactttgcataatctgtgtaaaaaagatatgcttgacatttgtggaatgtcatttctctttatagaattataggcaagatttctccaataaaacttaacttaagccagttataaaactataacttcacatcaaaatttaaaaaagttaaaaaatgtgtttgaatatgtacatatcacacagaagtggttgaatgttcttgcagattgtgttgctggtcagagtccagtctactttccacttttaaaactggaataggctgagtcttctgatcttgctgtagattaagttctgatgcaggtgggaaagatgatgaagcagttgttaacagctgaatctctgtgcatgcttcttcagattcagtttttatcctcacacattgggagtcaacttctaattctcgctttccagttaaaccacagtccatgttagaattgctttctgtgttttgagtggcttccacaacagggtggtactgtttaagccttatatgccaggctaagctgcacaccgccgaaactgttttgaactgatgaatgacatttctagggatgaagtagatatcattgtcgcaaagctgaattctagcataacgaatgccttcccgcctcatttggtttagtttagcttcatctacccactgtacgcactgaagaaagaaaaaagttacgtgagactttaaaatatgtaataatttagtcaagtgaaataattagcaaaggaaaacagtagaaacaaaatgtgtyataacaataatcaaattaaaattaagcaacactaaatgataggtaactctctaaaaattcttgtaatgcctgggaaattattttcctcctattttactacctctttagtaacaaagtacaggttaaaatcagaatggcttagagaatcatttaagtatttcaaagtacagctaagtatcaatattctttaccacacataaaggcaacatgttttcttttcttttagtgtgtctttcagccttttgcagttgaggggacacagtgcaatggggttaacaagtgagacagctcatggccataactgagccgcctgggacctctaaccatcccaggcccacctggtatcccaaagattgaaaggatttcaagcattctgctagggaagctctgtttaaatgattttcagcaccacccccaccccagtctttaacagtaataaaattaaactcactatcccacatatcagactgtaagataaaattcaaaataaaatgggtatagatatttacttctaatatcgcaaatggtgataaaacataagttattacctgggaaactggaggttcatgaagatctaactgaagtctttgtacaacatcagtaaaatcctcagcatgaaaacaaatcacatctttggttatgcgaggttggtcactcctaagattaacaaaattaagtttcagagacaaacatctcacaaygaaaaatgatgacaaatttcagttcttttgttcttggaaatgcttctaccagcagagaaatagatgcatagtttctaaggactaggtatacaatttttttttaatttgaaaaaaactaaagcttaaaaagccataaaaatcagatttgctgttgtaaaattaaaacaaaaatggctaaaaagaatagttttattctaaactagttgcatttgcagtcctctcgccactttgtatctccatgtcctgagctttgttaaaactgggccccaacagaatataaaatggtttagccactgtggacaacagtctggtagtttctcaaaacattacaaatagaactaccatataatccagcaacttcactcctgggtgtatagccaaaataattgaatgcagggacatgaagagatatttatacacccatgttcacaccagcattattcacaaaagccaaaaggtagaagcaacccaagtgtccactgatggataaactgattaacaacatgtggtatatacatacaatgaattattattcagcctaaaaagggaaggagattctgacccttgctacaacacggatgaatcctgaggacaatgctaagagaaataagccagtcacaaaaagataaacactatatgattccatctatatgaaatatgtaaagtagtcaaattcatagaaacaaagtagaatgatggttaccagagcctgggggtgagagtaaaagaggaattgttgttcagtgagtatagagttacagcctcgcaagatgaaaaggttctggagctctgtttcgtaacaatgtaaagatgcttaactctaccaaatgtacatttaaaaatggttaagatggcaaactttatgtgtattttaccacaatttaaaaaactggtcctaaaccttttaaatagagtccacattgtcttatacaatattaaccaaccttgcagttgagttcaattaactcaccattcaccaaattgtacagctttcaaaactccaacagcagccgtactctgccagtcaaacccctgaccgacatgatcagcatgagctctagtcctatcttcaaagagaacttcrcggggttcactggtccgaggtaggtactggagattttttatttcattcattgatctagagttgatttggttgttaaacaaagggtaagcaaggaagaaagagaccaaaaaaaaattaattaatagcagtaaggcaaaaaagtctgctaaaataccagatttaaataagatgaggactgagaagggttcaatgattatgatcattascatttaacacactatattataatgcttaatgtaattaccttcctctccctgtgtgccataataaagctgaaaatatatcttagattaggctcaaatgtagtgcttctgttctagcaacagaaaataaaagtcaaagtttaaggcttctttaccctcattcatcttatttccaactctcaaaatatgctactagtgaggctgccctcacacagttaacaaaaactctggatggaaatatagctataattaagcattaatcaggctgcacttagacccactttcttataactaaaagtcaggtaacactagatactgaccatttgcatccctgttgttcctacagatagaatttcttggaagtgggaaaacctttttgtgaaaaaaaawatatatatatatatactttttttaaaaaagaattctagtgttagcatcataaggcttttgtttaagatagaatctctgatgttaagaatggcttaagcagatcctgaattctggcaaaacagctgctgccaaccaatttaaagacccccacagaaaaacctaatcagcatgataatagtttattcatccctttgtccatgacttcactttgtactctcggaccaataaacatctccacacatcagcccattccaaaacctttaaaaaccctcacccccaaactcctcagggagacagatttgagatttcctcccatctcctcctttagtggccctacaattaaactttctctgttgcagtctgctgttttggtgtactgacttgccatgtgcatcaggcaatgaccctattatagttaaactagagttctgattcaagattgcaaaccaggcatccatgttatctccttctacattaaaatgaaagtaaaagtcttcaaaccaataataggggaagtggggattagatgggagaatggattagagtacagatgaaacagaattagccatgagttgacagctgttgattgtatattaaacacacagcagtttattatattgttttctgcttttttatgtgctcaagaatttctaaatataataatctaaagatgatagtgaataagaagcaacaaaggaaatgaattaatgaatgagcaatatcaacaaacttttgcaagatggaaaatgatcctagtacctgagactaataaaactgtgcagagaaagccacaggcatagaatacacaagaagggatcagcagccaaaaaggcagcagacctgcccaacagaccttggaaaagcctgagtccaaaaagaagccaggcataataatgatgaacagaaatgaagtgaggctgagaaaaggggaattaaagtgaaattctgcaaataaacaagtcatccctgcaggtagaaatgtagacagacatttagccccacatggagtagactatggctacccacccagcatccattcctcccctttaattccctgacagaaccctaattttyattaggcatctcattctgccctgtatgtgacctcattcacaagctccagagttaatttctgatgagtactggtaaattatggtaagctcatttcccctgacagtgactgatttaggaatagacatgaactgattctgtctaatagtatgaaaggaaatatgctgaagagacttctgggaagtttcctagctcctaagaaagaagtacaagaaaagatactatcttcttctattagatatagccaaatcaagatgtgatgtctagaactgcctcagccatctagcaactataaagggagctagtgtaagtaaatagcctaagccaagagaatgttagaacagagaaaaggaaagaatctggtcccttgataacagcactgacacactgaccatatggtgcctagaaccaacctctctggacttctcgatatacaagacagacattttattttataaacaagtttgaaccaaaatttttgttgcttatagccaaaaacatcctgataaactttcagccagaaaaactgcacattctctaaacacatggaaattgccacaaaaatagaacataatcctctgaaatttgggcacatcatttagtgtccatttctatgcctgttcactctaagttgacaactgacaattgtctacctgttgacaagactcaccaaaatataaatagaactcacaatagacccaatgctttattttaacatatgaatgggtcaaccgagaatcaccagcttctgaagatagcagcctgacagagaaaaaccaaaatgaacaatgctaaaattttaaaacaccaaagaaaggttagaagacaaaagtccagtaaatgtctccgaatcaaaagcaaaaagataataggaaatatgaggaccatcaaaccaggagctctattattcaaccaatagtagtttcagaaagaaataagagaaaatgaagaagaaattaccaaaccaattaagtaagaaaaattatcagaaaggaaaggagacatgaatctttcaatttaaggtgactactaaacaacaaaaagtataattaaaaaataagaatgaaagactcaagacatattgtgaaatttcagactgctgatgatagaggatgctataagcttgcagacaagaaaaaaataggatacctacaaaagaataaaaattacactagcattaggacttctcataaataatattagatgccagaagacaacagagcactgctaaaaacactaagagacaacacaacttctggacttcagctaaattataaatcatgtttattaacagaaaaagaaattttcagacatataataactcagaatacctcctttttcttaagactattccttgagaatgtgtttaagcaagagaaggaaataaatctaggaaaacaacaaccataggttaatgcagaaaagcattaaataggaagtcctaggtggataactgaaataagccttctataggcagaacacagagttccaaaagatatccacataaaaaaactgatatgttacagcagacagtatgaaaaaaattytaaaaggcatgaggatatgataaaagaacagaatgctaggtaactaccaacaccaatgtcctctcaaaaaaaaaaaaaaaggttataaaagaaagccatagtcaaacagatgagaaagtcagcgtggttctggaagaaagtaatgtaccttaactctaaccctataagcagtaaggagaatggaagcaataaataaaaagatgggaagcaataaagagaacagaagatatttaggatggtcaagaaaagtttatgttcctacctcaaaaaaaaaaaaaaaaaaaaggagggtaatcagaaactgcaggaaaaacagaacacttttttatgttcctacctcaaaaaacagggcaatcagaaactgcaggaaaaacaagacttttttttwaaagaagttatggtaccaaatataaaactttcaaaaaatgtgacatggttttaagtacgtaggtgaaatataraaaagaaagatgcttttgcatattcttcctttgagtgatgatataacattgaaaccttagaatatgaattaataacttaatagctgggtctgcagtaaacatagctagccataatattttagaatccacttattgacaaggcatgtaagacctaatgataattttaaaaacagaatatgaattaaccccagcaatgtgtagggacagctgactgaaagaagaaatgaggaggaagaggataaagtaggggtcatctaactattcagagaacatgtaagaggacggaatacctgctatcataccaaaaaatcaaaacctgtataaaaacatgacatgtatatcatacatatatgcaactattatatacacaagattaaaaaaatttttaattaaaaaaaaaccctgccaaagcctttttaaaaaagtattataaacaaatgggttttgcctctcgtaaaaatatatttgcctctgggaaggaaaagtgggcaggattttccattgtaagtcttgctgtattattttatttttaaaaaactctgtacacatatttctttaactctagagttcataaatccaaagatgagcttcagtagcagtgtccttggtaactgaacagcttctcacatttttattccaccattttccacaagttttcactaacacaaaaagatggacattagtatttacattttgattcattcaattctaattcaaaatgcttctgaatgcctcacttaagaatatttaataccaacagaaataaaatttgatggcacctcagatgcattattaaataaatgatgttggtacagctgcctaactacctggaaaaacatgtaaatctcttcctctatactgaagccaattccaggtggattaaatatgtaaatactgaaagcacagaagtactaagagaaaatgtaggtgagtattttataacactgaataaaagaaggctcttctaagcctattgctaaaggagaaacctcaaaggatagatcatataaacaaaaacttctgtaagtaaagaaaaaaacaccgaagctgaaagccaaaaaaagataaaaacttggaacagaagggaaaaaaagcttaatagtcataatatatatgggatttttacaaaagaaaaacaccaaaatagaaacatgtataaaggaaattaaaaggaaatcaccaaagacaaaataagaaacccctcaaaaaacagcaaattaaaatgagacatttttgggttgggcgtggtggctcacgcctgaaatcccagcactttggcaggccgaagtggctagatcccttgaggccaggtgtttgggacgagcctggccaatatggcgaaacccctctttactaaaaatacaaatattagccagtggtggtggtgcacgccagtaatcccagctacctgggaggctgaggcatgagatcacttgaacccgggaggcagaggttgcagtgagccaagatcgcaccactgcactccagcctgggtgacagagcaagactctgtctaaaacaattttttaaaataaaataaaatgggacatttttatccaatcagatcaatatagtttaaaatgttagtggagagtatgagaaaaagggaactgtattatatgagtgggtatataaattggtatatttctggaagcccattagaaatgtgtatactttgagactttaggaatttttactaagaatataaacacgcatggccacgtgcagtggctcacgcctgtaatcccagcacttggggaggctgaggcagaaggatcacaaggtcaagagatcgagaccatcctagccaacatggtgaaaccccgtctctactaaaaatacaaaagttagctgggcatggtggtgcatgcctgtagtcccagctactcgggaggctgaggcaggagaatcatttgaatccgggaggcggaggttgcagtgagccgagatcgcgccactgcaccccagcctggcaacacagtgagactccatctcaaaaaatattaaaaaaaaagaaaacaaacacgcatatgcacaaacatacatatctaccaaacttccatccatatacaatcagtggtatgctctatatactttacatctgacttgagggtcaggggaggtggctgattttagctgatttgctgatttctatggtataaatacacctaacacgaatgatttccagttactaacgtgacatcacgcaatgtggaactggaaagtgatgctaatgatggcctttgtgaacaggtacaaactggctccagcacaccagtatcatgttttcaaaatactgtttacattgaaaacctgggaaaaaattacactaataaagagttggtgagggccaactcttttttaattaaaattaaaaaaaacaacaggccaggcacggtggctcacgcctgtaatcccagcactttgggaggccgaggcgggtggatcacgaggtcaggagatcgagaccatcctggctaacacgttgaaaccccatctctactaaaaataaaaaaaaaaattagccgggcatcatagcgggaggctgtagtcccagctacttgggaggctgaagcaggagaatggtgtgaacccgggaggaggggcttgcagtgagccgagatcgcaccactgcactccagcctgggtgacagagcaagactctgtctcaaaaacaacaacaacaacaacaaaaaacaactagccaggcatggtggcaggcacctgtagtcccagatacttggtggggctgaggtgggaggatcacttgagcctgggagatgggctacagtgagccctgatcatgccactgcactccagcctaggtgacagagtaagaccctgtctcaaagaaaaaacaaaaacaaaaaccaagaattggttaaataaatcttgatacaaccatacagtaaaaattcccaagttttaaagtaaacatcacacaaagaatggattttgtaaaaagattatttatggctatatataatttgaaaggttaatatgcctaaatggtggctaccttttttttttttttggagatgaagtcttgctcttgtcccccaggcttgagtggagtggcacaatctcggctcactgcaaccttcgcctcccaggttcaagcaattctcctgcctcagcctcccgagtagctgggataacaggcggctgccaccatgcccagctaatttttgtatttttagtagagatggggtttcaccatgttgaccaggatggtctcgaactcctgacctcaggtgatccgcctgccttggcctcccaaagtgctgggattacaggtgtgagccaccatgcccagcctgccttctttctactcttcttttttttttctttttgagatgagtcttactctgtcgtccaggctggagtgcagaggcaccatctcagctcactgcgacctcggcctcctgagttcaagcgattctcatgcctcaaccacctcagtaactaggattacaggagcgtgccaccacactaatttttgtatttttactagagacagggttttgtcatgttgcccaggctggtcttgaactcctggactcaagcaatctgcctgcctcagcctcccaaagttctgggattacaggtgtgagccactgcacctgccctctttttactctttcctattacttttttcttaagtttataaaaatcaggaaacaaatgatggtcattttttgaggaaagattacagaacaaaaaatgtatatagtatttaacaatttaataagatttcaagattcgtcatcatcctgcaacaaaaactgctataatctagcaatgtgcagaactttcaaatgactcctgggtttttaccatgccaccaccctgcatcgtacataatgttttcaaagtattttcatacatttcaagtacctaagattattccatacttagctcaagtatcattctcctatgagccttaagttaaggtttagattagtccattaaaactcacttctgggcacttattttgaattgctattttcgtagtctaagcaggtatagatcattttcagtctcattaaattagatttttcaaagtactagagagtgagttaatctacatttgtcttmaaagtctgaaacacaaaacatgttagcacaatatgaattactgaggctcggtcctatagaacattattggtttcatgtagcaaatactggttacctagtatatgtcatgaggacaaagatgaataaaatagtccctgtcttcccaaagcacacctcaaatgttagtagaaaataaaaacatgtaaacaaaactttaatgaacagaacattgtagggaacaattaattacctaaggaaggaaagaaaaacttcacaaaggaggtgacgtccaagttaagttttgtttggttttggtttgggtttgagtcaggatcttgtcgtggagtcctgggctcaactgatcctcctacttcagcctaccaggtagctaggactaaaggcatatgccactgtgcccagctcaagctaagttttgaaaatgtattaagtttgctgtgggacggtaaccccagcactttgggaggctgaggcaggaggatcatttgaggccaggagttcaaagccaacctgggcaatatggtgagaccccatctctacaaaaataaaatacacaaaacaatttttttaatcagatgggcatggtggtacacacctatagccacagttacttgggaggctctcctgagaccagaagttcaagaatacagtgagctatgattgtaccactgcactctagctctgggcaacagagtgagaccctatctcaaaaaaaaaaaaaaaaaaaaaatagtgcaaaagcaaagagttatgatagactatggtttggaaagtgaattcggtatggcyggagaagactaaacacagatacatctagaagaggtacagttgacctgattattaatgtaaaccacactaaggggtttgatcttttatcctgcaggcagttagggcacaggtttttaaaaaataagtaaaaattaaatttgtgttttagaaaaatgcctcactgtgataactgtgatgattggactgaaaagaggaaccgacaactaaaacatttacttaagggagcccaagacaaatggttttcaaactgtgctcatttttataagcaaccaactaaaaaaaagtagttttgcttatttgagaaaaagaaatatttaccgtcgtcttttgaagggtgactttggcatatctgctgtagggatcatctgttctcctggccttacccacattataggcccatcatcactctgggacctacactggagtcggaggctagaaagtgtaccccagggcaaagtcatctagaaatcagacggattagtcacattaaaaaattgtttcaatgatttataagttaatcctcccacccaaataaaagttctaagaaggcttttttacaactgtatataaagaaataaatgctatttacatagtaatttatattaaaaagaataattgaatttaagtactttgtactaatattattctatctraacatttctgtgcaaaacactggataaatttaatttcaataggcaatattagctaaatactcttcaacatataaagtgcccacttaagtaaagatcaaaactttaataatcttaattaacactcactttcagaaatggtgattcttctaacatatcaaggaactctgggaaataatcaccaacttcttcatctactgctccaacgagacttatctgccgcataggacctgctcggtaggtgccacagcagtatgtcctgttgacctaagataaaacaaaagagggaaaaatggactgaggtacaactataatataattaaagaattaaaataggttattgtttccaacgttgccatttcttctacaaactaagaactgaatggtcaataccttgaataaagtcagagaggcacccaagcacactgacaaatacactaatacatatgccacaagcaaatttcaatgtgtgatttaacctgaagatctcaaagaaacattgaagacattaatatctatttaatacttaaacttctctaaaaatgatttttttaactttgtaatattttagagtgtgatctttatttaagaaaaaaacatataaaagtaaaatcatcagggcagggagaaaaaaagaccatagtcatattaatcttccatgttcattttgtactccctagcttcaaagtcttcactttagcccagataccaggatacgaggctcactgttaccaagacaggccaatcttttttttttttttttycttttttttgagatggagtttcactctttgtcccacaggctggagtgcaatggcatgatctcagctcactgcaacctccacctcccaattcaagcaattctcctccctcagcctcccaagtagctggaattacaggtgtgcgccaccatgcctggctaatttttgtatttttttagtagagatggggtttcaacacgttggccaggctggtcttgaactcctgacctcaagtgatccacccgccttggcctcccaaagttttaggagtacaggtgtgagccaccaagcctggccccaatctttttctctactcaacttatgacaaacttatttctacctccagtgatttttctcttgaatctgcccaatctggaatgtcctcttttctgtcaacccaaatcgtatccatctttcaaagagcagttcaaaagctctttttttccagaagtctttctggtcacactccatgatctctcccttctctgaagtctaatgttacctatgagcaacatatattttctctatatcaactctccagtgaatttaggacatatcctacataaatatgcagcccagagcatcctatctagcatctgaatggaatctatcattaattccatacaatctgatactattcctctagtcatttcatgtatgttcttatcttatgtaatctccaatttagagtttctcaaggatagagagatggatcctgtacatagcaatggactagactagaaatgctgtatttaaccagaatttccacttcagatcagttacctagcattttctacctctgttaaaatgcagattaaatttaaaagcctaacatatagctgtacctttatataaaatggctctttaatgaacattaaaaaaaatttaaagaatctactgtcatgttttaaataccacctattttgccttaataggaaacagtctacataaatgaccatctaggatatcttaccacaattcttcaccatttgttctttagcagcatttttagaatcaatttttttccatagacaatttaacatcacccacacatatatacacagaaaaaaaggctgtagatcttgttctcaaatagcaggggtagggattttttaattccttacaaatcctccccccaagatcactttagatgattcttaagcagcagccacccaggccagaattactttatatatattcatatgaattactttccataagtttggtatgatcatcatgccataaaaagccaggggtggcagcatggaacaaaggctcatcatgggatatagagataaggaaggggaagaaaggtaagtctttttaaatcattattctaacctttctaagcactctaaaacaactaaagtagatttaaccttcagcaacatttctaggaatcatatgcttttaggggtaataagaaattatcagtctcggccaggcacggtggtgcatgcctgtaatcccagcactttgggaggccaaagcaggtgtatcatgatgtcaggagctcaagaccagcctggccgagatggtgaaatcccgtctctactaaaaatacaaaaattagccaggcacggtggtgcatgcctgtagtcccagatactcgggaggctgaggcagagaactgcttgaacatgggaggcggagtttgcagtgagccaagatcgtgccactgcactccagcctgggcgacagggcaagactccgtctcaaaaaaaaaaaaagaaatatcagtctcccccaaacacctctcccaactattcccagtctcagaaattcctttactaagaaaggctttctctctatacaggcattttatgggacaaatgtcctaaagacctatcatgatctttttaaaatctttttcccagccagaagtgactcttaagacctatcctaatttaaagcagccaaaactcaagaccaatcctaaagaagtacactgccatgtggcagttttcaatttacttggcctgagattatacaactcaatgcattattaatttgaaggaattcatactactttaaattttacacacaaagtgagactgaattaatattcttatatcacaccactccaagtttacctaattcaaacaccactaaactcaacagcactgaacttgaagacaacttagaaaggtaaacacctagaataatcaacatgtgacatgaataaatatgaagcatcttttcctatttgcaaagagaataaaaagtaaacctaaaaaagaggaaggcgggagcaacagaagacaaagaaagggtatgaccacaaaatatagcgacctcataatttcgccaagaccaacatgtttattttcatatatacacaaagaaaagcttctcatcttacgaggatcttcaggttcacacctttgtgtgagyaccaatgttgtatccatgagtgacaaagaattaacaatgttcaatttttatttcctggcagaagagccatcaagtaaacaactatgctacaaaatactaggactggattttgaaagctgcaatgtataaagcctatttggataactgtagctaacttagcctagctagagaaagcccttattagtaaaccacaaccttcctgttttcattcctttacttacatgaaattagacctctagctttctgtgacctacgtttttttctcagtatcagtcccctccttctttcagctgcttccatatctagtctaaacctcaaggtttatccctctctcataaacacactctcatcctctatcccagtccttccaccagccctgcctgcaaaccccaggcctgaaacattcaaactatccatcccacctctggacttttccattccataggccaataaatctctttcatcatttaagcccattttaaaattgactatcctgcaacttgccatcaaaagcaccaagatatatatacctttttcacataagaatcctacttctgtaatactagtctgtagtacctgtctctattgcctcacctcaccttttattcacatctcatatcattgcaatcaggcttctgcccataccactcccctgaaacaaatcactgatgacctcttcacaaccaaattcaaggaatgctttgcaatcacctgctttcttgatttccctttccaggcttcctcctctccaaaacgtggttgttgcagagttggcccagttttcattccacatattatctgtgggtggtttcaattatactacagatttaactaccacctgtaccctactacattccatatctacatctctaacttaaaactctgcctcagattcagatcttaacatacaaatgcctcctgggcagcccacagacaccctcaaatttaatacctacaaaacagagctcgtttttttgtaaggttcccttcccctcccaaaccttctttttctccttctgtatgtacttcgccggttaataatattcattttctcaggtcctaaatcaggaattgataaatccctcttcctcatcacttaaatcaaaatctatccttctaactaaatctgcagtaccactgccttaattcaggaaattatcatttctcacctaattgtaaaacctcttaaccagtatccttgcttcaggattcctatccccaagagccatcctacatactgctacaaataatctaggaaaaaacatcttatcattcaaccttcccattttaaatcctttagtagctccatattacctgtagcatcaaactagaaaatcctttttaaggaagacaaagcccctcctgatctattattccaagggaataacagaccaagatttgccacattctccacatttgccacattctaaatatacatttcgcaaattctaaataatttctgctgcctccacaagttttcacatgttattgtccacctttacaactcctatatttccttgatggtataaaatgactcaaaataaggtttcaagctcaaagaacgaaagtacataacatttacagattttaggtaagttagatttggagttataactagatcaaaaaaggtaaggaatagatgcatagatttggaaattgtctataacatataattttttaagtgactaagacttgagagaaagaatagaaagagacagaaccaagaactgcacttaaaggaaaacagatatttgacagacaggaggaagagttagctaaagaaattgtgaaaggatgagttaagaagtaatgcaattaaaatgatgtaagaataacrtttcaaaaatggtcaaggacaactawtttttaagaaaaacaaactggctgttatgaatagtgctgcaataaacatggaaatgcagatcttcaacatactgattaaatttccttgagttggacatataccaagaagtggaattgcttggtcatgtggtcgttctatttttaattttttaaggaacatccacactgttgaccataatgtctgtactaatttagattgacattaactgtataaaagttctcctttttccatatcctcaccagcatttattttttgtctttttgttaacagccagaactggggtgaggtgatatctaattgtagttctgacttccatttccctgatgatgaattatgttgaacattttttcatatacctgttgtatgtcttcaaatttcagaatgtctatttaggtcttttgcccacttttaaatcagattatttcgttgttgttgttattgggttgtttgaattatttacataaattttaggccacagggcagaaaatactatctggtccttaatagaaaaagtttgccaacccccaatttaaaccactcacaaaagaaatcaagcaatatgtttgaatacaaactttgtgaaagagaacaatctgtattattcaatattatatatctgtaatacaaagtgcctggtatgtagtcataaatatttgttgaatttctgtatgttaaggctagaaatgaagtaatcaaccacaaactctggcaaaaagaaaaaaaaggggtggrgggggagaagaagaactgctgattaccagtctatcacttgcatttaaaaatttaataaatgcaaatgtttgtgatacatttaaataattaacagcataacaatgaacagcagttatgaccacaaattcaacatgcaccaactttcaacctgaaaaggctgacaagaaaaaaaaaaagagagaaaaaaatagataaaacaaaaaaacattcaccaactgtaggaaactaatgccaaacaagcaaagtattccttctttttagtaagaaaatttcctgggcatatggccaataagctaggctccctgacagctaaatgcggcctgtgcctaagtttgggccaatgagacagtcacataagttacatatgcaatcttcagggcatacctttataaggaagtggcttgccctccacttcctttttctcttttgagggctgcaacacagagtggtaaagagctagtctcaatcatgcacatgacaacaccagtaggaacgacaaaaattaaagacagaaggaaactagcatcctggatgacaacaaggaacagagttgcttacctcgggactgctaaacaagagacaaacttttgttctagccactgcacattggtcctcattgttatggttttttagcctataccttgtatactttgtaatgagggaggcaatattctgcattgcacagagatatcatctggggtgtgatctcccgatctggcctaaaaaatatctataactagggcacacccaaaatagaacatttaaagtgattagggacttgcaaaccatacaaaatggaggaagaatgcaagaaatcaaaagtatttcaaaagtatttaacttgaaaagattaaaggagggacacaacagtcttcaaatacttggaggcctgtaacatgagttacaggaaagcaggtgtcattcatttaccacaagtttattgtacagtcatgtgtcacctaatgacagaaatacattctgagaaatgtcattaggcaatttgtggttgagaacatcacagcttgtacttacacaaatctaagtggtatagcctactacacacctaggctatatgacatagcctattgctcctaggctacaaaacttacagcatgttattgtactgaatactgtagtccagtggtccccaatctttttggcatgagggactggttttgtggaagacaatttttccacggaaaagggcagggggttggcaggcatggttctggatgaaactgacccacctcagatcatcaggcattagtcatattctcataagaagtgtgcaacctagatccctcgcatgcacaattcacaacagagttcacactcctatgagaatcgaatgctgcaggttatctgacaggaggcggagctcaagcagcaatgctattatagcttgctgcagccaggtttttaacaggccacagaccagtactgggggaccagtacagttgaggacccctgccgtagatacctgaaacacaatggtaagtttttatgtatctaaacacatttaacttcccatgcttgcagaatagggagttgttatgggtcagtgagtgagtggtgagtgaatgtgaaggcctaggacactgctgtacactactgtagactttataaacagtgtacacttaggttacactgatttttaaaatttttctttcttcaataataaattaactttagcttactgtaatttttataaactttatgagttttttaattctttgactcttgtaataacacatagtttaaaacacattgtacagctatacaaaaatactttctttacgtccttattctgtaaggtattttctacttaaaaacttttttttttactttttttaaaccttttttgttaaaaacaaagatacaaatgcacacattggcctatgcctacaacagggttggaatgattaatatcactgtctttcatctccacatcttgtcctgctgaaaagtcttcaggggcaataacactcacggagctatcatctgctatgataacaaagccttcttctgtaatatctcctgaaagatctgtctgagggtgttttacagttaacttttttttaataagtagaagtatgttctaaaataatgataaaaggtatagtaaatatagtaagtgataggaatttttcagctccattataatcttatggagtcagcgttacatatgcagtctgtcattgactgaaacgtcactacatagcacataaacatatattttatgccactgtactcaacacaggtatagcaaaccagacctattcctggccacttgaagcttacagtctagtaaggagaggcagacactaatctaaataaacatttaattataaactttgatcttcagaatgtaagatgtatgacactatgaaaaagaacatgggatcctgatccggggaataaagtattccttgaagtaacattgagctcaaatctgaagaacaagttcagagggaaacaaaatctcttaagcattgccctttccaagatctaaaagaaagctaatgataataaacacagaaagcaaaagagaaaaataaagatgagactggaaaaatcagctgtagctggattatggagagcctagaagatcacatcaaggattctggaaagccactaaaggatctgaaaagaaggaaagttacccaatttgcctttggttttttgtttgtttagttttctcagaggggcacaaaaagtaaagagatcagctaggagtattctataatatgccaaataagaaatgttaggctaagctaataacttgattttaaatagggacttctttttaaaagaaaaacaaagagatctgaaaattatacaggagataaaattgtcaagatgtggacaaagattggatatgatagataagagaaagaagtatgaaagatgactaccaggttctgtactttggaacctgaaagagcaactactctctcttctggaggaggatcaggtttcactgttttggacatgatgagccagaagtatgtgataggttgaaaaacggcttccaaagaacctaacccctagaacctaatccccagaatctgtgaatgttaccttatggcaaaatggactctgcagatgtgaataaattaaggatcctgagatggggagagtctcctggattatccaggtgggcttaaatgtaataacacgtgtcttttaaagactgaggcaaagagatatttgagaaggcgatgtgatgatagaagcatagcctggggtaatatactttgaagatggaggaaggggccacaagctaggaaatgtaagacacaagaagctaaaaaaggcaaaaacttgatttttttccctcagagccttcagaactgtaagaaactaaatttgcgttgttttaagccattgtttgggggccaggtactgtggcacacacctgtaatcccagcactttgggaggccaaggcaggcggatcacttgagtccaggagttcaagaccagcctgggcaacatggtgaaaccctatctctactaaaaaaatacaaaaaattagccgggcgtggtggtgagtgcctgtagtctatttctaaattttctatcttgctgaacagagctcataaactaattacactgatttaataattaaatctttagaatatattggtaccaggtaaggcactcctccatcgttactttttcttttctggctgttcttgcctacttatttttgcatataaacttcaatatctgcttggttgtctcaaaaaacaactatttctattttattgggatggtgttcaatttataacttaggagaaattgtcattctgatattgattcttcttccccaggaacacagtaatatatgtttccatttaagtcctcttttgtgtgatcatgtttcaacactaataggaagaatctgataaagatgaaaaggtgaagaggactgctgtttaaacatggtagactggatgtatgatttttttctattccttgtcaaaatcccactcaagtgagaataaaatatcaaggctaaaatcccagatagtcaaagagaacagaagtaaaaactacagatacaagctatcaaaatgtttttggaaggtgaaaaatgtacagggaaatttgcaaactgagaactctggctaacttttatagaaggcaagaacaaagcatgcaactaaaaacaaaaaaggtgggtttaaaatctgcttgagtcagtgagacccttccacttacattctaccttcctatcccatgctcctttttcctcaccttatttgtggtaaaagtgaactaaaygactacagacacaaggatacaaggcacaagcaagggagagaaccattacactggaagcagggaattaagcaaaatcccagttatttaacaatgcaatcgcctacctccttccaagaattctagcagacaggtgtgtaacctactccatcccctgacaaaaatgtggtagatttttagctgtagaaactaaaggcccaagaaacaatatctttaaacactaatatttagagcttttctcacaatatgaccacattccctatccagtcttcaaatgacaaatcccacccacgtgttcactgagtttctaatgttttataacgactcatgtttcaatatgaacagatcaccatgtttgatgaaaacataaccagaagactaaaataaaaataaaaaagaacttgaacaacttaagagtataaaagaaaacttaaaaacaagtataattagtatcagagagatgaaaaaaggtattgtatccatgaaacaataggaagttattaaaaaagggacagagaacaagaacaagctctcaaactgaaaacattacagctgacattaatcaacattaagaagctagttaaatctacccccagaaagcaggaaaaaagacaatgaaaaatataataggaaagataagaaaattgaggttgaatcgggaggcctaatatacaattaataaaagtttcagaaaaaaacgataactgagaaagaaaattaacaagtaatacaagaaaaaactccataaaggatggatttccacataaaaaagggtggtggggggtagggttcaactgcactgatgatgttttatttcttgggccagagtgattgttattattctttatatctgcgtctgaaatatttcatagtaattttttttaaagaaaaatgatccatctcaaggcacattatccttggtactcagacattctgtagtagaaattctgaaagcttccagagagaaaaaagcagaacagctaaaaaaaatcaggaatcattatggcattggatttctcaacagcaacactgtaagtttaaaggcactgaagcaatgcctttataaagctaagaaaaatgacccatcaatcaaatgttacagttaaagaaaaattcttcagatgtgagaattgagctactgaattcaggcaagagtcatggaatgccagacaggagaaaggacaaatagaaaccccaggatacatgcgtggataaaaagacctatcaaaataggaagatcccttggccaggagtttgacatcaacctggaaaacacaggaagaccctctaccttgcccccaccccgacccaaaaaaagacatttacacaaatgcttactgtaacaccataatattataaaactgtaaacaacctcaatgtccaagaataggagaataaatagtgagtgtgatattgtgcaatatgtatctggtcttcatccctatwtcctgaggtagggctcctaaactccttgttatctccaaatagctctatttttgtatgctaatattgactaacagctttagggcggggctggtcacctgaaaaataaaggtacaattagagggttggacggtcagccctacccccaacctccagggaggggtgctaaaggtcaagctgaccaccaacggccactggcttaatcaatcaagcctacataatgaaggcttcataaaaactgaagaggttctgagagcatctggatagctgaacatgtggaagcagacaggaagatcaacaggaactcatacatttgctgggagggtggcataccccaactctacggggaaagaagctcctgtgctcgggacccttccagaccatgccctgtgtatctcttcatatggctgtttatttgcaccctttaacatatccatcacactaaacccataaacataagtatttccctgagttctctgagctactctagcaaatccactgaactcaaagaggggatcgtgggaaccccaacttgaagccagttggtcagaagttccagaggcctggacttgtgactggtgggaaggagaggccagtcctggggactgagccctctatctgggatccaaaactgactctgggtagtgtcggaattgaattggatgacacccagctggtgtctgctgaagaactgattgcttgcttgttgtgggggagaaatctcccacatttgggcaaagaagtcttctgtgttgattgctgttgtttgagagcagaggaaaagtaaagtgttcaaaaacagtgatacagctgcccaacaaaataccaaatataatggttaaaattaatgtagagttagatgtatcaaaataatcttcaaaaacaatgttgaacaaaaataacctgcagaatgatacacacaatacactgtagttttaaaatacaaaggtacaagtattgtttttatgttcatttggtattagtaaaatgttaaaagataaaacgacatgataagccacaaattcagaataaagatttacttctagggagaaaggaaaagtttatttagagaaaaaaaaagcgggggaaagacacgaagcagaaattcgcttaatatattttatacttttagttacgtggggagtgggaatggagaagggaaaggttggaggggtagtagcgggtaactgacatcaaagatcctaacctaatgggtatagagtttctgtttggtatgaggaaaaagttctggaaacggtagtggtaatagaacaatatatatacccaatgccacagaattatacactttaaaatggttaaaatggtaaattttgtgtatatttgacaacagttttttaaaaaccttagcaggctaagggatggtattcataacacaagtagacaaattagcctgacaaattagcctttgaggaggagatagaatatcttctctactgtaacaggagagaatgaggaaaagatgtatacagataaagtttaaatagtatttatgaagaacaggtaaacaagctaaacaaagaaaagaagtaggcttcccaggcaatgttgacaacccaatgggaagcattataaaatgtcatgaagagacaaagtccccagtgatggccaatcaaaacatgattttttaaaatttgcactttgtagaggtcagataagattatctcttagtttatgatgctctgaaattctaaaaagatgctatctacaggtcaaatgaaaggaactagagtaatggtagatggtatatggtttaaaacagtgtttcttaaacttgcctgatcataggaatcaagtcggtcaaggtacttatttcatgcctcactccagacctcatgaaccaaaatttccagaagaggaacctgagagtctaatgtatatttgaactagcaaccccaaattattcttaggatctggcaagtttgggaaactctggcctggaaatagcaactgaaaacaaagaacaagttgaattctacagctttccggagtttatgtactggagcacagtggaggaacaaacagaattgggaggactggagggaggtaagtacgagaccaaagaacagaaaaaactaaagctgccatggaagcaggagacataacgccaacaggaaaaacacagtctttggtaaaatcagaaggcaaagtggggaggggagaaggatgtggcatcaaagagaaatatgcctattaaaaaaaataatagttttgcataaaatttattctctttataatatctataaaatgttaaacaattatctttgaatatatatactgctgtcaatacatatgtagtgtttaaattagaaactcaacttcacagttatcctgtatgaatttctgaattaagtaagctcaactgtgtccccaatacatagagcttctacaaaggacaattataaatctgttaataactcaggagaacaccaagctaaaaaagcactatgtggaaaaccctgtgtatgggggttgagagcgggtgtggattattccacagaactcacgtttcaggaagaagcctattcaagctgactttttaaaacacagaaaggaaaaaaytagccagcgatcttcctaaccttgtgccttgtgaatagaaaggcattcctactttaaaatatatagtgaaaaaacagtgtgactgggtcaaagtgagtacttaaaataagaggaaaaaaaaaagaatcaagcctaccatttttatttatgccattttattttataaaacctgctacttaaaatgtttatttctccttttctataacacactaataatgcatacagttccttaagggtttctgagctatttcccaagctatatactactctactagttctattcttattagtattaccaattcattataaaatgttaatcaatcaaagatcagagtgcatataacaagcccatataaggccttgtcccaacacacaacgagggaataacattttttgtttttctctggaaccgtagacactaaaattatacacgccaatgctacagaacattatcattttatagagtamtaaaagtaatataagaaataaaactacctaaagttaaaaagctttgattctcagtgaaacctcaaaattatatatgaaaatttttgaaaaagatacttaaaacatgcagatttgccaatcttccctacccccagcaaacacataacacacactcctctccatgtacatccttcaattacttagttgccagaagatctcagaggtgatattgaaaacaattcccttttaacttcactgtatttttagtgtttgttattatttgcgcttgcaatttatgtacagattttgagacctatatggccttggtggtccatttactagcaacatcagcatcaccagaaaatgcagactataagcaaagctagtgctcacacctgtaatccgaacatgctaggaggccaragcaggagaatccgttgagaccaggtgctcaagactagcctagacgacatagtgagactctggctctataaaaaaatttttaaattagccaattgtaatagtacacacccgtagtcctagctactctagaggctgaggcactggaaatagcacctgaaagcgaagaacaagttgagttccaccacttcctgaagtttatgtactggggtacagtggagtaagaaacagtagaaagactactagagcctaggagttcaaggcctcagtgagccatgatcacacttcatgatcacacttcagcctgggccacagagcgagacctcatcaaagaaaggagaaagaaaggaagggaagggaggggaaggggaagggaggaaggaaggaaactcaactttataaagttatcctgtatcaactgctaagagttaagtaatcaaacaaggatcagcttactgtttcaatggacatataaatttttctgctctggtattagaacatttgagttttctagaatgttaaaagaaaaccctatatgtggatcctagctttagccaccacaataatttaaaaatataaaaataacagaagttttcatttttcttgcacaaaatctacattttactttctcctgcttagaggagctgagttctaaagcttctcaaagtttaatgtgcatatgaatcaccttttaaaaatgcagattctgattcagaaaatctgggtaagagcccagtctacactcctagcaagctccctggtggtgccaaattcatacatagagcaaacttttagtagcaaggttctaaagaaaaggcataatttacaatagtatttacctgtccacggtttgcaaagcactaatcttgatcatgtctccaattcaattcctaattgataaacctaccactttcccatccttacttactggatccttcatatggataaaataaacacttcattcttaaaatgcagaaaacttctagtctttcttctgcctgcctttctttttggtcttttcccatgttcatcatacttacttgtggatgcatcacaagattccacccttagtttcatctcttttccactgctattgctggttccatcttctgcatctccgcatctcctgcattaatgggttcaacttctgcatctccaacctagacacatctctcaaacttggatccatacattcaattcctaagagttctttttttttttttctttttttctttattgagacttgctctgtcgcccaggctggagtgagtgacgtgatcttggctcagtgcaaactccacctcccaggttcaagccagcatcccaagcagctgggattacaggcgcccgccaccatgtcagctaatttttgaatttttagtagacatggggtttcaccactttgaccaggctggtctcaaaattcctgatctcaagcaatctgttcacctcagcctccaaactgctgggattacagatgtgagacaccatgcccagcctcctaacagttatttctaaccgtaaattcccacaggtaccttcaactcaaaatatctcaaactgagctcatcaacaccctctagccacagaaaccggctttttcaaccatgtattggctttgaccagcatcgccatccacccatttgtccaaaccacatctgaagactatctctctctctcaccaagactagttaaatctcaaccttctaattatttctcaaatttctttcttttctctctaatgtcagtaccagtttggacgtggagcatttatgacatggttactatcgtaactaactggtattcttgcttccaatctcatatcctgcaccaccaattccatcctccacactattatgtaatctttgcaaacataaatggatagcaagcatttccctattaaaattcaccaatgactcccaattatctttaggaaaaagtactaactttttaaaagcatgtcatctaaggctcttcacaatcctaatcatgtctctctctctctggtctcaactccttccatcccttaacagtcagtgcatactcttgccatgtcaatctatttgtagctccctctaagtgccgcattctcaaatgcctctgtgtatttgcataggctgttattcgcttaaaatgttcttaccaagttaagtattaacatgctttcaagattgtactcaagcatcacatggcttaacatgccttttcgaattacctcaagtctgcattaggtaacacagacagtgctccctctattacagggttttccctatgcgtacctctactcaagtagtactctgtattataattgctggtttactcatctcccccactagactgagctcatcaattagtccttttaagaacacagtgcccagtacatggtaggttctcagtaagtgcttgctgaataaactatcttgaaatatagtcacgaataattattatggctacatatttaaactataaataacttccaataactatgtctctaaagcaataaaaaatttatttgactttatttctaggtttaacagaacttcataaaatgtcaaaagacttcaggtaagtccacactgccctaggtatttgtttaattcccaacgatctaaagggatttgttaaaaatattagaaacaaagccttttgcatgctgtttcacacggagatactttaatttcactgaccagagtgttagacaaataaaagcactaatctcttctccatggtaaaatgatgtgaacattgttcaggtggcctgggtttgcatctggactcttctacttactagctatatgaccttggataacaaacaatgaacatctcccagcctcagtttcttccatgggaaacacagataaaattgcttacctacctacccactaggttgtttcaaatattcagatatgaatgtgaaagcatttctataaaccatgaagtgcgaaatcaatttgaactactgtgttaacttctatcccaacatctgctaaagttgcaaacttcaaagtttagtcggctaatccaacctcccatatccacaccatactcttctctaatgactgaaaattcataaataaaattaagttccaggaccaccagagcacaggactcattcaacagtcctcaatattcttatgtggttgaagygtttaatatctaatttaatcataatctgaaatgttcttaaaaagtggttattttttaaatctcaaagtaagtatcaaggtaagttgttggtacagtcatttaaatttcagctccattttaaaaaattaattggaggacaaaaatcagcagggaatatttcaagatattttcttttattaactatttagactggatactgtctgttgacatacaaatttgatccactttaactaatatgaatgttaaaaagacacccttacaaaactgggacagttttcccccaaatttctggcttatttctcagaaatgcttgttggtctatcaaaagagaaaatttgctgcatttttctaaactaaaaaaatgatagagcatgttgattctgctctcagcaatatctttccttgttaaatagggaacttatggggattatggactatattaggagaaatgttttcrgtctcatctgcaatatttataaaaataggattccttgaccttcaaagggcaaaacttaaaaaaaaaatgaaaatgaaaaaagaaaatctactacaaaagtcagcacttcggtacctggttgtggtaataaggccaaaatccaagacgaagccctttattgcacatggtgttccaacatcttgggcagccccatcttgcgacctctccacattggctgctcctgctctctctactgcagagagaacttcaattagagaaattctgaagctcataaatctaaactggatactcccctcattggaggcaaagatggtaagactcactaaaaagattcaagttagaggaggtttcaaataaatctaagtggcttgaaaccactataattcaggcagctgagagtcttattacggcaacaatctatttacctaaaaaaatatatatatattaagggaaaagaatggcagcaaattactagacaacctgaaaaaacagaacatataatcataaaagtttaaaaagtgaaagtctccactaaagttgaatttataatatatactgcagaaacttatagctgaccatttatattcaattcttacgagaaaagcaagtaagaaaaaaactaggacacattattaacttcttattccctaaaataacttcactgaaaaaaatgtttggttaaaaccactggttaagaagcagacgtttccctgctgacttaagcctagctgcccatgcaaggcttcaaaaaatgtcttcacctacaacaatgtataggcagaaggagcagaggctatggcggtcttcctaatgacacttccaagtcacataaatggggtatatttctgggatggactgccaacaagttactgaaagagatataaaaactccaaaaacctggcatataaacaggcccatgccctcacgtgttttattatgatataaaagcaaatcttaactaaagttatcctgagactaacagatctcaatcacatcctccatactaacattacccgatttgtgaaagaccaggtaagttttcaagctagttttccatraagatttgtaatgatgtataacatgtataaagcattccctccagtaaagaagaagccccacccgaactcagtaattaagatttttcaattagaggaagagacaaacaatttgaagcacctttattaccataaatttgttatcaaaaatgtgctggtatgtgctgtgcgacagaaagaggttaattctgtttagaatcgtatttactaaataatttttaacaacaatttttatcttacctgagtgtgaaaatttgaaatggtggttgtttcaatatctttcttgcccagaatttccattttcactggagtgttggggaaattaaaagcaaagtagtccaagaagtctgggagataagcagccgctccatgcactattgctaaagcatagtaagcagcatttttctcattttcactgaatgtcaaagcaagaaactcctcagaaaatctctccatctccattggagacaaaaatgagagttcatccatgtaagcatgaaggacaagagcaccaccattggactggtgttcctcatgaataaagttgctaaatttagtacctgtttttaagaaatttctacgaatagaatgttcctggtgagtcataaaaggtgtttgtactccctggggtacccgatattcttgcatacccaaatttaatcggcacagctgttcatctttcagatacctgaaggactccttattaagtcctgaagtgctatttatttgtccttgggtgagaatttctttactgatgcgggtcaggccagcacagacggtttgtacttccttattgtacattttaaggcgtcttcctcgcatgtcttctcggtgtttctttttctttttcttctttattttcttcaagacaaaatcatcggctctctgggttttaccattttcatctggtgtttctggccacaataattaaaaagaagttagttgctaggactagtgtcaacatacaagcttcttaaggtacttgatctcattaaatagcctatcctcaatttctctgaatttgctattacaacttacgtgtttagaaaacaaatgagacagagatcttaaatataataatattctggattgaagaaaagaataaaattgaaggtatccatttttcaaagcagtatattactgataatggagaaaaatcagaaataattcacacatccaaaaaacagagaatggttaaataaatcatgatatagcaatggtatgaaacattatacgatagctaaatatgatgattctgaaatctatgtaacaacatagattcttttgttcagttatcatcataaaatttaaatttaagctaggcatattttgctgtcagcctatgaattactatgatacatacaggtaaatcaacaaaggcaaagtaagccatgagatatcattttttcctatcaagttggcaaagtctgcggtttctggtcattctcaactactactgctggaagtataaactggtacaactttctgaagggcaatttcatgatacatgttaaaagtcttaaaaaatatttctaatcctcagacccagaaattccacttccaagtaaaagttatctaagaaaataaytgaagattatataaagatatccattacagtattatttaaaacgacacaacagggaatgctcctaaatgtctaataacaggggactgattaaactctggtagttacatattataaaacactactcagccattgtaaagtatattatagatgaaaaaactgacataaaaattagaaggttacaaaatgcttagactcattctttcagaaagccttttcttccccacccaatctggatagctactcctgctatgggctcccttaagctttgtatccccatctcagcacttatactctgtgttattaacatttcattttacaccctcccctagactgtcagcaatctaagttcagtgatgtataccttacctttctctcctgagcacttaacacatgtacattctgatcccatttttatataaacattaattcatccaaacatttaagtacctactaagtgctaggaccataatgctgactaggacatacacaatccccaatctcttggatctttttctccccgctttttgaggagtatggagtctccatatgttgcccaggcagggctcaagctatactcctgcctctacctccctaagttctgggattacaggtgtgacccatggtgcctggcatctcttgggtcttatgatctaattgtacaagaaaaagaaagtaccagatagtgataagtgggatgcattaagtttgggggaagctcttttggggaggtaacattaagagtgattcctaaagaataagacaagccaggcatgtaaaggtctaggagaaaatattcccagaaagaagaaaaggacctaaagagatgaagaagtctgtctgatctatagatgctttacacacacacacacacacacacacacacacacacacacacagaaaaatatctggagaaatatataccaagctattaatggtagttatctattggtggtagaattctaaatgtctagcttttctgcttatctgtattttctaattttctaaaataaacatattacttttataatttaaaaacttatttttaagttttaaaggattatcatggattgacaagcccaagatggaatggcatcttttgtttactaattggaaaatatacctagcaggaaactttcaggattaaataccaggtagagtcctgacgaaccttcaagtttggtctagtatttactgcatagaatttacccaccaaacaatcgttttttctaacataattgaagtaatttggagttaagacaaatattccaattaatcctatttttacatctagaaaaacaagttcaacaaattttagagttaagaatttacttggtacaatatgtaaatatatgacagttccaatactccatataaaatcacttcaagtcaattagctactacaagggttacgaaaccttctaaagaaaatacttaaaaaagcaagtcaaagactttactaatgccaaataatatttccttctaagaacaataaaatgaaaaccgtttatttgcaaatatcacttgtaattaaactgtaataagatagcaaaatttacatttaatcagaatactgttaacctggcaagagaaaaagtcatcttttattctatatacaactaaatatttgagatatttgagaattaaacacttagtaatagtcatttatttggtaagaagtatacttcttaccaaataaaattcatctaaatactttccccaatatcaaatcagtaatttaggcaattctcccaagcaactaaatgttaatgccattcaatataaaggttagaccaatttaaaaatagtcatctaattactctcttctattaatgttttagcaatttcacaggaaaacaagaaaagaaaatatctccaaatagatcttgttattttaagcttcggaagaggtatttggtatgcagaaaatgaattgtgacctagatctgccactgaaattagcaccaagaaagaactgcgttgattgtaacacattttctrtattactatcaactttccagtggtatttctaacttggtcaagtctctgtgggtttcacttatacgagtttcacaaaattcacttatatgaaaaccattcaattagtccaacatggcccatctcaaaaaaaaacaacaaaaaaaacaaaaaaagagaaaaccactgtataaagaaaagaatcttacattgtaatctcataaatcaacatgataaaaattttaaatatgaagtaaatttcaatctatcttctcactaatcctgtttttcaattttttttttttttgagacagagtctctctctgttgcccaggatggagtgcagtggcgtgatctctgctcactccagcctccacctcccaggttccagagagtctcctgcctctcggccttctgagtagctgggatcacaggcatgtaccaccacacccggctaattttttgtatttttagtagagacagggtttcaccatgttggccaggctggtctcaaactcctgacctcaagtgatccacccacctcagcctcccaaagtgctgggattacaagcgtgagccacgacgcccggcctcagcttttgacttttatctaacttagggtaagatacagaaagcttgactttttttacagagaaatttaagactacccatttcatactggctaacaaatctccatgagtaaacaaaatttattattgaattaccgtggtggcaactaattgagaatggcatatgtataaacaagttatyaaaggttattatcaaacactggccactgttgctttatgagaaaaataacaattgccctgccttgaatttaaaacgttatttgaaagtcagtgtccaaagtcttcttcacaacttttctatttctggttttagctttccaacagagaatctattcagcacatttttagtatttccccatagtgcaaaagctaaaatttattgactacagttctttacagaaaaagagccaacctacactatacctgtgattaagaaaaactttcacctatccaactgtgtgattacatataaagagaaatacataattctacagaggaagatacattcacttaagaaacaaattgctggctgtctttaaaaaggtaactattaatacatgacgttattaataagatcctcatatgtgctaatactaccaatattatcaattaatgtcatctgatttcacacaattgaaagttttcattaatgcaaaaaaacagctttctatattattaagttctttttttttttttgatagggttttactctcatccaggctggagggcagtggcgcaatctcggctcactgcaacctctgcctcccaagttcaagtgattctcccacctcagcctcccaagtagctgggactgcaggtgcacatcaccatgcccagctaattcttgtattttttggtagagacagggtttcactatgttggccaggctggtctcaaactcctgacctcaagtgatctatccgcctcggcctcccaaagtgctgggattacaggcataagccaccatgcccggcctacaaaacttaaggtcttaacagcaattcttatactctaattatggcttagaagtcggaaaaaaaaaaaaaaggtagtatcttcagttcgtaaaaatcacagtagatgaacaaaagcaaaacaagtgtaattgcttacatcttattattcatgattttttaaaggactaaagttgtttcctgaaaataaattattttcagtcttcttgagagttcttccagttctatataaatacctgactaaaaaggaaaaacaaaaaactactcattttgaaagccaaacatttgtgaatcattgtatgtttttaacactgccttactttacccaccatctctctatattatggtgttttaagagcgctgtctaggtttaaatccctgttctataactttctagtatactttctagaagtatactttctagaacttttttttccctaagcctttacttttttttttttagagcagtttcaggttcctagaactataaccacacctggctcccacaaatgcatagtctgtctccctgattatcatcaccyccagccagagtggaatacttgttacaactgataagtctacattgatgcatcattattcgcctgcccgcagtccatggtttacattcaggttcactcttgttgtacattctgagggtttggataaatgtatgacatgtatccaccattaattaagttgcataaagagtagtttcactgtcctataaaatgctctgtgctctgcctattcatgcaaccctctctaaaacccctagcaaccactgatcttttaactttcttgatagttttgccttttccagagtgtcatataattggaatcataaaatgtgcagccttttcaggatggcttcttycacttggtaatatgcatttaaggttcctccatgtctttttatggcttgatagctcatttctttttagcactgaataatattctactgtctggatgtaccacagtttatccatttacctactgaaggacattttgattgcttccaagttttggtaactatgaataaacctattatgaacacctatctacaggtttttgtgtggacacaaattttcagctcctcggggtaaatatcaaagagtatgactgctggatcgtatagtatgtttagttttgttaagaaactgccaaactgtcttccaaagtggctgtatcattttgtattcccaacaataatgaatgagatagcatatctttttgcaagttaattctttgcactgcttctcattggtaaaaccggaggaaagaacagtatctcattataaaattaktgtgcagagtaaatgaaaaacgcatgtgaagtacttataatagtcctagaacataataaatactcaatacatcataactactattattgccaaaaacagttgaattctagaggcagtagagtgtactatttaagataagaacaggtgctgtactgttagatagacctaagtcaatgtcccagctcttattgtttactaaggtctctgggtaagctcataaatctctttaaatctaaattttctcatcttaaaatgttataataggccaggtacagtgcctcatgcctgtaatcccagcactttgggagactgaggcaggaagactgctagagtccaggaattcaagaccagcctgagcaacacagcaggaccccatttttacaaaaaaaaaaaaaaaaaaaaagttagctgggcttggcggtgcatgcctgtagtcctagctgcaggagtgagctaggcttagctacaggctgaggtgggaggatcgcttgagcccaggagttcgaggttacagtgagctataatcacttcactacactccagcctgggcaaccccgtctcagaaaaaamaaaaagttattaattctagagtctatctcacagagttattttaagaattaaatgagacaatgactataaggccctcatcacaatatgtgacacacaataagtctcttatcatcttgattatcaagagaaacacataagaaagatctctgaaagargaaagaaaacgtatttgccaaatgtctaatagggaccatatatgttattttattttaatcctcaaaccaatgaagtacggagaaagaaacagcctgaaacaagatatgtaatttatattaggtcacaaagctagtacacaacagccaagattcaaacttctcacctatctgactccaaaacaaattcttctaacatactgcaccctacactctcttcctttccgcctccactatcagacatctccctgcaacactcccattagatgatcaactaagattatctggttacaattaatggacctgaggtagcttggaataaagggagtattacttcaacaaatatcttacttagtgccatttcaaaagttttcgtgcccttaaaggtgtttttgcctctctcagggtgagcagggaaaaatattagtccctacagttgttgttctgataaataagattgtttatttcaattcccttataatcccaataattctccattgctaacatcaaaaagaagtgtttctggacttaaaatccctgctttttgacatgagagaaaatttccattaaacatctggctcaggaacacttacactcggtgatagcagttaggcaactggtcaagagtaaaaaaaaaaaaaaaaaatgagataagaaagatgactcacaagagcatacatatgagcaatccggtcatgtaatgacattggagaagacagcctatgggggctgtccttcctttctttcctttttaacaacatattaaaatcatgaatttactaagaataattaaaaagaagcattacttcttttcatggatttttaaggaagtatgtttgtcctatttttttttttgaaacggagtctgactctgtcgaccaggctggaatgcaagtggcgcaatctcagctcagtgcaacctccgccttccaggttcaagtgattctcctgcctcagcctcccaagtagcccagctaattttttgtatttttcgtagagacagggtttcaccatgttgactaggctggtgtcaaactcccgacctcgtgatttgcccaccttggtctgggaatacaggcatgagccaccgcgcccggcctgtcctatgtttttatgagcaataagagggagagaaaaaaattaagatttcaaaacacataggtaacctccagtttagttacactcaagcttattccctataagaaataaaaacagcatttaaatatctctgttaaataatcaaccccagtgtgcayagcagaaagagaggtcaactgggccatgagggaaaaaaattgagttctgtattcagctctatcaccaactaaaaaattttaagcatttcacttcatctctctgaaaatcacttctttctgttttaaagatgaacaagtttaccctagcatttacagattaaatttttgtttcaactgtttatgaacaactccaaatgtctgagattgtaataatttgtaattagtctccacatgaattcagattaaatactgttgaactgctgtgcaggaaggaacatgtctcttaagtgaactcaagggtggcaaacttctctaaagagccgaacagcaggctttgcaggtcttatggtctctgtctcaattactgtattctgctrctgtagtgcaaaaactaccatagacaatatatatgaatgaacagagctatattccaataaagctttatttctggacacagtttaaatttcgtatgatttccatgcgctacaaggtcgttccaactattttaaattgtaaaaaccattgttaggccaggcacagtggctcatgcctgtaatcccagcacttgtgggaggcacatcacctgaggtcaggagtttgagaccagtctggccaacatggtgaaaccccatctctactaaaaatacaaaattagctgggtgtggtggtgggcgcctgtaatcccagctactcaggaggctgaggcataagattcccatgaacccaggaggtggaggttgcactgagctgagatcacaccactgcactccagcctggcacagagcragactctgtctcaaaaaaaaaaaaaaaatcattgttacattacaggttgtactgatttttgaaaaaagtgcaaaagcaattcaatggaagattaatcttttcaacaaaaggtgctagagcaactggatatccttaggcaagaagaaaaaaaatggcgacctaaacctcacacctgtacaaaattaactcaaatggatgacagattaaaatacaaaagttaaaattataaaacttttagaagaaaacaaaggagaaaatctttgggatctaggacttggtatgttagatatgatgccaaaaacatgatccattaaagaaaaaaaaaaacttagtaaattggatatcaacaaaatttaaaatttttgctctgtgaagtatcccactgagaaggtagaaaggaccaggcacagtggctcctgtctgtaatcccaacactttggtaggccaaggcgggaggatcacttaagcccaggagtttgagaccagcctggacaacacagagagaccctgcctctatcaaaaaaaaaaaaaaaaaaaaaacattagccaggtgtggtggtgcacacgtgtggtctcagctactcaggaggttgaggtgggaggatcacttgagccccagaggttgaggctagagtgagccatgatcacatcactgtgctgcagcctgggtaactgagtgagaccctccccaaaaaaacaaaaacaaacaggctgggcgtggtggctcatgcctgtaatcccagcactttgggagaccaaggcgggcggatcacctgaggtcaggagttcaagaccagcctgaccaatatggcgaaaccccgtctctactgaaaaacacaaaaattagccgggcatggtggcagatgcctgtaatcacagctactcgggaggctgacataggagaatcgcctgaacccaagaggtggaggttgcagtgagccaggatcgtgctactacactccagcctgggtgacaaagtgagaatccatctcaaaaaaaaaaaaaaacaaccaaaataaaaacaagcaaacaaacaaaaaggatggaaagacaagcaacagattgggagaaaatatgtgcaaaccatacaaagaagctgcacctgtgatctacaaaaaattatcaaaacccagtaataaaaaatatacaattcaagggccgggcgcagtggctcacgcctgaaatcccagcactttgggaggctgaggcgggtggatcacctgaggtcaggagttcgagaacagcctggccaacacagtgaaaccccgtctctactaaaaatataaaaaagtagctgggtgtggtggcaggcacctgtaatcccagcgattcgggaggctgaggcaggagaatcgcttgaacccgggaggcagaggttgcagtgagccgagattgcaccattgctctccagcctgggcaacaagagtgaaattctgtctcaaaaaaaaaaattatatatatatatatatgtatatgtatacacacacacacacacacacacacacaaaattcaattagaaaataggcaaaaggtataaagagacaytttactgaccaggatatatagacagcaaatgatgatatgaaaagatgtgtattatcactagccatttgggaaatgcaaattaagatcatgatgatgtatcaccacacgtctattaaaattgctaaaataaaaatagtgacaataccagatactggcaagaatgtggagaaaatggatttctcttacaccgctgacaggaatgtaaaatggtaccgacactccagaaaatactttggcagtatcttaaaaaacaaacaaacaaaataaatatatatagtcatccttggtatccatggaggattggttccagagcctcccagggcaacaaaatccaagatgatcaagtccttcatataaaatggcataataattgcttataacctatgcacatcctcccctatattttaaatcatctccagattatttatacctaatacaatgtacatgctatataaataattgttatactgtattgtttagggaacagtgacaagaaaaaaaaagtctgcacaagtccagtacagacaatgtttttttgaaaatattttcaatcccaggttggctgaatccattgatgtggaacccatggatacagagggctaattgtatttaccatacgaccaaagaaatgaaaagttacatgcacacaaaaacctgaacaccaattttcatagaagctctatctataatagccaaaaactagaaataatcaaaatgtcctttcttatacgggaatgattcaataggtgaaccatggtacatccataccatggaacactattcggcaatgaaaaagagggatggatctcagggacatcacactgagtgaaaaagggcaatctccaaagatcacatactgtatgattcaacttatataatagtctcaaaatgacaaaacaggttagtggctgccagaggacagggacagtagagagacagagggagtgcctaaggctgtaaagggtttgtggtggtggaacagttctgtatcttgattgtagtggtggttacactaatctacatatgataaaatagcatataactacatatacattgtaccaatgtcaatttcctggtgttgatattatacaatagttatgtaagatgtagccactgagggaaactggtaaaaggtaaggacttgactatgtttgcaatttcctgtgaatcattaattatctaaaaaaaaaaaacagttaaaatagtttccaaaaatatgaggataagcgaaggaaggacatagctttgtaagtaacaagaatctgcccactctccttattaatcttagagttgttttagggaccatgcataataaaataataaaggccggttttaagtaagtgcctacaatgagccaggcactgctgtaagtactttcacacaatgccctatttaatccacacaagttccttataaatgaaataccacaaccccattttatagacaggaaaagtgcagttgagagagggtaaagcaatttgttcaggctcacacagtaagtgttagagccatgatttaaactcagattaataccagaggcatgcctcctgcataccactgtaacaataaagatgttcagaggacaaaaaagatatcagtcaaactatgtgcaaaagcctggattaaacaaagttaaaccagtttattttctgtagggttttcaaaacttttaaaatgccagtttgccaattcatgttacatatgtagaaggctacagtacacagtttttctcaaatgtatttgaccaaaaaattctttttcacccaaaatatagtttgggtatataatccaacaatctctcagccaaaagttaaaatgtttaaatgggcttatcttaacccacttctcttcttcacatgttggcaaactacagatatttagagtggtgttgtccagtgtggtagccactagccatatgtgactaattataaattaattagaattaaataaaatcaaaatttcagttcctcaatcatgccacatttcaagtctgttcaggaaccacatacggctaccatattggtcagcacaaatacagaaaatttccatcatctgagaaagttctatcagtcagcattaggtcagaagtgtgttttttaaagaacatggggcctgtgcaatcttcagagaaagattgtaaattattacacatgttattgccactatcccccataaaacggggccaggtcagagatcctcgatgatataaagccactgtaatgtcaaagcacagggaaaaggtaaacaaaggagtggaaaaaatgaatagcaggaagagaaagcaacatcatgaagcctggagatgaagcttgaagcaggattcaggagcctgggttctactgcctgttatgccaatattcacctttttaaaaaatatttaatttttttgcacttcatgcgaattaactgtgatttgattgaacaggcctctttactactttgggcctcagtttccttttctacaatacaaatttaagccagaggatcactaattccctctagttctgtacagttaaaamacacacacacacacacacacacacacacaagaaatgagaaagtagggaataaaagtaaaaataaaaagagagcaagatcattgcatattggtggtgaaaactggcagtcctgtcatcttgccacaagttctactcccaagatttggatgccaccaaatgaataaaaatttaatgctattcaataaatacttattgagcaattatttgcaacgaactacagtattcggaaatagcaccaccaaaaaaaatgattagccttaagactcaatacgtggaaagaatgcaagactcacaaaactttaggttgaaagattgtctcattaacatgtaataacctaactggtccagtactaagaaacaagtatttcaaatattcctgaggaaaaacaactagtaaattatataaaataatatataaagtacaaacatacggcataatcaaaagcatcacatttcttccacaaagaatataaataaatgctacaggtacttgggaacaggaagacatcagttctggccaatctaatttttctagaatccacatttaattggatactctgacattttctagtaaaatattcttgagggctattggaattaacagatccacaaagtgtgctagacagaatcaaatgcaactgaaattccggcctctactatctactgcacaaattcccacttttcagaggcactgttggtcctatttcctagtatcaaagggtagagaaaaccttccacatgcctattctaagaatttaaatagctaatatgaaaactttaaaatgatttttacctctagattaaaaagaaccaagataaactgcgtctgatattttaccttgcagaagctaagtcaaccagtgagtcgtgtaacctttatatgaattccctcctgaaagactggaaccatacccctgactattctggagcaagggagagcagataactaaagctctccagcaagcaaaacaaggagaagggattttaggaacatgccttttctttggaaaggcattttttagtaccccacctactaatctaacgcggcgcggaaaccttgcagaatttgaaaacaaatgctgagaggctccgggggaccggtaaagggattagcaactgacagctcggcctcggagcgagaagcctcaagtagttagatcaaaccgtgtcaacgatctgaaatccagggtccaccccagtgagcttagagaagtacagcagcagaaggtaagcaggggtttggcgtctttcagtcctaaagatgcgggatatcggaactgagagagacctagaacccaagccgggcagtttgcctgctctcacctctcttgggggctttgatcagaggcacccctccagtcctctcgccgttttcctgcttgtccttgtgcttgagatcggttccgcaggagctgggatcaccatcggggccgcggtggtgatggtgcttgtgccgctccttgtggcccttatgcttgggcccggccgcgctcaccgtcagaggcgagaaggtgaagagggccgaggtgcttggggccgggagaggggcagcgacagcgggcccggcgggtgccagcgaaggtggcggcggaggcggcaggagaagaggctcaacagggcctgggacagttggggctgcattcgtyggcggcagcggcccaggatgttggcggctgcgacgccgccggtgagggggagcgagagggggctcctggctcggccgcccccgcttctcctgagaccccccactgctagatcggcgctgccgtttaactccccgcggggagaccccagcatgaggtttctccttcccctctttgtccggctcctcctgcgccgccaccgcccgtactacgcgcaccgctccgacctgcgcagccatttcacccacaaacacacatttaaatggcccgaccgcccccccgtccgcgcakcgcgcaagcgccgcccgcgcactgcccgctgggcattggagtctctcctccgccctccacttgtcggccgttcttcgtccagagatgaacatgccggaagcggccgttcccagcttttctccgcaggcctctccaaccgagcttctattgtaaagcaccctatgccgcgcaaagcgtcatgggagctgtagttccgccgcgcccccgccgcgtccccggctctgagtggaggagtggaaagggagcgtgcgcgaagtcacgcttctggctgcgacgcaaccgccgctgggcggtgagttgccgccaaccgccctaacggccgaaacaatgttaatggctttcagagtctggcggcgcgttcccattatcatcttcctgtgacccttcctcattttacacggaggaggtggtctccacagtgattttaaatttaatatttctctcataacctttgtgagataaaagaatcttcatccttttaactttgacgagggatgaaatgaaggtgaaaagaggatttagtaatatgtaaaataagggtggttttgctgtaaaaatatgatagggccgcaattcagaaatgttttcaagcatctggggcattgctatggttacaactacaggcctacgaagtcaggtgcgagaactgcttggagtcctggtgaggacggcccctcctcgccatccggccacatcccctctaatgcctggaaatgtccagcatttattttgaatatatccctacagttgcgaaaaattgtagatggaaaaccacgtttaagattttttataagtttttttttttcaaatcttaaggataagattgcataaatttgaaaagtgtgcctaccggagaacacaccaaaaatcatcactgctcactacggatagttgttgctcagaaattcatttagaatttcatcctcgctttagcttttacctggggttcttttaagtatttatttagagacgggcggggcggggctcggtgtctcaggccggtaatcccagagctttgggaggccgaggcgggaggattgcatgaggccaggagttccagatcagcgttggtaacatagtgagcctctgtccctacaaaagtattttttaaattatctgggtgtcgtgacacgcgcctgtagtcccaggtactcgtgaggctaaggtgggaggagtggtcgcgccactgcactctggcctgggtgacagatctagaccctgactcttaaaaaaaagagacaaggtctcgctctgttgaccaggctggcctccaactcctgggctcaaggaatgagtagctgggtctacagatgcactcatggtgccctaagtaactcatggttacctagaattcttttagtatatttgtttattgataaagacatttggaagtaattgattacaatgatatatactcagcagataaaattactgtggtttgatttcactagtttctggagaagtattacctaaacactactgcaatgaagtcagtttaacaaccaaaaagtttattgagtgtctgttggatacattgtactacaagagacagataataatacttcattcaatttgccctattggacttccaaatgaaaaatactgaagaacaaatgatgtttaaacaatactacatgtttctaaaagttataaataaagttatttaaataaaaatatttttaatgcattaggggaagtcaggtggattctttgtaaaaacaattacctgccaatttatttactacataaaattagagttgaactagattttcttatggcagatccatattcatatagaaattcattttaaactagtatttctgattggttagataaaaattgcacatgatctgaaagatcctgtataaacatatacaatttatatcttttgctaccaaaagatagctattatatttcattgattacttttctagaattggtaatttaatgactttggttaaaacttatcaggatttcagttgaattccttgttacattcaaataattgtcattatttgcacattttattctaataaatataatttctcattttcttaatattccagttttccacaacatttgggaagatttacaaggtatactccatttaggcaaaaataactgtcagggaatagtcattgtcaagagcagtttgtattgcaacccacaaagtaagttttttttttaactttttatagtatattctggcaatgtagaaattagttgagatccaaatcttacaaaccttttgaagtttatgtttatgtaaaaaagtaaaagaaaataaaaataactggcaaaaatgaaaaataaatccattctaaaagtgtttctcatatagcattctgtacataagctcaagtgacaaacttttatttgcagttttcaactcaatgcaaatgatatgaaaatgcaaaactggcacttattggcattttgcttttcttttaaaagctattaacacattagcatatcttcatatttgatattatgcatatagagcacttattttaactagcagtattctagtagttttatttgcaggtgtacttgcagcccatattattataaatctggagttttattaaatattccaagttggtggtggattccttggtcctttgggttttgaaaaacggtttgcaaaacctgggaacaaaaataaagttgaatgaaaagaaagatgttttaagtatagaaatgaatacttggattttagagtatattataatatatgcaaatacatggtctttttttaaatgttaggcagcatcttgaccagtttagtaatagattataaagggattatagtaatctaaagcttaaatgataacagaatactaataacactttaaatttgaagagcacttacaaatttaataatggtaataatagaatgtaggaccctggttatatataggctttgataatttagtatataatatcatttgtctatgactttttgtcatccactccatcccattaaatgaagtcaggaaattttaatttcacaaaaatatagcaccgttacttataacattattgtattacatctagttatacctctatgtcggtccagaaatccttcaatttaccaagagattatgtttgaaaatcttagaaaaaataaacaatcctgaaaaactaagtaggtaagtaaacattattatttatctttcttcttcaaacttgttccccctaccccaccccaaagaaggaggatgagaaaatttttcacaactaatgaaggctatttctggatgctttcaaaagatgtgcatgttgatgatgttggttctttatcatttcagcaacatgtgactttatgacttttctttttgatggtagtgtctttttgtttgtttgttttttgtctgagacagagtcttgctctgtcgcccaggctggagtgcagtggcgcgatctcggcccactgcaacctccgcctcccgggttcaagcgattctcctgcctcagcctcctgagtagctgggattacaggcgccagccaacatgcctgggtaatttttgtatttttagtagagatggggtttcaccctgttggccaggctggtctcaaactcctgacctcaagtgatccacccaccttggccttccaaagtctggggattacaggtgtgagccactgagccaggcctaatggcagtgtatttttaagttatcttacacttagcaactttagggacttaaagtaagaaatgaaatgtttgaagtataggggaataataaaatgaaaaactcaaagatatacctaaacctttaatttcatcatcatacaaattgtattatctaccttaaaaaactgatgtaaggatcaaatgagatatttgtgtaaaaagcgaatggggcagggtgcagtggctcatgcctttgaataatcccacactttgggaggccaaggcaggtggatcgcttgagccgaggagttcaagaccagcctgggcaacatagtgaaaccttgtctctacaaaaaaacacaaaaaaattagccgggcatggtggcttgcacctctggtcccagatactcaggaggctgaggtgggcaaatcatttgagcccagggaggtcaaggctgcagaggggaaaaaaaaaaagaattgaaaaaaaaaaacagcatccagcacaatgcctggcacatagtaagtactcaaatgttcctcaggccagtcatggtggctcaaacctataatccgagcacttttggaggtgagtatggaggatagcttggggccaggaattcaagcctatggtaactactcaaatgttgcttaaatttcaacccagaagccaggcgtggtggctcacacctgtaatcccagtactttgggaggctgaggtgagtggatcacctgaggtcaggagttcaagaccagcctggccaacatgatgaaaccctgtctctactaaaaatacaaaaattagctgggcatggtggcgggtgcctgtaatgccagctacaggggaggctgaggcaggagaatcgcttgaacccaggaggctgaggttacagtgagctgagatcgtgccactgcactccagcctgggtgacagagcaagactccatctcaatttaaaaaagaaaaaattaccaacctagaaaactatgccagaactggaagagaaggagagtagggaaggggaaagaagattcaagaaaaaaaagcacattcaaatttgttaatggtgatgataaaaaaaaattggtggaggggacacacagcctagttgatgtacattttactcttccgagtggcaagaaagaagatggaaggaatacttttggttaaatagtttcacacacaatagtcagaatcatcctgtcagtacagatcacttgattgtaacccaagtggactaggaatagagataaggacatatgttagtattgagtacctaaaattttaggaatgcatatatttgatctctttcactggtcaattctcagtagcttaaaacagtttcgagctacctttttttgcatgtgggccaattcagggaaaataaacctgaatcataaattttttcattcagatttaagtacttttttgagtaacatgcacttaaattgatattgccttaaaaaagtaagtgctgatttttggggttttttttccaagacagagtcttgtactgtcgcccaggctagagtgcagtggcatgatcacggctcactgcagcctcaacctcctgggctcaagtgatcctcccacctcagcctcctgagtagctgggactacaggcacatgccaccatgcctggctagttctaaaaaaaaaacatttttttgtagagacagagtctcactgtgttgcttaggctggtctcaaacttctggccccaagtaatcctccctcctcagcctcccaaagtgctggaattacaggcatgaaaatgctgctttttaagtaggaaaaatgttcaaatctaggcatatttgagaggaagcaacatggaggcagctctctaatattttatcctcatattagattatgtagactgttgttaagctaggtaggcctagagtactcaagttgtatcactgatttagagtaaagaaggaagcagagaacatttatgttccaggtaaagttgggagcttttttctttttcttttttccttttttttttttaaatgagatggtcttgctatgttgcccagactggtcttcaactcctgggctcaagggaccctcccacctcaacctcccaaagtgctgggattataggcatgaaccacctggcttgcttttttcatagtttttacaatattctgtgtgaatgttttagctaaatgatttcatataaatcataacttattttttaaattataacttttttttttgagatggagtctcgctctgttgccgggatggagtgcagtggcgcaatctcagctcactgcaacctccgactccctggttcaagcgattctcctgcctctgcctcctgagtagctgggattagaggcatgtaccaccatgcccagctaatttttgtatttttagtagagacagggtttcaccatgttggccaagatggtctcgatctcttgacctcatgatccgcccgcctcagcctccaaaagtgctgggattacagatgtgagccacccctcccagcctaaattataactttttaaacctcagagttaatgaaatccaaacaaaattttatggcaaaaaagacagatccagaaattttagttaaacattttgtgaagatgacaca
